United States Patent Application Publication US 2008/0114160 A1 - sequence listing, part 64

SEQ ID NO: 23025 - DNA, 14782 bp, Oryza sativa
aaatctttccactctccagtgccaaccccgacaagaccgtcaagatcggggcattactaggccaaaaataggaactcgcgctcatcaccttcctccacgacaatgctgacgtgttcgtttggcagccgtccgacatgccgggggtacccagggaggtgattgagcacaaactcatggtgcgacccgacgccaagccagtaaagcaaaaactgcggagatttgcactagatcgaaaacaagccatacgagaagagctcgacaagcttctcaaagttggcttcatcagagaggtactccatccagagtggctagccaaccctgtcatggtgcggaacgccaacgagaaatggagaatgtgtgtcgatttcaccgacctcaacaaggcgtgtcccaaggatcacttccctcttcctcgaatagaccaactggtggactcaacagccggttgtgagttgttgagcttcctcgacgcttactccggctaccaccaaatcagtatggcgaaagaggacgaggagaagacagcattcatcacgccgttcggagtattctgctacgttaagatgccgttcggactaataaccgcaggaaacactttccagcgcacggtccagggctcacttagcgaccaactcggaaacaatgtcgaggcctacgtcgacgacattgttgtcaagaccaagtcaagcgactcattgattgatgatttgcgggaaacgtttgacagcctccgacgatatcgcctcatgctcaatccagagaagtgcacgttcagagtaccatcaggcaagctgctcggcttcctcggctctggcagaggaatagaagcaaatcccgagaagatcaaggcaatcgagaacatgaagtcgcctacaagactcaaggaagtacagaagctaaccggatgcatggcggcactaagcaggttcgtcgctaggatgggagagcgaggacaacctttcttcgctctgctgaaaaagcaagacaaatttgtatggacacagaaagccgaagaggcattcattgcactcaagcgctacctatcaaatccacctgtacttgttgccccctaacctattgaagaattatttctctatattgccgccacgccatatttcattagcactgtcattgttgtcgagagagagaaggtgcaacgaccagtctactatgtcagcgaagctctccacgacgcaaagacaagatatcaacagatccaaaaactgctctacgcggtaatcatgacattaagaaagctacgccactactttcaagcccacagggtcacagttgtatcctccttccctctcggtgaagtagtgagaaacaaagacgttgtcggccgcattacgaaatgggtagtcgagctaagccagtttgatgtccactttgtgccacgaacagtcatcaagtcccaggtacttgccgactttgtagccgattggactatgcctgataacaggtcagacaaccaaatagacaacgaaacgtggacaatggcgttcgacggcgcactcaatagccaaggagcagggggcaagattcatcttgacatcacctttaggagatcaattcaagcatgcaattcacctcaacttcagggcgactaataacacagccgagtacgaaggactactcgccgggataagagctgcagctgcactcggagtcaggcgactaatcatgaaaggagattccgaactagtcacgaaccaggtgcataaagattacaagtgctctaaccccgagttatctgtcacaccccgaagttttcctcccaagccaaaaattgaatttacaaatgaccccaagaaaatgcaggtgaaatcaggagaaaaccctaataaagtaatgcaaataataatcggattggacatgtggaatttttcttgagttctacatgtcaaaattcattaacaggatttttagtggaattttcagagctctagaaataattttaaccaattaaaattgagcaagcaatattgttaattccagggaaaatcctttttctttttctttttcttttttcctctctttttcctccttcttgtcaaatgggccgtcggcccatttcccttttccttcccccccctctctgttgggccggccgcaggccgaggcccagcccggtagccggctgcccgcctccctcctctcggggtcgccgacaggtggggcccacctgtcgggcccgtctccctcctcccgccgatcccggcgcgccgccgcgcccgaaaccgccgccgcgcccacgtctccgccttccccgggccacgtcgaccacgcccgcgcgtgcgccgcgtttcccgcgcccgttcccctctctctcccgctcgcgcccgcgcccgagatggccgggattcgaaaaccgaatcccgcctctctctcctccccactcccccacgtcggccggcgaatcccgcctcttccggccacgtccggccctctcttcccctatttaagcatcgccggcaccccctctcgctttttccccatttcgccgacccctcccgagctcccaatcgtccccgcgccttgcaaccacccgccgccgccgtttttgctacttcggccgccgctagccgccgctaggctcgccgccgtcttgcgccgtcgccgccgttagattcgcggggtcgagatctacctcggccgcctcttccccgttgaggttcgccgccggagacccgtccccgtcgtgcgccggtgagtgacgccatggccgcggccttcggccggcgctctcgctctctcgcgctctttcctctccctctaatccctctccttttgttcgttaggaggttccggagctcgtcccgccgtcgccatcgtcctccgtcgcccgccgtcgtcgaccgttgtcggtgaggccctcctcctcgttttctctctctcccgcaccgtttagccgccgcgtcgccgcctagctgcgtagccgccgctcctcctctagccgccgctctccgccgccggtcggtcgccgtcggccgtcgccttgcgccgctgccgcatgcgcaccgccgccgcgtgagcgctgcgccgccggcgccatggtcgccggttcggcttgcgccgtgcccgcgcgcccggccgcgagctcccaccgccgtccgatctacccttgggtagatcggggccgtcggttcggccgccacgtggagccgccgccccttccatctcccgtgccgctgacagtgggcccgcgagccgccgcccctttctctctctcccgggtcgctgaccggtgggtcccgcatgtcggcgccgcacccctccgtgctgacgtcagccctggttaatattgcgcaataaatgatttaaggtttttcttttatagtaataaacacagtgaatcttctaaaattcataactaattcatccgagctccgtttaatcccattcaagtctcagtaaatcaagaaaaatgtgtagaatccattaaaaatggttttgttctctgtttcagtagtcttatagcctgtttgcaatgtttgctttgtatgtcgctagattccggttctttcgacgctccggtgtacttcgagatagtcgccgaggttcctccagcagcagagcaaggcaagtcatgcttgtcacttgatcatattgatcctatattgcaaatgtcctaatgttttctttcaaatatcgcatttgttttgcaattatactatgggatggttaccttttgttacagccatgttattttgataccatgctcctttgttagcttgggttataacatgattagagttaggactagggtttgcttagccatgcttagttcaactagcacacaatggggagatctcatttaaaacctagactataggtttttatgataatgttggattagcggcaccgctttggtgttggttaattaaaatgaatcacatggtgggctgtgggtgcatggttttgctggtcgcacccatggcagttaaggaccggttcgcgggatgccctggaagaatttatcgtacttaccacaagccagcgtgggcaacggctgggcttgtagtgtagctttcctctagccgacgcatccaggcaagggtgggcgtgatggagtttggatgggccctgcgacggcctatgcggcttccggattcacctaggcacgagaggggactgcccgctgccttgcgagcagtgggggtgaaacctgaggtgtggtgtgcttggttagagggggttatgtgaagggtcctgtcacggcctctttccggtatgtcgtggtggcatgtcggcgcacggaaacgtgtcgtggggctgtgtcctgtgggtacagttgtacacctctgatcagagtaaaactattcgaatagccgtgcccgcggttatgggcggtcaaccagattcaccgtgattagtctcaccctagtgtaatttgttgaacttggatagtttaggtggaaggttgggcctgtcgcaacgtgggttagcgttggacagcggatgtttaatactgcttaattattacaactgttttcgcattaaattcctgtttataaatgccagtatttatgcaaatgaaccactttagctcttctttgttaattccctgcatcatacccctattccggtatgacttgctgagtacagtgggtagtactcagtcttgctctacttttcccaaccccagaggacgggtatgtgtcagatgaaggtttccccgaggagtaggcttcgtccgtgccgtcgaggatgcctgtggagtggtgttcccgctgcagtttagtcaaggcttagctccagtttcttttgttttccgctgcatttctgtaagacttttatgatgtttgtaagacgtggatctgaatgtcaacattgtcgtttgtgtaccccggctggtcctggacggggagtttaatgcacattctgcttggaattctattcgggaatttctgggcgtgacattatccaagtatctcgcagaagtcagaaagctagaaaaaaggttcgatgggatcgaggtccgacatgtataccgcaaggacaacattgaaccagatgatatagcacggcgtgcgtccagacgagagccactcgaacctggcacctttctagacgtcctgacaaggccatcagtgaaagacgcaagcggtgaagatagcccggtctccctcaacaacagctcgggggctacagaggtagagcgcgtcgttgccgatatcgagaccacagacgactggcgcaccccactcatcaaattcataggcagcaaagagttgcccgaggacgacgcagaagctgagaaaatatcctgtaaagcaaaggtctactatatgatcggcaatgatctatacaagaaggcatcaaatggggtactcctaaaatgcgtctcgtccgacgacggcagacatctcctcctcgacatacatgaagggatctgtgggtcacatgccgcccggtcggacattagtcggaaaagcttttcgacaagggttcttctggccaaccgccctcaaagactcctgcgacatggttcagcggtgtgaagcctgtcaatttcacagtaaacacacaaggctaccagcgcaagcactcaagactatccctctcacttggccgttctcgtgctgggggctagatatactcgggccattcccacgaggacaggacggctacaggttcctattcgtggcgatcgacaaattcactaagtggattgaagcgacacccacgggggaaatcaaggccgacaacgccatcaaattcatcaaagggatattctgcagattcggattgccccaccgtatcataacggacaacggctcccagttcatcagtgccgttttctaggattactgcatcaggctgggagtcaagatctgcttcgcctcggtttctcaccctcagagcaatggacaagtcgagagggcaaacggcatagtactacaaggaatcaagacccgcgtctatgacaagctcatgtcacatgacaagaagtaggacgaagaacttccatcagtactatgggccgtgcgtaccacaccgacaacatccaacaaggagacacccttcttccttgtgtacggctcagaggccatgctccccaccgagctacgacatcaaagtacacgagtacagaaatattccgatgaggatcaggaggagcagcgaaatgacgatgtgaatctgtttgaggaacatcgcgaacgagttaccgttcgagcagccagctaccaacaggcccttcaccgttaccacgagaagcgcatccgagcacgcacgctttcgatcggcgactacgtcctccgacgtgttcaaagccaagcagggcgaaacaagctctcacccaaatgggaaggaccgtacacgatcacacaagttctgcggccaggcgcattcaaaattgcagatggcgattgtcgcgagttggcaaattcctggaacattcatcaattacgtaaattctatgtataagtcaatagtatccatacttgtaagacatcttacagcttcaataaagcctatttttcaggtccagaccaaaatcaaagtgttccttcccgatgatcccttacctagatgacacctagcgttgaaacctaccctcatgtccctttacgctgtcttaacaaggcctccgaggaacctaagggaacttcagctggggccgcccagagccgataagaccttgtcggatcctgtagagacaaaagaccatgtaagatctggtcgtgtaagagttctcgccatgcgtattaaccaagccgtgtaatcggaaataaactttccaacttcacggctgggggctaggatcagtgcttgttcaaccgaggcaggtcaaaggtccaagagccttatcttccgagaagaattctccgatgacaatgctgggggctagggagagtgtataactcaaacgactaatcgaagtcgcgaagtgagaagacactcatacacaatacatccagagtaagaaagcttagttggatagatttcttttctatttcacaagtacttcttacaattctataaaaatccaaaattatattacactcttcccctaggacatttgtcataggacacggagactaccaggaaggccaatgctagtccatagactggaagaccttttccgccagcggcgccatcgacttcgccaggccatctatctccgtaggagttctccgagaacgagaaaacccttcatggaggaactcgaggtgcagctgcggacgatgatctcatatacaggccaatacatgcccccggcatattggctcgatcgacgacactcctgcttcagggcctcgtcgatacgctggctgatgccctcaagctgggcgcaggccccattcagccacgggatgtatccagtcgccgatttctcgggatccccacggggtacccggagctctctacagacccttgacatggaggtgcagaaactcttcagatacgagttgaaccacacctcgcggccccggagtgtctccacggcctggtccttcttcacttccagcatagtcctctcgagttccgcgacctcaaacttcgtcctccaatactggatgcgacgatcctggtcagcaagcgcactctcgaggtctgctcagcatggaaacgactaagtcaaactgctcttctctcacgagaatacaacaaatcaagtcgatccagacggaagagtaaaggagatgaaaacaaagataaccaacctaagggagtcgtcgccatgctcgtttccacaggcgaattttgagctacatcgccctccggcacatgtggctcgaacgcaagtgccggaacgatcactggcaactcaggctgcccgcgctgctggacatcctcgacatcaacatctctacagacgacaacaaagtactcaagatcaaaatgctaaagaaagctaaggcgatgactgcatacacaaaggcggttggaaccaatgaaagttttacaaagcatgactaaggagtacaagagagtcaaaatcctactcttcaaaaagtgggagaacagactcccccagatcgccgacttcttccatcacatccttgcgcgcgtcgctagccgccccctgatccaagattttccgcagatcgagtttagggtgcgccagtctcacacacgcaaggacatggcacgccccggtatagatcccgttggacgtctcctctccaatcctagccgcgtgcttggaggggatctcctccatcgccgtcgccagctccgcaagagaagtcgtcggcgagaactcatcgggattcgccgggatggtagacttgataccgcactccccggcgagctggtgcagaccagtataggtgactcgcaacgagccacggatttccgacaagttgttctcgcgctccgacatgcggtgctcgagtccctgccgttgtcgcttattgccggccaccagctcccgcatcttctggaggtcctcgcgaacctccgccaaatcatgcgccagccggtcggcgcgctcattcgccgacgccgccgccgccgccctcgcctccgcgatctcgcggctaatgccgcgagcaccagcctcaaggaggcaccccatctcaacctggagctcctcccaggtgaggatggcagccggcagacctcgaccagtggcgagattgctagctgggccgctaggtgttgcctcgcggctcctgggcacgaccacgacatccgtcgaggccacgataggagacgcgctggaggtccctccagacccgtcttgcgccgccttcgcccacgccgccctgcgaaaagctgcaactgagacaggctgcaacagtttgacgaagtgacaaaacctcaaagtcatccacttgcttctcgccaagcgtcactagccgttgccgacgtggaggcgggggagacgcgtccgaggcctggagtataacggatatgatgtgaggtggaagttttctgactacgtgatgaaagaacaggagaacttaccgagggggtgggtgtcttccgacgatgtccgaccacagaagagaatttcctcccctttttcagaacgttgccgccactcgttgtggcagcagcagcaacagcgtcagacacctccttggcgactttcttcttcagcgacgccgccacctgatggtccacgagcggcccgatgatatcagtcagagggagagcctacgcttcatgaagtcataatgcgatcccggaagaaaaatgcaaaaggaccgctgagtacacttacattgatggcaacgtcgcgctcggctgcccctttctcgcaaagggggacttggacgttgctcgccgttgtcgggccagtgatcatcagttggccgacacggcgctccacggttgcgctgtccaagcctgtagatcgagaccagaatccgataagtcgggaagaacacgcacataagggagccaatttaactaaaaagaaaaataccccgaggagaaacccgggtcgcgtcctccggcccagaataatcaaaggctggatgggctcgagcctggagcggctagatccgcctaccaatgaagtcggcagcgacttcataccccgacaatccccgtactcggaggtcatcaatgatatcgatgaaagattggagggatggggtcaaggcgagtttggcggtccaagatgaaatcttgtctagttgctcctcaggaacaataaaaaccggatccgaatcttctatctgaagatagaaccacctcccccgccatttgctgcgagatgaggggcactggaagaggatgtatcgcgacttcaggccatcccgaagtcggaaaccgacacatccagacacctttttgggttccatccaactcaactcatagtaaaagcggaagaggtcaagaaacggctctaccccaatgtaggcctcacaaagatgcgaaaagatactcatgaaggcgatggaattggggttcaaatggagcaaggaaagactgtagaaattcaagaccaagagaagaaattcagaaggcggaggaagaaaaccacagagaataaagtcctcgatcacaaccatgcgacctaggacaggttggggttcagtacctcctacttctctctccgcggtcccgcgaccgggaagggcgccatcctcctgcaacttctttagcgacgtgctggtggaggtagacttgtcgagatccattgccgccggggatcgccggagaaaggaccgagatgagctagctagggttttttgcgggagcggagaagacgagggacgcttgggggctggagagttttttcacaacaggcggacttcaaattggatccccaaaactcccttaaatagacgcacttccgacggtgcgaattccaaggaaaggagagagatggccgtcggaaatttctgggtccgttacgcgcggcagtttttcggacttcaatttaaattcactcatgaccgttgagcttcacctggcgttgtcgatcactccttgtctctcagtcctcacaccgagaacgacgacaacttcgacatcagaagtcgcgatcggtttcacgagttcatataagcagaagtcgggggctactgtcagggttacgggtaaggtataccctttacccttcgatatacgtcacatattgatatggtatacttgcgcgtatacggacgttttcggcatacgttaaggaaattcattatggagttcacagatggaaggagtcctactcggatagaactgggtcgtcattgtatcgtatcgggtccgatgtctccgagtcttacttggagaccagttgacctgtggtacaaaagggaccccccggggaggaccttgggcatcgaatcttaccgccaacacatccaccacagcctacgaagccggagcctacaggagccaagtcgccgggtgatctagtcgaatcaactcgactacgatctcgtcggtatcgtcgagttccactattccctttgtaatctgtggtttccatcatataatcccatatcaactggattatggctattacctatcaaggggcctgaaccagtataatctttgttttctgcctactcgatgtcgtattacgtagatcctcgtaccagcgtaccccaataccctctatatccggtctactggtaacccccgtcgacaatttcaattataacaaaaatgttgcaagaattgagaacgttgattatctaaaaaaaattgagaacgttgatatttagagccggcttttggcatacctttatcctaaaagctatatatcttaattttgaatttaaaattacattttggttgccggccttatttccatttttacaagagaatgacttaaatttaaaactgatatataattgttataaaaaacatattttacaattttagatattaaaaataactataaaaacaaagatatttaaagaccccgatgaaattgacacttgtctttgctttaatttggactcattgtgacaaactgaattgaattgtttgagaagcgatactttttaaaagccaccaaataggacttggacaccctactccctactaagggtggacaaaaaaaaatcaagaccgaagaccgacaatgaaaaaaccgtatcacgattaaaaaaaacagataaattagtcactggtctcctgttcggtcttagctgtgagaagaccaatcaaattctcggttcttagctcttatttattggttacccggatggccgaataagaccgcagttggtccaatgcaagggaaacatatcatttgcagtactatcctttgactttgagtgactgacatatagacccatgctcattaggcccacgtgtcattgacccaagtcagaggttaataccgcagaggagattcaccccaatgcgagatctgccacagtgccactgcgcggtcagcttggtttagaccgaagatcaaactgcggttcggttaaccggaacatggttttttagataagttcggtttttcccatttgcgcgattgcccggaccgatttctcggtgaggaccgaaatggccgccctcgacagcttgacgaggcaaccacgtgacgggacatcccatccgggccgtccattcctcccaccgacggccgatctagcctcgtattccgtggctccgaatattttaaaattcccccgctccacatcgtccccgacgcaaaatcccacccccaccatgtccaaagcccacactgacacgtgggcccgaagcgcactctggccccacatgccagtcactgcgctggccccgggcaggccgtgggctacggggcgaggaggcatctttctcgcggcggaaagcgagggggacgacgcggctcaggaatcgaggcctgtggggcccacctcccccctgacgccactgccatgtgggcccgggaggacagcgtgggcgccaccgcagcactgagaaggggaggagagtggggctctcggcgactcgagtgggtataaaatatggtctctctggatccatcccctcctcttcttccaatattattttttcgccttttctgttcgtgtgttcgtggtggagttcatctcgccttcccctcttccggtcctcccaccgctcctcgccaccacaaaccgccgccgcctcctcctctcctatctggtatcgtaatcgaaccagcggaaaccgctattcgtgtgcgtgttttttttctattcaatttgtttgctcgggccgcgtaatcttgggagttatctgcaatcagttttcttttctttctttttctttttttttttcattttgaatggagtgaatcgtgtggaaaaggtggctgttgtagagtttttagtcttaccatgaactgattgatctacgggcgagtgggaatttagcctgttcttggattttagcctggttgcagcatctagtgtaattgatccagtttgatttcttttttttttttgggaataaatcagtgtgaggcagcctatgaaccgaacataagtatctagtattagtctgtgagacaaactatccctggctctataagagggaaacctgatgtgtctgaaagaagttgcgagttcaagaattcctatctgaaaaaagcaaagatcaggcaaagatcatcagtttggatcatgtataaatttcccatgttgcagtatgtcttaattaggaggattattcattaacaaatgtcatgcgaaaaatttatatcttcggaaacaatcgctttatcattcatgagcgaattattacttcgattaggcggatttgtgataattgatgaataattctaagtaatccttgacagttcagtgatttggactggtactggatggtaggtgcccatctgtgtgcctttttgacttgtctatatgccttggtaccattgtgaaacttcatgtattcagtcttgttggattttgtaagttgcattggaatgatatgcttatgtaacattactagtggagctgttgccctgatatgttagaaattgtgccattttttgcagtgcggaggaggtataccacacctttggattttggggaagcagtacgttgattggaagaaatgtcaggaggtaggcaatcatactggtgctaccaatgtagacagcgggtgaggccccgcggccaggatatggagtgtccctattgtgattccggttttgtgtctgaaatggatgatgttgatgctctcatgcgccactttgttgggatggatcctgatttccatcgtgatccaagattcggtatcatggaggcaatctctgctgtgatgaggcatggcatggcgggaacgaaccgggaagttgatgtgagaggaaggccaaacatattttctgacctggagatggagtttggctcagggccatggttgctcttccgtggccagcttcctggtcatctctcagaagacaatggttttgatgtattcatcaatggacgccgtggtgttggcatgcgcagagcaaacattgcagactactttgttggacctggactggatgatctgattgagcaattaactcagaatgatcgacgagggccgccacctgccactcaatcatcgattgatgctatgcctactgtgaagattacacagaggcatctcagtggagactcacattgccctgtctgcaaggacaagtttgagctgggatcagaagcaagggagatgccatgcaagcatttataccactctgattgcatagttccttggctggaacagcacaattcctgccctgtttgccgatatgagttgccaccacagagctctactggtgctagctgctcgcgcacaagatcaaccaaccaaagtcagagttcaagtagcaatgggagaaccaatggacgtcaaaggagaaggaatccgttctcgttcctatggcctttccgatcatcaagctctagctctcgttagattagcctggtaatctggttggagtcctcaagactgtttaatcgaagatgctcataaaatgggtgttatgcatggcatcttatcgtccaatctgtaatgtatggcttgttatgatcaccacggaatgcttttccttgcaagtatatccttccacagcttcatatcagatacttcttttactattctgtttacataaaaggttaacgatagtatgatacttgtttagatagctagagaaggttattttcttaatgttgtattacttaatgttctacagcagaatatacttctgtcaactgtcattaagacgtttttttagctgtaaatctcaagggatcaatggtagcaagcatgatgatataatatagaagcaagttgcctgaaatttcagttaaataagtactagttaatgctaggttgtgtccttgtgtcatccatgttggcatattctgcctgattactatttgcctgtgcgttt

SEQ ID NO: 23026 - DNA, 1100 bp, Oryza sativa
tcataagcatgttaatttcttcacttctattgagattaatcaaattggtctatgtctgaacaaggaaaagcaatccgtgcaggttgaacttggaagatccagattaacacataaagaagatctgcttgatgataagcctgtagaggaggttacgctttttgatgtgcaaaaggtgaagtttgtccggcgctctggtgggtcaaatgacagtgcagtctgcgccctcataaatgtaacagaagtagcagtttggtgggaacctgatccctatctggagttacttgaagtagccactcgacttaaatccattatgcacaggatcaagcaccagaattctgctaatgagataaaagatgatacagtgtacacggatactttggcaaaaaaggattcactcacagaacatggccaacaagaaaaaccacagaagaaacaagaattggttattgccgttgatgtggaatctttgaaaatttcaggtgaacttgctgatggagttgaagcaatgattcatgttggatccattttttctgagaatgcaaagatcggtgttttaattgaaggactagtagttagtttttgcggtgcacggattttcaaatgcagtcgcacgcagctatcacgcatcccagtttccatttcagacagccttcccgataagaagttgcagtctgcagctacatgtgattgggttattcaatgccgaaatgcttatgtctgcctgccttttaggttgcaactacgagctatagatgatgcagttgaagacacattgcgggccattaaacttatttctgcagcaaaaatgtctgtattatttcctgagaagaaatctagcggtagcagtagcagcagcaaaaagagcaaatcaaaatcaacagaatttcggtatgtgagggtcattgtacgtgacctcgtagcagaaattgaagaagagcctatccaaggctggcttgatgagcatatcgatttaatgaagagtgtatttaatgagtcgacagtaaggttggatctgcttgatgagcttgcttcagtcaaacataaagactctcccaaggcaaaattggatggatcttcttctgaaaagaacaatggatgcc

SEQ ID NO: 23027 - DNA, 697 bp, Oryza sativa
tttcactgaagtggagcttttcacttaaaccttctacaactgaacctgtgaagcatcagcagaatattcaggcagtttcgaataattcaccgactgtgaatgttggagctcatgattttgtctggctaatgaagtgggttaacatattttttcttcctccccataaacttagactgttttccaggtttccacgctttggggttcctagatttatacggtctggaaacctgccacttgatagagttatgaccgaacagtttattcgttttgatgcttcactattgcagatcaacaatatgccgctacaggttgatgatcccgctaatggattgacactgcactttacaaaatttaggcttgaaattgctttcagtcgtgggaagcagatatttacttttgactgcaagcgtgaacctcttgatcttgtctaccaaggcatagacctgcacttgctgaaggtatctatcaagaaaactcctgaaccatcaatttctaaggatgctcaggtagaaaataagagcctgcatatgaaagctacagatagtcctggcaaaaacaaaactagttcaactgagaaaagccgagatgatggattttttctgtattctgattatttcacaatacgaaaacaaactcccaaagccgatgctgctagattatctgcatggcaggaggatggtaggaaaaaatcagaaat

SEQ ID NO: 23028 - DNA, 1033 bp, Oryza sativa
aagaggaaggaacaaggcatttcatggttaatgttgtccaacctcaattcaatctgcattcagaagaggcaaatgtgagtatactctgccagcatgtttctcagattataatttccaagcagcacttagcagttcaacaaatatcaggttgtttgttcaatgtatattcttctattacttcagtcataagcttgccatgcaatgaattaatctttatctccattcctctagcaattgccaacttatagcatataacaagattccaaaactaaccaataggagaaaatgacaggctttctaaagcaaaatccatatgtaaatttgaatttcaaatgattatgtggtggttttcatcagctggataatgaaaattcacattcaaattattctagatccaatatgttttcaagaaaaaatattgccaatagactctgctcgtaagctaatggatttaattgcaactttccaagctcatcttttgttattccttagtagtatcgtggtgttacctgtgggagattttttttttcagtatttgttatttacacctaaattttagtagcacttgtgaatgctgaagtgacttaattgcctgttcactaacatcagggtaggtttctacttgctgctggtagcgggcgggtcctggttcgttcatttcactcaattgtacatgttggtcaagaaatgtttgagaaagcacttggttccagcaatgtagccattggagagaccaggcctgaaatgtcttggtcacgttatgaagtttctgtaatgttggagcacgttcaggctcatgtcgctcccaccgacgttgatcctggtgctggtattcagtggctacccaaaatccatcgtagatcatctgaagttaaacgaactggtgctttgcttgagagggtatttatgccatgccaaatgtacttccgctacacaaggcacaaaggaggaaaccctgaactaaaggttcttaatgatttcattttggtttgcaccttccactgaccatcttttggcaggtcagttaaagtag

SEQ ID NO: 23029 - DNA, 3535 bp, Oryza sativa
caagaaatgtcatcgacaagtgcgaattctatgaaatgtcatcatacaagcgactttgtcctagaaatgccatcgccgttagggttccgtttaggggtggtaatgggtcaaggcccgtgggttctttcacaacccatctcaacccttaaatatttttagcacaaaaaactactaaatttcagccgtaccctttttggacccaaccctcacattttctaggctaaaatgttgggcccattaccacccctagttccgttagcagccctccattaagtgctataacatgaataatgcatttaacgggacaggatggatgaaaccctaatagcgatggcatttctgggacaaaatcgcttgtacaatgacattttatggaactcgcactcattgatggcatctcttggacttagctgtttgtcaatagcatttcttggatttttttttcgtattttagtttctgtaaattggattcaactgtagacttcattggataattgatatgttaggtactaactatagtctatttttcagaactaagaagagcaacctatcctatcccctggataatgacgatgatgatgacactggtgaagagtctgatgcagttgtaccagatggagtggaagaggtagaattagcaaagattgatgttgaaataaaagaaagagaatggaagatactgctcgatgatatcagaactttgtctgttggtagtgaaatatctgctgatgagacccaaaccccaaagtctgatgatgctacatggattgttactggatcaagagcaagtctggtacgctgcagagcaaccttagttacttatgtttaaatcctaatttgcataaagttactttttgttgcaatgaattttattctcctgtaaactgtaatggatagttaatgtcttagttcatatttgctttagtcatgaaacagaatttaggatcccattatcataatataaataaaataatttccttttatgtcgctgaatctattgtgatgtcttacataacatctgccaggtaaaatgtctgaagaaggaacttgttaatgttcgcaatggtaggaaagaggtatcttctatgctgagagttgctatgcacaaagctgcacaagcaaggttaatggaaaaggaaaagaacaaaagcccttcatttgctatgcgagtttcactgaagataaacaaggttgtctggagcatgttagccgatggaaaatcatttgctgaagctgagataaatgatatggtaatttaattcatctccagtgaagcataatcttgattttatcttctgatgatacattggagtatttagtttaatttaatatggagaataattatcgttattttcttcatcaagtagacaaatgtacatgccgtcctgctcttgcactaacttccctctttttttatccctaaatctgcagatttatgatttcgaccgggactataaagacattggcattgctcatttgacaaccaagttgtttgttctcaaaaatggacttgctaatgcaaaatcagatactgttctggcaccatggaatccaccttccgaatggggcaagtaaggacactaatatttttccgttacatggtgtatttggatgttcaacatatgatacttgtgatcacaactttgtttttacaaaattgaaatgctgcaataagtactctctctgttccatataacaagtcattttgggtttgtcctaagccaaacgtctttaagtttgaccaagtatatagggaaatgtagcaacagttccaacacaaaacaaatatactataaaaatatattcggtggtggatttaatgaaactaatttggtgttgtagatgttaatatgtttttccataaacttggttaaacttgaagaattttgacttacgacaccaaagtgacttataatatggaaaggagggagcagacaccagacagtatctaattttggcaacctaatttttttagtttctgtacattagatgcttctttcatactatagcaaacattattaagatgctagtattacattttctcttcaagtggtattcagggtttgcatttttaacaataatacgaaatagatgccatttcacagagctatcttaagatactgtaaaaaatatataagactcagttaccaatctgtgacagttcatgggcaatatttgccaactctaccttctctttaattaagctggctagaagtacaatccaataagaaacttctgcttcatgaaaaggaaagtgcacgctaattctgtagcccagcttgatagggcatacttacaatacaaggatggtggtaaatagcatgactagggtctgatctttgttttacagtttacatcatttcatattttctccttcatatattcatttaacacatatagtctagcactgaccaaactgctgcttaactattttgaactcagaaatgcaatgctgcgtgttaatgctaggcaaggagctccaactggtggtaactcagtaatagagagtctcctcgtaagttctctctctctctctctctctctctctctctctctctctctctctcttatgactaattcctaatgcatgtaatttttgtaggattttttcttcttagggctgaggctatgattttaagttttatttgcttctataatttttgtatcagattaatattatgaataagcattagtccggtgtaacagtacacttaatgtcacttttggctttatgcttacctgcatggtgaatgactgcggcttccttttacccccattactgtaggtagacatctatccactgaaaatttatttgactgaagcaatgtacagaatgatgtggggatatttcttccctggtgatgaacagcacccacaaaagcggcaggttaaatcatttcatgttctttgtgctatgatttttccagttctagttatgcactaatgcttcctccactgttacttatctagtatatttgtgccattcctttttcatcaataggaacttttcaaagtctccacaacagcagggacacggcgagtaaagaaaagcacatctattgctgaaacgaacagtcccagtaaacaatcatcgaaagactccatgcttttacaaaagcctgaacttcgacgcacatcttcgtttgacaggacgtgggaggaaactgttgctgaatctgtagctaatgaactcgttacacaatttcagagtcagtcaaatgcgccgcctgaatctcaagatgctcctaaggaagccaaattagtacgatctgctcgctctactcgtgaagagaaaaaaaatatggaccctaatgaggtgaaacaaactagacctcagaaaatgatggacttccgcaacataaacataagtcaggtcagcatatactttgctgaatgtttttctgtttatacaaccagctgaaatattgtatacaacctgctgaaacaatagccattttcattttgtttttcgctaactgaatgaaatatcactgtttcatctgtataacatgaatttggttctgggctgcaggaa

SEQ ID NO: 23030 - DNA, 1998 bp, Oryza sativa
tggatttgccacttctgttaagggattattcagttcacaacgaaagaaagcaaaggcatttgtcctgaagactatgaaaggtgacgctgatcatgatttccagggtgaaaggagtgagaatgaaattgagttctctccatttgctcgacaattgactataacaaaaacaaagaagcttatacgacggcacacaaagaagattaaatccaaagttcctaaaggtgcaggtgagataccttttatttgtttcaaggaagtgatactaaattgttgataagctgattctacctgacacccttaaatagatggagataaagataggcaaagaaaaaggactggttgtcactgtcacttaattgcattccttgttcttaccctttcttggaacttgaaagagaagagccgttttttttttaaaaaaaattgcttaataagaacatatatcatgcatttgtttgtgtatgaactatgaagttgggaaaattgcatcgacattcacccacgcacacgcagagagaattgcaaatttaccttttagtctttctacaagcggactcctggaaaatttacttaaggtcccaagatccaagatccaatgtcccttgaaaatattttagattatatatatatccttgaacaaggaaatacctctggtgcaatgtagcgaaaattcattaagccgctgggacgtatctgcccttcttggagcatttcagttattcagtactacttctgagttctaacatacgttcgtcctcttgttcagctacttcgcaagaactcgggtcagagctgccacctcgtggcccttctgggaaccagacggactcctcctcttccgatgataacgattcatcgccaacggaaacgaacccaaaagattaagccagcaccggctcagaacaattggctctgagcctggtgtccattccagcttcgggtcagcacatcttggcgatgggtcgagagctacgaggcatttgaattttgagaagattttgtagtaggtgtttttcagcaattctttttacccctcatggatggagatttgaaataagtggtactagcaagttatctgtcatgtaggcgactggtagacaagcttacggatctcaaatgtgtagatcgagagtttatgggcctaagcaaactaatttgtgaagtttagagacctatatagtgtattttactctagatatatttttattttctcttactacacttttaatcgaagaatgttattaatttcttctgttccaagaagatgaagtaatcctgactttgtgccagatatagccattgtttaccttagtttgccttctaaaacaaactacccgcatgattatatatgttgcatcaattcccagtttgtcacaggctcacagctctcaactactgagagcaactgagcaagcataaactgggttctgacttctgaaccactattccagttaaaacttctcaaaagagtttcagaaatgtctataaaatattatgttggagacaactgtatgaaactttgagattaaactcaacttcgtgtatgatatctgaaactgaaagaaaaacaaaaaaaaaattagaagcttcccttaactgcaaggagggtgcagcctaagagtagcccgggttgggcctgatggactaatgtaatgggcctctcctggaccggcccacgagctggcaacaaccaggtaggtatataaagggatagttcactatgactcccttaactaatgagccaatctgattcatatccttaactattaaaacagtgccacatatcaggtcaaaactatcacgtaaacgtgacggcagcaaaaccattcttcaaattgcactggttttaataattggaggtcgagatattcagttgaaggatactcagattcagtcattaacaaagtaaaatggacttatatggatgcaagtggagcgagcaagcgggttttttagcccgcttatctcacttctagtttattttttcttctaaatttt

SEQ ID NO: 23031 - DNA, 3054 bp, Oryza sativa
gttccacacgatgcgcgggccgtgcgactactccggtactcccaacccaagacgcggactggaccgggcagctcatcggagtatagggcaccatggccgcctcgtcgtacgacggggtggtggcgctgtggctgctctggtactacgacgaggaggcatgggaatgcgtgtgtacccgagtcgccgccgggttcctcgatcggcgacgtggcagggacgatggggttcttcgtcgcccacgtgagcgacgacggcggcggcggggacgcgctcgctgctcctctcatctcaggggcatcggtacggagtttacaacctcaggaggggcgaggtggtggccgccggcagggagctcggcggcggcgacgacgtcatcctcgcgacgcagtatgtttaccaggagagcttcgcttctccagtggcccggagaggcgtcggcgacggcgctccgtcgccgcgaggagaactggccgccggcgccggcgaggcgtcctcttcgagcttgatcagaaattctccaggattttatggagttctaatcttttctttactttctttaaaatatggtaatggttgttcatggtcctccgtatagtggcatgtgtgcttgccagatatgtgtgtaattttcatctagtagtggattaaaaatttaaaatggttacatttcgaccatcctgatgatgcttatcaattggccttgatcagcagtctgagattaaacaaatttgtttgttttttctaagcactacagttttcattgaaaatatatttcttttctaccaagaagatgtgaagtgatcctgactttgtaagagatataagacataaccgtgtactattcaaccttagttttggtgtttctcaaacagacaactaagagcaaacataaaccgggctttaaagtgtagaacatccaggtatagtacctgtaatggtcgtaatccattgtaaatttggcgaacactatggatatcatctaatcatcatgtatatggaagtctttaaaaattttatagaagccttacatatagaaaatatcagtggatttttacgattaaactctcgctctagtcaaatatatttgactttgcatcgaatatatttcactggagggagtatgtgaaaattgtcaaaaaaaaaaaaacaaaggaattgccatagctgcctctgccgaaatgccgaggaaattccaatggcttggtttgatgctgtttgcggctattaaaaactctaaggcttggtcatatgctccctaccggggaaaaaatgaattacctaaaatgtaaaacttgaagaattcaggtaccgatttgaaatttcattgagctcagggtgcgtttatttctttgggtgtaaagttttcaaaatatacggacgtacatttgaagtattaaatgtagactaataacaaaataaattacagattccaccctgctgtgagacgaatttattaagcctaattaatctgtcaatagtaaatatttattgtagcaacacattgtcaaattatagcgtaattaggctcaaaagattcgtctcgcaatttacatgcaaattgtataattgattttttttatatttaatgccttatgtatgtgtccaaacttttaatgtgatgtttttagctaaaattttttgatctaaacgagccctcaatgcttcagttggcttgaaaaagaaaaagaaccctaaaacgattgaccaaaacagcactacagaagaaattaaaggtggttttgatctaatcagctaattcctttttctaataaatggaaatctaatcagctggagtaataattgtgctggtcgatgaatccccagctgttctctgcaagacatgtacaagccaaagtagaacccatcttgattttttctgcagatgcaagataagagtaggcaggatcgatcgaccagctgatccggaagctgccgcggcgtaggctagctgtacagacagtgcgtgccgtgcagaggagatagccaagcggaccctctacatggtgcaggagtactacctacgtggatctaatgcccagacttcttgtcattcgatcgtgtgatctgcccagacatgcttatgcactcgcagtcttctttgttcgccctgtactactacactactcccatttcagagcatatatttagatcctctagcaaatttttttagcatatcacatcgaatatttggacacatatatagagtattaaatataaattaaaaaactaattaaattatatgtaataaattgcgagacgaatattttaagcctaattgctccatgatttgataatgtaatgctccagtaaatatttgctaatgacggattaattaggcttaataaattcatctcgcaatttgcaggcagaatctgtaatttgttttattattagtctacgtttaatgcgaaagggcatgtagcctagtagttgcaatgacctgagtagcatcccaaggtcctgagttcaaatctccatatgagcgaatttcagattgggttatttgaaggctaagttcctaaaataagccaaaatggctacatatatccggttggatatattatttcagattggattatttgagagctaagttccctatttgatatgctaaattcctaaaatcaaaatggctgcatatatccagttggatatagaggccggacaaaaaaaaatacccttctctaaaaaaatagtctacgtttaatactttaaatgccttacggcgtgcatgtttaattcgatttaccacacatagacacaccgtactccagttcaaacctgtgttagtttttcaaacttcaaagttcaagaatactagtagtggtcacctgttgtagtagtatactagtaccacgcatacatgatcacacatttgaagtattaaatatagactaataacaaaacaaattatagattccgcctgtaaactgcgagacgaatctattaagcctaattaatctgtcattagcaaatgtttaccgtagcaccacattgtcaaatcatggcgtaactaggcttaaaagattcgtctcgcaatttagggctgcaggaatt

SEQ ID NO: 23032 - DNA, 2196 bp, Oryza sativa
tgaaattaattttattcgttaagttattattatgtgatcttgaggtgtaggttcatgacttcatgttaagtagctccaaattattcttcattccccctcctccccctgaaaatcttgttctgaattccaatagaaaagttattcttcctttttcccctgaaaatttcgttctgaattcccaataaaaaggttataaatttatatgcatgaagttcatcgagttgttctgaaaatcttacagttcgttatcaatacaaagactacttcaagtcaaacaagcaggattctacctgatgagctcatcaagttgcacgggttcacaactcttggtggcaaacggccagcatatgacggaagagagagtctctataccaatggttcacttccttttgaatcaaaggagtctgtggtcaaagtatttgatccagaaaagaatgctaaagaaaggtttgtgtgattctagctaagaattttcttatgtaccgagctacatgtttctcaatattagattattatgtcttgcccttctgcagggcgcaaaaggaatttaagatcacaattgaaattgttggcaaaacaaacttgtaccacctccagcgctttctgctcggaaagcacaggggcatagcccaagaaatcatccatgtttttgatgttatcctcagtgataaactttctcggaagtatgagatctttctcatttgacatttgattgataacttcttgaccagggtattgacaatgttgtaaatacaattaccttttttgcagtcatgtcacagggcccagatcctttctttgtactcagattggtcaccagggttacattggtgatggacttgactcttggagaggttaccatcaaagcttgcgcctgagaaagatagggatttcactcaatacgggtacttccgttcagttattgcttattagttttcactgaatataaatattattccctctggtcataactatttgatgttaggacaatatttgatgaaactttaaccatcaataacttctaaaaaaacaaaaaaaatggtatgtgtaatgccttaaaaaagctatcagaaaattattctaatacaaaatttatggtcaaaatttcaaaagtttgaccaaatcttgacctaaatgttaaatatttgtgactggagggaatatttagatactaactaccgtttttgatctacttcattcagatatgtctgcagcatcctttatgcctgtgagaattatccaaattatagatgggttcctgaacataagttacacctcaagacctttgttagagcggaaccgtgtgcaggtaatattcctaccgagggaatttacaaaatgtgctatataatacctataatgactaacattcttttttcaacatgttcagctaaagaaagtattatgtcatgtttgcattgaaacaaaccaccatgatgaccaaatcggaagatataagataacagggatcacccctattcctatgagcaataacatgtaattatctttcctctcacggctgctgttatagcttctattttgtttgcatgctgtaagcaatgggggcaaaaatgtaccagatcgttgatacttgatataatattagaaaggtctgtgttaaggattctgggcatattggtacattaacagtatgtggattttgggcatttttttttctgccatagatatttttttcttgaacatgcaggttctgccttagatatctatctgtgcaattgaaaatccataactattcaattgaaatactgtgtaaatgatgcattacaaacaatttttcctgtccggatggagtatagcagtttgttgtcatcttttcaatagggcctacattttgttgttatacttgctcacttctttataacatgaataattactgttttattcctcccaaactgatgcctgttattcgatgctgttagatgtcctgttggtgaggaaggaacaacaatgactgttcttcagtacttctgtgatatggagaaaacaggtgtgcctagtgttggacattggaacatcgctgaagaggtgatgacatgcttcattgttataactcagtttcgcccaaaactcaaaataacttagcattgctttgttgaagcgaattcatggttacttgtttagcttttttaatgtttaggctcataacttttgttttttatgtggggatagccgaag

SEQ ID NO: 23033 - DNA, 2085 bp, Oryza sativa
ttgccccttttttttctcatttctcttcctctttttcctttttgtttgatgagggtccttctttttccttattattgcatttttttttacaatgatttgaattattgatgagaaagtggttggttggatagtaacaaatagagtaattttcactttggtcaccttttattactactggtgttttgttttggaccacattttaactaatgtttttactttgatccgggtaattttgcatttatgttattttggaccacccttaacttctttttctatttacatcaaacttgtcgtatttcaaataaattgtctatataaagcggtgtgggtttactgatgaatttgagccggcgtacttgaaatcattcatatgcttgagataagagttagagtagtccaaagtataacaaaggtaagattacctggttgaaagtgaaaacaccggttaaagggtggtccaaagcgaaacaccagtaataaaaaggtggtccaaagtaaaatttactctaaaaattgagtaaatttcatcttccatcactttatattaccctagttacacgatgaaataagaatttataaatttttcacttaataataccatctaatcttaccaaaacatagtagcttcgaatagggtactgagttgagttattgcttgagtttctaccatggctatttggtccatccatagaagaagaaagaggtgaacacaagggaatatatgtgtagtgcgacattaggagtcagcccactacttgttcttgtgcagatatggcaaggagctcaacattgcttgccctattgcctagcccaaggttcatcactagcacctctggtatgccaacactcgagctaaaacccctccaatgttgctaatcccatacgttgatgctcctatctccaaatagggcgcccgatataatgaaccactatctctactccgtcctccaaatcaggacacaaaccatcgcccattgggactggggacgctcgctgctgccctactcctgctcccttgtagatcaggttgccaccatcaccactctcctctctcggttagatccaagttacacattgattgggctgcacaacaccgatagtcatgcttggtgatggcaatgtgtgcacgcgagagagagcacacacgcaatggtgtaggtgcatgggtgatgccatgatgtgttaccagatttggaaaatatgaggatgtggtcttgagtgaaacacatagtaaatagtaaagttacacggtccaaagtataaaatatgggtaagctatcagaaacaagggtaaaaatatacgagccaaactacaatttacttattttttttctttataaaacagctttacaaacacatattttgatgatctaattatgtgaaaaacgatcactttttttttgacagctttgatgccaaagttgcattatacatcgtggctttgtgtttctaatgatgcattttctattagaatttaaataattgatatgctaataaataattagtcccttttactttattttttattttttatgtcatttgtaaatttaaataattttttatttgttaactaactcgaaaaaagaatgtcgccgacaaatggcagacgtcgccgcgggtgatgggacgacggcccattacacagcccggcccggctggcacggcccacacggccacacctcaatcctcaataggcgcacgtgcgacgcacgcatctccctgtacaaaaccctagccttccccatcctcgcctcctcctctctccccccgcaccaccgcctcccctcctctcctctcctctctcccgccgaccaggagaaagaaggaaaaagaagaagaaaaatcctctgcgatggcgaagaagaaggagagggcggtgaacgtgtcggggaagccgcgccactcgctcgacgtcaaccgcgccaatgacaagaagggcgcgggcggcggcgccgggggcggcggcggcggccgctcggccgccacggtgcggcggctcaagatgtacaagatgaggcccctcagggaccgaggcgggaagatcctgaagcacgacctccagtccaaggagctccccaacacccg

SEQ ID NO: 23034 - DNA, 5608 bp, Oryza sativa
cctgcagcccttgaaaccttttcgaaacgtcggtaaggtatgcttgattggtggttatggcttgatatacgatcaaaatgcgtagatgccttgaatgaacatttccctgttgcaatatttctacttccagtttgttccacatttgattccggtgacgtaacagcaagtctgcaagtgtgcttatttctgtactgctctgctcttgctacttacaggaaatacacgagtcgttaatcagaaagagcttgaattctttcgggaggaactccagagtcggctttccaataactataatgtgatactgaaagagcggaagcttccactgtcactactgcaggatcatcaaaaggtacaacttcttttggtcattaggctgtcgaaaatgttgggtcttcaatctattttggacattgaagaattaagtacttttgttaaaatacatggtgccttccattttaactgtggcgaagtgctctatagtctactgtctatatcagtgtaccgtatgttgcacttatgtatgtatgtttgcccctgttgatgatacagcaagctagggcgcatcttcttgacactgaaccttttgagcatgcatttggaccaaagggcaagaggaaacgcccaaaactaatggctcttgattacgaatctctattgaagaaagctgatgattctcaaggtacagtttgtatatatgtacccagtactttaatcgcttaatatttttagttatatgtaattactgatatttatgaagaacacaatttcctttaagtttgaaatcctattttgcaacttggacaaatttatctcatgtacatgttgcactcatattccaaaaagatcttcaaattttaatttgcaggcctcctggccattttgctacttagaatcattaatgattgttgtagactattcttggccttgggtatttcttattttcagaagtcaattacatgagcttgtatgctgttatttatcaagaataccactatcaatgtcctgtactcttagtaaaatgttgagttttataggtgcatttgaggataagcatgctacagcgaagttgctgaaagaggaagaggaagatggcttacgagacctagtccggcacacaatgttcgagaagggacagagcaaaagaatttggggtgaactctataaagttattgactcttcagatgttgtcgtgcaggtaagtgttgtgacattttgtccttgcaaaaaatactctcactctgtcaaaccatccagacatctttggtgctttttttttttaaaaaaaaagaagtgggcattgatttatttgttgatcctattgttttgcacaggtgttggatgccagggatccaatgggtactagatgctaccatctggagaaacatctgaaggagaatgccaagcacaaacacttggtattcttactaaataaggtattgataagttccacaacaatacacagtgcaaaagacggactattttcatccttgtatggtggcacattgatgaatgatggtatacattttttagtgtgatctagtacctgcttgggccacaaaaggatggttgcgcactttatcaaaggactaccccaccctagcattccatgcaagcatcaacagttcatttggcaaagtaagctagcagaatcctgaagaagttcattgtttcaccataaatgaccccttacgcatttgaatcttttccagggatcacttctttcagtgttacggcagtttgcacgcctgaagagtgacaaacaagctatatctgttggttttgttggataccccaatgttgggaagcatcagttatcaacacgttacgctccaagagtgtaattctcttttctttaaccggcttcacagatgacatctttttggtgaactttctgagtattttgtttgtatactatatccataggtttgcaaagtggctccaattcctggagagacgaaggtgtggcagtacattactctgactaaaagaatatttctgattgactgcctggggttgtgtaccaaaacaatgattcagaaactgatattgttcttaagggcgtggtatgtatctgcacttgttcgtttttgtcttcactttttagttagattgcacaaaacaaagcatctagtaaaacacctcactatattttttttcaccttgccggtacttttatgtacgacagatatatataatgcattttcgcaaacattatttcaacataagagttagagatgggcttgctgctgctatcttggtctgaggtggtatagaagtcccatgggtagcttttaccctggacaatctacaagactataactattgcctatctgtccggttgtccattaatgcttaaaaaaaattccagtaacacccaaggcaatccaaggatagtgtggattatattttatagttgtttattgcccttcagatatttttctgtggtcacacgctggagcactgccacttttgaagcatatatttatatttatatggatgtctatcctagttgattaccaggcattttaaagatgctacgtttgtgtacttatctagatgggtaatttcattcatcatgtatttgcatttgttgtcaggtgcgtgtgacaaatttggcggatgcttctgagcacattggtgaagttctgagacgtgtaaaaaaggagcatcttaaaagagcttacaaaattgaagactggtatgcttcttttaacatttagtttatggtttcattttaacaattgttctatatagatatgaacataacgcttattatttccacacaatgcgttccctattggataagtatgttagtatttgggttacttttcttttctcataaatctgaacattaagacttggcattttttatgacactattctgttagtttactcatagcatatttgctctcttttgataaagtatatccatgaagaggatgcgcttgcttgtagttagccttgtgatgctgttgtgcatggaaacaattaaaccattggagacagcacatatcttatgttggatatgttatctttctgcagggttgatgataatgattttcttgtccaactgagcaagaccactggaaagctactcagggtatggctttagcatatatgttgacatgttgtcagtcatgtttctatcaaatatattattcttgtggtgaggctttatgagattggggaattggagaattgtaattgtatactgatttacagtgttttacaaattttaacaatataatgtgtcaataagatgggttaattggatccatgccattctaaatatatgaacagcttaaattaaccatctatagaagattctgagcaaaaaaaaactatctttagaagattaaccaacaatttctgatggtgcttacacttgtggttcacagggtggggagcctgatcttacaacaacggccaagatggtgcttcatgactggcagaggggcaagattcccttttttgtgcctccaccacagcaaggtgaagatagtccatctgaaacagctgaacctgtggagaaatccgatgaggaaggggtgagcagtgacagaactgctgccgccatgaaagcgatagcgggaataatctcatcacagcagcagatgaatgttccttgccaaaaggaatttggtgtaactaatgaagatagtgaagtcgcggagcaatcagagtgatctacaaaaggctaggaaccatgcatgataaagaacagggcacaattttgccaaatacctagagattttatgaagatttggtgtctaacaggaatggtacgatgaatgttacgatcgttcagttcaccggtgcgttctactgcaacgaaagagcgttcactgcaacgaaagactggaatcaagggtgtgggactgggaaacttctgtaacttcatatattgtgtgggcctttgttgtagaccagatagagtgttttggtagcttaatataaccattttgttccaactgtacttgaaacaaatttattccaatacattaattccgcaaagtcgttcgtatttgtatggggtcaaaagtgaaatactcttttgttgacggtttaccttttcgtttcacctgcttggctgctgcctgaactgccccttgcttatgtatgcatccatatgggccacaaaatattggtttgttatcgttgggcggacctaaccattgaaaaagggaggaataagtctattatccatccctcaactttacgtcgagtttaatttccaatcctaaatcataacacaaaaaatcttcacccctatcttgataaaaccgtctgaatcaggtcccataacagtatggatggttgcttacgtcatcctagtcacggaaaataaaatgttacatgtaagtgattgagaggatgagggagaaagggtagttgttcgggctcccacgtaacagtgctgaggctgccaccagagccaccgccacccgaatcaatcctaacgagcgcccttcgaggactgcctcgccaccgttggctgcctgactacagtgaagctcacaactagccggaggagcttatcagtatgaagatgaggtgaagagaagaaaggatgtggaaagtagagggccactttgcaagtgagcccacatgtcttaaatttttttttactgattatgatgacacgtcagtaaaaccaaccatccatactattatgggatgggacctgacttgaatgattttattaagatggggtgaagatttttagtattgcggtttagggataacaattcaacttgaagtaaagatgagaaacaacaagtggacttattcaaaaaaaggatgaagtgttatgaaaatttccaactgacggagtataatttctgtaaatgtagcactattttttttatctattctaattttggtcattgctatgggtttagggttcatagggggtataaaatttggatttctaatttcttttagcatggtgtcgtagtcaacactaaatagttgaattaataaatatgaaaatttctaattaaactggcaatacgactaagaattgtttatgaaaaaataatatcatttatgtaggtttcagacggttttcatccaaagaaaaatgttttgatgctctgaaaggggaaaaaaggaatgtgtttctttaagacacagtacaagcatagacaattataaaacacgcaccctcactcttataaacatacacacaaacaccctacctgtatgagtgcctccagaagactagaccgctatcaacgggtgtgtcgcttaccgctgaaagaaaattagccgtaaatgcgagcacccgtgtcagtcgtaagtctaagacttgaattcggatgagatggttccaccacaaggaacctaaccagctaaactatgtccacttcatggaaatgtgtttttttaagaattaaaaggaacttttaatagttcaaagcgcttggcatgtacaagttcacgatttggaagatcataagtgccacatttcaaattgtgaagtttaatttgcaaatttcagaaccatcctcgttaccttgtcttggtgggttaatcatgacatacatggcgcaaggaaatcttttacaagaactatttgaaacttcatagttatatactgtcggat

SEQ ID NO: 23035 - DNA, 3556 bp, Oryza sativa
attcctgcagcccagatcttcatgtagacttgggctactttagtggcttccaccgatcaaagtttcgtgtgtttcagatagtgacagagtgatacgagtatcgtgatcatctgttgtgccattcatgtcgctaatcaaatgttgatgccggtaacttggtcgttatattcatgcaacatttccaatatcgcatgcgcgacgatgatgaccttgttttgttgcgattgcatgccatttcttttttctgaatttagttaatgctatgtttcgttcatagatgagtattgtcagttgctggcatcatctgtgtatgttcctgtgttgtctgttgtgattgtggtctgcatggcgtgcaacatgctgctgcactgttatcattgttctggcagttttgttgttttttttatcgctgttcttttattatttttcttgataagtatggtcatgcataataaagttttttttcttgacatgtgtgatccttgcttcgggtttaaatttattttatttgataaggttatgaattgggggcctgcaagggtacattggtttactacgtaatcgcatcttttatcttgtcatcctttgtttttgatactactatagtgttattgttgcttgtctatccgtttggtctatatggatgcaggtctctttatttgtctttggtagggttgaaaattatatatagattttgtcattgtgaagcatatgtcttcccactcatgttaataatatggtttactttagttgaatttacctccattctgatgtcaagtttttacatgaactgctgatgcagcctttgctgaactttaaggtccccttgccggaagatcttgatcgctataggcgtagtagcccaaatgggagtatgagtagccaaggtaaaggctatttaaaaaaatccacctcctagcattgacactccatcaaattgtggtcttgccatttctttacatatatctacttctgtgtttgttctgcttaccctacttttccttttaggtcaagggtccttgtcagaccagtataatggaattaatgatgcttcccatgggctacatcggaagcgcaaaaggaatctggatggtgctagcgatgatgatgaggtagatgcctacagtaaccaaataactgaggagcactaccgtacaatgctgagtgaacacgttcagaagtacagaaggtcaaagtttaaggaggatgtttttagttctgatcctcctcaggtgatagttcctcagaaacacaaaaatggtagtgcaagagttacaaagtacagaagtgatacaaggaatgttgcaatgttgggtggggtagaagccacagctgagtataatgggacaaaatctactaatgcatatggtggtttcaataaggttgtagcttcactggattcttcctatttagatatgggagataatgtaagctacaaaatcccagaagggtatgataagttggcactatcccttaatctacctgttttttctgacatacgtgtcgaggaaactttcttgaatggcacactagatttacgcactctagcggcaatgctcagtacggaccaaaaatttgagacaaccaatcgtggtggattagctgaacctcagccacaatatgaatcactccaggaaagggtaaaggtgcagaaattttctcttcaagtaactgaggatcccttcgcaattccagaaggagcagctgggaggatacggagatttattatttcggaatccggcagtttgcatgttcattacgttaaagtcttggaaaaaggagatacatatgaggttggttggacctgttcaaatattgatagcatgcttttgttttctatatacttagcagttaacctataaatgcagattatcgagcgtagtttgccaaagaagcaaataataagaaaggatccttctgaaattgcaagagaagagtcagaaaagactattaaactttggcatgctattgctgttaaaggcattcctaggcaccacaggaatttcatggctttgctgaagaaacggcaagtagatgctaagcgtttttctgagaattgccaacgggaggtattgcacttctctatcttgttggctattttgtagtttggttcactctagtttttgatcttgctgagttaatagcaatgctgcagctttattgagttttgtgtttaaaatgtccaggtaaagttcaaagtaagcaggtcactgaaattgatgaggagtgccgccatacgtacacggaggctggctagggatatgttgatattttggaagcgagttgacaaggagcaggttttttttaatctcttaagcttattgttttttagttccactgaaaccaaattcggaattattgccttttattttttttctaaacaacagtatatggggctgaatactatttaaatacttaaacttatgagttgtatatggctatgtatttcagttcttccaagccactgaactgaaaccaaacaacagtatatggggctgaatactatttaaatacttaaaattaggggttatatatggctatgattccagtcgttccaagccactttaatttctatatacatggttaaaacttaaaaattagcaccaagtattgtattgttttgcatagcacatgtttttctttttgctgatttttcttatgcgatcttatgatgggagttatatatcttttttttttgtctgtttcatagtatgaattgaggaaaagagaagaaaaggaggcggctgaagctttgaagcgtgaagaggagctacgtgaagcaaaaagacagcaacagaggctcaactttctcctatcccaaactgagctttatagtcactttatgcagaataaggctggtgaatcagcaccatcagatgaggcatctgtccctgaagaggatgaggaagatcctgaggaagctgaattaaagagagaggccttgagagctgcgcaacatgctgtctcccaacagaaaaggatgacaaatgcgtttgatagtgaaactgggaggcttcgtcaatcatctgactctggtattccaactgatgatttagctagtatggagcctaacaagattgatctattacacccgtaagttccactcgactggtttggttgtccttgttcagaattgagcatgttagaaagaatgaaaggacttctaacactggtttctttggggttatcttattttcagctcaacaatgcctgagaagtcgtctgtgcagacaccagaattgtttaaaggtgcactaaaagaatatcagttaaaaggtttacagtggttggttaattgctacgagcaggtacactgttaaaaagttaatgcatctgatcattttctgtgacttctctgctgtttcacttcaatattttctatttcttgcagggattaaatggtattcttgctgatgagatgggtcttggcaaaaccgtccaggctatggcattcttagcacatttggctgaggttggtgaatttgccctttcttaaatccatgttatctttctactattggattaatacccaatgaagcaatctcttttggccttt

SEQ ID NO: 23036 - DNA, 1150 bp, Oryza sativa
  unsure (1)..(1150): unsure at all n locations
ttgtgggtctacgcgcttgggagagtccgcgtattctgttgtgagaacatccgcttgagcttaacttttcctactcttgcaattttacttcttgctcgactcaggtgcgtctttgactggtttcttctctcctccggtcttcggtttgtcgttcttgcgtcttagtgcgtcgtccgcgtagnnnnnnnnnngcgcatcgatcgacaattgctcccatcatatttcactattgctcctggtcagaatctttcaggccatcggacatctcgaagtgaacgaccgaaagctctacacccatcgctgggggcggtgggttgtcggcgatcgtacatccttcgtggatgtctatctgatgttgaggatgaggaagatgacaacgatgacgatgggtcgcttggttccggcgtacgattacgaggacatcggctgggttctcgagaatcctgtcgtcgtctcccgttgttgtttcggcgccgatctccatcatcgtcgtcattatggcgacgtcctcgaccagtatcacccagcacccgccgttcgcgatcgtcgtaatcgtggcggttgtggcggttatcacggtctcggtcttcgctcgaatggcctcctcgttcttcgttatcgtgacgccgtgaagagacgcgatgtcaggaatggttctcattgtctcgtgtgcgtagcgcctctcggcagccattcaggtgatcgcggagatcaccggtgctgcgaggtggaggggtggctcgatgaggcgattcccgctgttcagggttttcaccattagcatcgccagttggtggctgttccgggtgtgctgcagcagcggcctcttcgaacgcgttgctgaggttggtcactgattcccgtaaccgttctgtccatcgtgcgagatcgtcgttcagaacgggatcgtaggtggtttctcccagtattgcattgacaaccctgatgtgctgggccggtggtcacttgattccctgcttccgcattggcgcgcgctgacgtgctggtctcgtcgataaccaatacctcgcgcggcgtattcgttgacgatgagccatagtcttcgagcagctgcaagactgatggttcgtggggatccatgtcgattactccaacaaatcgatctaaaattagcgtcgggctgcaggaa

SEQ ID NO: 23037 - DNA, 902 bp, Oryza sativa
ttttgccctttctccacagagatgctagtttccacattctcattacaaattatcagatacttgtgaatgaagagaagcttttgagacgtgttaagtggcaatacatggttttggatgaggcccaggctattaaaagttcaagcaggtaacaattcatcttgcaagtcctttcattttgttgaaaaccaaaatttcatggctcatgcctgtcttcatttattcatctgatatttttccttcgttgagactcttatctgggaattattgtattttatcttttcctccctctgctgcagccagcgatggaagacattactgagttttaactgtcgaaatcgcttgcttctcactggaacacctatacagaacaacatggctgagttatgggcgcttcttcatttcatcatgcctactttgtttgacagccatgaacagtttaatgagtggttctcaaaagggtacttacctacattacaaattatacattctttgttttagtcattatctttattgcttatatttctttggcctgccagaattgagggtcatgccgaacatggaggtgctctgaatgaacatcagcttagtcgactggtaagatacacagccctacactgaacggaacttttatgcatgttatggtttagttaatcttttgaatagtcttgtttgagactgacgtggaattataatgagggcttgaattctcaaatacagtacatgactaaatgacagatgctcaattctcctgttttggacaaagttctgtatagctttggtatatttttgagattatataacttgttctttttctccacagcatgctattttaaagcccttcatgctccgtcgagttaagattgatgtcattgcagaaatgaccaaaaagaaagaagaaattg

SEQ ID NO: 23038 - DNA, 963 bp, Oryza sativa
aatgtatttattttatctacacaagctatcaatgctcaattggtgctactattgaatgactcattacccttttctttcgtttcagataaatgtctggtgcgcagaccgaaattttgcctacaagttaactgatgagatgcatgatccattggccaagaaactggttctgggatttgctcgaacttctgagttcaatggccctagagaaccaaccagccctcattctctgatagaagaattacatactgatttgccattccccgagccgatgctacaactgccatataggatatttgggtcatctccacctatgagtaactttgacccagctaaaatgcttacagtaagtgttctctaatttcctctgtccatgatgctagggtattgcctatttagatttttcttcatctgcacaattctgtcattcatagttgtatttttttttcccaatgaactgctcaattgctttgaaaagctctaagatttgtgtagaatataactttatcataataagttggttcaaacacctgaataaaggacaaattgtttgtgttttcattaatatgcttttagctgtaccagtgagttctttttactaacatgaaatgctcaatgacaggattctgggaagctccaaaccttagatatactgctgcggcgcctccgagctgagaatcaccgtgtgctcttatttgctcagatgactaaaatgttagacattcttgaggtagtactggtcacttcatgcttgtccactttacacttaaaagtataataccaccataaggtaattgagttttttcttaaaaaaaaaactaaaacaagtgacttttgcttgcgccttttactcataagtgatatagagattctctaagtgcctggagataagttgttttattgcatacaactttagatatgtttttggcattctgcaagtcaacaatctttggtcaattatcagat

SEQ ID NO: 23039 - DNA, 1319 bp, Oryza sativa
taaaggttgcaaagctttcttttaaggggttacctctgatgaagatcacacaagagtactatatcctcaaacaagaaagagctacagtcagctgtgtccatggctgaacagtattgtccactgacccaccaatccaatttgctaaatactgatgtactgttgtcaatgccatctggttctaatgcttgcacaaataaaggtaagatatgtatttcaacattgagaattggatccaatcctccagtttttgataaatcaatcttaaggtccttgatgccgagagcagcttttggagcctacaataagttattaccaaatagtcatcagaatatacaagacaaacaaacaaacactcaacaaaatttcaagtcactgtgactcttgttaaaccctcatgtccctagagaaacagcgtgatttgcaaacagtaaatgagaatatattgggagaggaacgtgagcataaaattcagcagtaataaatagattaaatagataatcatttttcaacatgaacctattcatacaaccagaacataaaaattagaagacatacggcttgaattcaattaatcgacatttataatgtatttgacaaggtggcggtaccttgaacctcagctccactatagaaagcgacaaaagactggcaatgtttgttataagcctccatttcccttgtcctttcggctttccttttccttttgccggtgaggtcgaggttgatttgcgagggggaggtttctttttcttagcagattttgcaggttgcctgagcacaatgtccaggtcagagatttgcaattgcaggatagggccatggtttagtatggtaaatcccagttgggtgagtggccttcgcaggccaagtctaatttcacctacacagatggagtcaactgcaccctgaaaagcgaagcacacgagaatcaatcgcacacatcggcattggcatcggcatcgacagcagcatgaagtaccaagaattgattgatgaaactaggcaggcagattaggtacctttggggattttatggtgatgtccctgagataattgaagctgaaggagcggcatccgatggagagcttggccgtgcgccgaagcacccaggccacaaccctggcaaggaagctgcaataggatcgaaagcattagattcattcttagttatttctttttttttttcagaaaaaaaaaaggaaatagtacattgatcatcccctctgaagtctgaagagagatatcagacagcatatatggaattgagcgatgaaactgaaaccggagcaagaggcgggggtttggtggggggaggaggg

SEQ ID NO: 23040 - DNA, 1471 bp, Oryza sativa
cattggtaaaaagattgccatcatcgagtttgggtcattacataaattacataaagatgctctaattttctaattgtgttagctacaacgatccatagagtgcgcttgaaaaatgtctattgtcattggattatattttttacccgttgcaacacacgggcatttttgctagtcaatataaatgtgaaaaatgttagaatgacttacattatgaaacagagggagtatataaaagttttatttacaaattatttttcgtttgcaaatatacctaataaaccaaacgatggcccggtgagtttggaagggatatgcttgaggcttaaccggaacgtttgaacataaaccagaagcaacacaattacaacgatcacttgcagtccaggaaaattcatgtcaagtaacaggaaggcaggcatgaagctaggtgaatttctattttctagcatggcattgcaacagtggcacaaatcaattggctgctgagcatgattagcctcatttggatgatgaatcaggaaccgagtacaaagttcatcgtgtctggcaaaaacggcagctctggcctctggccctggccaaaggtgcaaacatttctacagagtggttacagaaacattcactcacttcctccctttgttcttccgtttaccctttgcagcacctcgcttctggtcgcccttcttagatttactcttattcctgaaggttctcttcgatggcttcttctttacacctagactagcactcttcttggagacgctcttgttggcgtagcccgtcgatgcaggggtgatccttttcgggccaaggtcttcatcgtcatcttcaggagtgatttcgctcgtggtgaccgtaattttagtcccaccatcttcgtatgtttttacttctacataaacagaacaacttatgaataataggataagaagtcatggttgtacaaaggtagcatggcaagagctgttactaaaatctggtcaatggtctcaccaggttcaggcaaatcatcagtttccatttcatcaccatcattctcaacatcttcaccatcagcattatctgatgacaggactcttccatacagcgcaatttctttctcttgctttctctggaacaaaatgacatcactcagtaaaaccacaaggaagtaatctggattgtatagttcatgttataaatcagccacagtaaacacacttaagcataatccacttgaaacgacactaaagccttgcccctccagtgtcatccctacaattctctcttggtctagtccgttttctaatccaagaagatctgggtttgatgatactttttcatacgaaaaaatgagaattatgtacccataacagaaagcaggtacccacacataattcagctgtgaagactgcgttacaaacagccgctaagctaggcgctacgggtgaaattaactgcttttgctgctatgctgacgggctgcaggaat

SEQ ID NO: 23041 - DNA, 3653 bp, Oryza sativa
cctcttcgcgctactctcatcagaaaactactccaccgaggggccgaaaatatcgctacgaatcaaagaaaagattagaggacggacttgagggctttcttgtcgagggagacggagagggccttgttcttgagggcgcgtttgttgatgtgcttgggcaccatcaccgtcggcatctgccccaccaccacgtcctccgcctccgaccccgacccctccatctcctccccgtactcgtactcctcttccaccgccgcctcctcctcccacgccatggctacgaagttcgctggctcgctctctctctctctctctctctctctcttgtggggagacgaggaaggaagccgccgccgccttcgtgacggccagcagcggaaggggcagctaggttacaagagatcacgtgcaagccgcgtgattgatcttgctcgtctctactcaatttgcacttatacccttaaaactagggataattgaatccacgttattataaattttagcgtattgcatatcgttagtattcacctatttgcaactataccattataattttacaagtatattgaaaaaacaccacttcatacccattcgctccatttatcaatctttttagacgccatgtcttctacctttatcccttcttcctttcccctctctcccagccaataactccgacgagcgtgtgtagtcgaccaaccacccacgctgttagaagatctggagcaagatgccacacgtcgctgagaaggagctggagaggggcaggccacccagtcgggacatgctgcttgccacgggatttgatcgctgccaaatggagtgatgtctatcacacggttgtgttgtcacattgagacttggagtgagcagatgctcatctcaagcagtaatggcggcaacaactagctagaacatgcaagcctcccaggcaacacgtgtctcttttcttggattccatgaattctcgttcgagacttggagtgagcagatgctcatctcaagcagtaatggcggcaacaactagctagaacatgcaagcctcccaggcaacacgtgtctcttttcttggattccatgaattctcgttcgtgccagctgactacaacataccgtggggctgcgagtcctcagaagtatcccacacagtcgcatcatggacttccccgaggtgtcagaggcattccaaccggccttcgatgactttgtcgctggtgccgcctcgccattggttgagcaaatgagggggtgaaggaataaagggtagtttggtcttaaaattagtgaaaacgatgaaaggggtcttcagtgacattgctccaatacttgtgaaattataatgatatggttacaactatgtgaatagtaatggtatatttgaaaaatgtaaaatttataatgggatggttccaattaacccttaaaactatgggaactattccgaattgtgcggttataccctgcgggattggaagagatttgtagttatcccctcatgagttttcataggccagtctggtcgcacccattagtagcgaaccaaacttcggtgggcctaatttggtttgctaccattcatagcgacccaaattctagtcgtcccaataaatctgcactgttcgtagtgatccaaacccgataatatctatcgttattagcgatccaaaatttttcaattgaaccaataagatcgccaccattgattatgatccaaattatctaggaagagagaatgagaaagaagaggtgtaacattgcaggagctgtgatttcatcaccactgtcattctatcaccatcgatctgatagatcaagctgagaaagaaactgagcatggaggattttcaagccccggaagacacaagatgttccttgaaaatgctactcatctgtcccataatgttcaagtgttccgtaaatgttacttgaaagtagcaacctaatactttaatggaatatatattagaactacatattctataatattatagtaatctaatattagataaaacacatctaaaactacggatactatgttgctatatgatatacatagacggagccacggagcctatagagatagtattagtcctttagtgctcatccgatgaaatcttatttctatgcttctaaggacgtggtgtgttattagtagtggattgaaaaacaaagtctctcatttccacgcgtacgtacttttgccgaattgctaaaagaaaagttgatttaaaacataatattaattatttttcaagtttatataattaatatttaattaatcatctgctaatagcttacgtatcttttcaatcgttttatttctctcctctcaaacacaccccactctgaatcatccgatgtcagtattcaactactatgaggatggctgtcgccggtcgggtatattatgctcaattattggggtcatcacacatcaagcggcaacaggttctaatcagcagaagtttgtgacattcaagaattcgcctgaattaggccatggaccgacgggggacaaactacagcagatgttgacctgttgtgtatcactgtatcatgacagcatgtcgcaaactcgcagttgggcttgggcatattcttgtcgatgtatgttcatcatgtgaacttgagattactgacttctggtaatccgtggaaaatgtcagttctgtaggtagttatagtgtataccacttcctccgtactaaaaataaactaatgtatataatataaatttggacataggttatagcttgattttgagctagagaaattacaaatgttgtggttctttacaaattattattgaatagataaaattgtataaaccaccctaattactctggttttgagtttttaccccataacctattttgttgtaaaagcctacccacatgatatggtttcacatcaaaattgacccctccgtgcacataagtaattgaatatgtccatatcttctaatgtggatttattgccaatcaccgattcttatcgcctccgcgctcggctctctcatcatttatagtcatcttactactttgagcagtctaagcacaaactcgagtcgaactcacctcataaccacgttggacgagtccaacctacttggtacggtccctataaatccacatcggaggaaattgtccgaatcaactactcacatatattgggtaagtggatttttcatcaaaataggttatagaataaaatattcagaatcttatatattggcatgaattgtgtgcttctatcatacatattcagttgaaccattcctctgattgttttagatagaattatcatcagaatggtagattttctgttaggtcaatgtatatagctttaattaataatggatatattgaatgaaataagattatttagaagcttaagataccacttaagattaagatctttatgtggtacttgcttaaaggggttgtgctaactaagaataagttggcaagacgaaattggaatggtagtttaagattttgtttctgtatgaaaaatgagatcattcaacatctttttcttgactgtcattatacaaagatttgtttggagagcagtacagttctcttttggtttataccttccaagtaccatatctaatatgtttgatgggtggcttatgggggttgacaaga

SEQ ID NO: 23042 - DNA, 7405 bp, Oryza sativa
tcgcaaacttgagacgacggtgatgcaactctttacaaactatagatggagattcacaaatagacttaataaatgtgtcctcctcatcttggtttgccttttattttgttgagtgtgtttgattacatttgaactacactctttatatgagtggtattctgtaataattggctgtaactctgttgagtaaaggccaggatatttattccattatctgaaaaatagaataaaatatcaaaatagaagtaaaattagggtggtttatgcaatttttacctatctgataaccaagattcagagcgtacaatatttcggaagagactcctttgacataaagtcagagggacatggtcattagcatgtagggaggctcccacgtccagctccctccatgagttcttggctccatgcgctcttcaatgaaaaaaaaaaacatcaaaaagcaatagtactttcaaacataactggctgaaagccggaaacagttgttgcctggtgtttcctgacaagcagtgatgctcacgaatcctttggttctttgctctactagtgctgtgtttgttacggttggatgggaacatgcatagtgcttatgaaaaacggagtagtctattagcgcgtgataaattaagtattagctaattttttttcaaaaatgaatcaatatgatttttttaaacaactttcgtatagaaactttttgcaaaaaaacacactgttgagcagtttgaaaagcgtgcgcatgaaaaatgagaggggagtgttaggaacttgctcttacaaacacctcttacaaacacagcataggttactagtgttgaattctgatctgcctactgctgtagtgggcttagtataagtgtgcaaggcaagtatttagaatttctgatgccaatgcccttgtctgcttgatgtagccatctgcacattacagttacagtgtaaatctccagctgccatgttccatgaattattggagttgagagtacatcatgatgtacaaatatagtacaaattgcaatgattgagctatagaaatagtttctgtttgctataaattgccacatgccaagtttttggaacagccaaaactccagaacctcagttcagcaccccaagaattgtaagtggggaaaaaaagttccaaacggagatcttcgtttctaccccactcttttttagaactgaagacagattcagatttcaaagcgagcaagatcatcataagacgtggtgatgaattgcttgcagatttcagtcccaaagaagaaccgaggcagtgatcaagcagcagttcatcacaggagatcagtggcactagacaacaaacaacacacagctgagaaaagtctgaatattcaacattaggctgcttgctattgcacatcatcagaacattaacaggagtgcacactactacattcttcttccacttcttctttttggaattttcctagacgaactctagatgaacattaaacttacaaggcaacactgaacaaaggttgcattttgttcatactttttttagggtcattttggtttatactatacaaaaggacacaactaaattcctagataaactctagggacaaacccagactttgagtagaccacaccagcagcagcagccgggaggaaggaagcaaagcaaaacaccgcggcgcaaagacgcaatgcttttgctacatcctttagtttttgccatcctagccatcgcagcctagcgaggctggtggatgacgcggggagcgccgccgctcctcgggctgccggcgtacttggtgggcttctcggagtgccggggcttctcccggagcccccgcggcgcgtcgccgcccttgggagacaccaggctcagcgccttgagcaccgcatctgcacacacacatgggagacatggcgatgaatttcactgcaattctcgttttagactcgatcttttgatgatcaacaaagcgagcaagcgagtgagtcagtcggtaccagtcttgagagcggcgggcggctgcgggggatcgacgaggaggttatgggtctggtcgaagaagaggtcgtcgtcgtcgtcgtcgtcgaaggcgtcgtcggggaggaggccggcgaggtcgtcgtcgtcggcggcggcgtcgtggagggcgagggagtcggccatctcgtcgagctgctggtgctcgtggaaccagtggtcgcggaaccaggcggtggtcttgacgaggtcccaccactgcggcgagaagtcctccacctgccggaacgccgccgggatgaagagcggcgcgtccgggttcagcgacgacaccgccgtggcgctcatccttccttccttcctcctctgtccagatcaagcggattcagatcggagacacatccaaagaagaaacaaaaaaaaaaaagaaaagcaaacgatgaatttccacgatccggaagatccgttcactctcgcggaaccgcagatcgcgaactgggctcaaaaaattgaacctctttccacagatctaccagcgtacacacgcagatctgagccgagcgagcagagaagcgattgctcaccttttttttttctcctttgcgatggcgacgggagcagggggagagaaaatatccgtggaatcttgggggagtgatgggtagtggaaggagagtagtgggcgcttgggatttatagaagtggaatggattatggatagcctcaaatcatatgagaggaagctacgagcgagccgggccggccgggacgcggtgtggagcgaggccgaggcagcttccagccggtcgggtccggatcgggctcgtgcacggtcagtctctcacgcgcaacgcacggaatttgccgtgtagcggagctctacagttctaccgcggagactgtagagtgtacgagtcacagttggcaacttggcgtcactcgagacttgtcgagagaaaatgatgttggtgtcagttggtgtggtttgtctcctcactctagtgatttagtacgcgttatattccacacgaatagataggacactattacgctgtatatcactaaaagcacaaaactgctgtcgacgggtacgccgtctattattaaaagcacaaagctattaaatcctgaatagataggacactattatgcctcgctatcaacgggtacgtcgcctaccactgaaagcacaaagccgttaaatcatggaaaattcaaattcgctgtcgacgggtacgtcgcctaccactgaaagcaccgttaaatcctgaaaaatttaaattcactcccatggggagtcgaagccagaacctaaggtatcactgagactcttataactactggggtacatgccctttcacattattattattattattattattattattattattattattattattattattaatgtaataccttcgtcttgaaatatattgttatgagtggaacacatgctacgaacctagacaagtttcctgtagtagatgtatctcattcaatactagttttttatattttggaccgagagaaactaagatcagattacacgtattctattacttcggtacttcctatgttctcataagatgtcgttttacagccttcaaaatgtccctaaaaggtgatcatttcagctttgtggtatcatctagtttttccttggatcattctggtccactaatttgaattgagtccatgctcattaattcattgttgtttaacaagcatttaacatcagctgattaaatatggaggccgatttaattttaccctatgagctattttgtctcttaatctctgcaacgtcaatctttacgaaggaagtactccctccgtccagatttattgcgttgtccagattgatgtacacatccttctaatatcgcttatcttataggatgaagagagcactatgaatctaaatataaatcatgactacattcatactatcatgtatataattcagttttagatttgttatattttagaatacggatgggttagccagcctgagtttgaagttttacccccttctatttatatattaggaaagtctctggtattcacgttttcacaacaatgctctcttgcccttttcgtaggtgtaaaatttctccgaggtgtatacgatcataatgctccataactcagactcatcgatcggcatgattgtgaaaaacggacatcatcattatctgataggattaggattaggattagacagcagcaaggcatcttctaaagtaaacaagctccttaatcagccttgcgtaaattccaaaccgaaaggtgcttatctgaaaggcgcgcgagctccgccgcagcagcgcacatggaggccagcgtcgaggcgacacgctaggcgtcggcgcggccgcgcgcggcggagcggaaaagaaaaccatccatccggcatccgccgtctcgtacagcaccacaccggcacacccgcgattcgcgtttgcgtgcgtgaacggtaactagggaacacatctcatattaataataacatcatcacgactgtgtgtgtgttttttttggctttcccatcctaaccctctttttttcatacacgctttccaaactactcatacatttttaaagaaattttctatataaaagctgttttaaaaaatcatattaatttattttttaaaaaaattactaatacttaattattatgtgctaattagtcgtttttttctttttttttaatgcgggaaggattagttcgaattaacttcaaacaactcttgcttttggtgggacacctggccccacggagaagcgtgaaatgacaaggtagggacaccgaggcattattatcctctcagtttgtgtctggcccatgagcaatgatttggttgatcgccctttgcaatcggcatcataaacccatgttgaataatggaaactgcgttgtgtactccagtctctagtctcagctccatcacccatcatcaaacgaacgatgatgtgtttctgaattctgatgtgtgtagtactccgcgtgcaatttggcaagaacagatggttctatactaatactccctcgaatagcgaactacatgcacaatgtcgagatcaaagttttcttccaagggcatgggagtggattggatcattgatgtacatgtaaatagtcataatcatctgaccccaatgaagaaatttcatatactagccaactacccgtgcgttaccatggaatccaagggcatgctggggattgagagcaggtacaatagcagactagaagttagctataaacacatgtcgagtagataaatgaggagagagaagagcagcgggctacaaatttatagccagctgcagcacagactacaaatattactagtgtagtatatatttatatgtaactatcgtatgaattggttattaaattgactatagatgatttggagttagtagttggctatactctgagaatatgaagcatttgaattagggggcacaaaatttctcagaagttgggaggaacaaacgtcagtgatatgagatggtggtggcaccactgctaatatttaaaatagtatagatatcgtttcatccctacgtgaattggaaaagatatgaatatttcctttcaaacggaggatttcttcccagaatttcataataatcaaatttattcatgtaaaattcctgctctgtaatttttgaaagttggaaagtgctgtgatgaagtcgttagttgtggttgtatgactccatacactgcagtataaattctattgaccatgaatattttgtactaatctgtcctttaaaaaaaagccaatcctggctatgaacctggaccatggtaggattagtttttttatgggacagaggagtacatgcatacacgtcttcaatactattcattaattaaggcttggaatttccattcattttggtctatgtaaacatgtcagggattatatttgtaggtataaacatatgggtaccctatattaggtgtgtatagtagtgttatgtgcttgcacagatttaaaaggagctcctcatgaaagctaaattaaaattcctgacagtgattcaaagaggccatcatataaactaataagttcatttgggtccctcaagttgagcgcaagtttgaaaatgtccttcacgataataccagatataacccatccctaatctttgcagaccaggttaaatgagatcccaatgcagtattgaggacagttttggctgacgtggcactagaagaaaaattaaaacccaagtgagacccgtatgtttgtgaaacaatatattcttccttatctatctccctccccaacttttggactcagcggtagcaaatgcggtggaggcaccatgtaatcggcgaggagatgatggtcaacacgcggtgtgcccgacggcggcagtggaggaggcccaatagttaatggaggtgtgccttgctgcctacaagccaaagtgtcgacgttgcccgctcatcacacgacagattgggaggggcagcgactgacggggagaggggcagtgattgcggcgaattggaaggtctcccaatctcctatgtcatgtgtagtggcggccggattgaggatatggcgaagctggagacggggacaccagagaagaagtagtgggtcgggcggagcaggggatagaatcgtcgagcagtggcggcatcaagatctgcacgagtcgaaggcagaggtgataggctgagctggccagtgtggtagaggagatgagagtgacagaggaatcggcggggagtagattaggagctcaggtggatcgagtgaaaggtgcgccagcatggtcaagccgctgcgccgtcgtcgttcctgttgcgtcagaagctgcccgcatgtctctatggcccacatggccacctccgcgcctacccgtgctcgcctccttaggcctcgtggtcgcctccacacctatcacagccgatgccaactcgtggccccacgaggccaaagttgtcttcgtgtggcccacactgccagcaccgcctccgcgtgttcaccccagccgaggtaggcccaaaagcgtcttcgcttcgcaccgccgccgtctccgcctaaagcaccagacacaagtagcacgtgcagcggctagcaaccaatcgccccctcctgcgaccaaactctggagccgcgttgtgcccttcctcaccgtgacaagtgaccaagcgtcccctgccccacaccggcgccatcatgtccttcatgtgccacgcgctagagtctgacggggctggcaccgagcacatccactcatcacggacgcgtggcgtcgatggtggatggagtgagagagagacaggagaagagaggggtagtgatttttttttgtatgacatgtgggtctcatgctgacttagtttggttgaccgaagtattgccttgagactaaaatataacccagtttgat

SEQ ID NO: 23043 - DNA, 4391 bp, Oryza sativa
taagattaggatgcgttatatctagtactagataataccccgcgtattgctgcggaatgttgtcgataaatatatgtgagatagggagctaaggcaactgtgagctgaaaacacttggaaggaaatataaagatgtttagcaagtgcttatcaggttttatttgctgaaacatgcggaatcaccgatatatttctaaaatagttaacttaggtctcggtacatcagccaaagataacttggtcaatgtagcaataacgtaggctgtagcaagctggtgtatagatgatgtgacattgctaaatgccctagaaacaaaaacaaatagctgcaaactgtaaaaatgaggcaacataaactttatttttatatcaaacatagagcaatcgtatatgtttaatttttttttgggcaaaaggaagcgacattcaacgaatgaaacaatcacgaaacattgattttgcctcgatctgtactgctgcacactttttttcaggtgaacagatgaaattatctccccgcaaagttactttttgatgaactaaagaaattatgcaccttttgattgatgcatggaatcggtaaccaaggaaaatgctgatccaaaaagcataaaaaagtttatacacatatatttgtacactaaactcaagaacagtatggctcgctcattaaggtggtctttttgactgcctctgcttcggtttccttgattttgtggcacgctaattagggtggaggcgagaacgaagctgttcaactatcagggtgctaggaggttgcattattttcatcggttacagggggcggtggagtggagcgatcagaatggaagaccgcgagagagaggccagggagctgcatgtcatccgttgtgtcttccaccaatgcaggaatcagaaacgatctaatctcctgccgtgcaattttaatctaacaatccaaagcaatcagtgatgtggagcaaccacatcacagaaaaatcaaattaattgcacgtagtgaggatcaactgtatagatatatatagatatataggataggattcctcaaagggacgatttcaaaactcgatgacaagacgaggaagctgaagtaaactcttctccctacaaattacgcagttccagctgggtaaagctaatgggcgatcgatcgctccaggcaatcgacccccatccccctatgcggctcctctccccttcttctcttcctactacaccataaattaaaaaaaacagttagaaaaatttatatatagaaatactatatatatatatatatatatataatatttgaattcaaatccaaatttgaatcgggcatataaaattttgacttataaactttgggcctataaactttaaatgtatagaaaatacaatatataaaaaatatttgaattaaaattcaaatttgaattagatatataaacttttgacttataaactttgggtctctaaactttaggtgtatagaaatactatatataaaaaaattgaattgaaattcaaatttgaatcgggtatataaactttttacttataaactttgggtctataaactttagatatatagaaaatactatatataaaaaatatttgaattcaaattcaaatttgaatcggatatataaacttttgacttataaaatttgtgtctctaaactttaggtgtataaactttagatgtataaacttaaggttgtacaaattttagatgcataaatttactaaaataaaaaagtaatgcggtgcaaaaaaaaaaaagaaaccacgtgaggaggagggccgattgccctgatcgcgatcaatcgcccattagcttttccggttccagctacatgggccgtatcagaaaattctctgataaaatgaaggcccacaaggcccaattctacctaaagggcctaaaacccctcgagctctcctctcttctcctcactccgccgccgcagcgaactcctccctcctctctcgccgccgccgatccccacccggaagcagcgagccgcctcctcctccccaattcctctccagaatggccggggcgaggagcctgctcctgaggcacctccgcgtggcggtggccccttcctcctcctccccggtggcgtccctcagtcccgcggtggtgctgcgcgaggccctgtgtggccggcagtggatgtcgtcggaggaggccaaggggtcgttcctggacaaggccgaggtcaccgagcgcatcgtcaaggtcgtcaggaaatctgcggcgcacaatgttgatcggacggactagaattagccaccgtactttggccgcacccctcgccggagagagaacaccggcgcttcgatcgccgtgaacttgccggatgaagaacaccggcgccggcagcgcaagagttggtgctagccgccgacatgatcttccacgctggagaaaagtgaaatgcagatttcctcaacagcatgagcaatctgatgagattgctctgcaactcgtacagtgaagtgccacaggactttacacggttgacagttccacatcacaaattcacaattcacaagacggtaaacaacagttgttagtagttatgttaattgttaattaagcaaaaaaaatttaaatatttcttcctcaattcaaggctccaaaataattaatagtagtataatatttttgacagttgagttcatacattatataattatacaagtgccagaccaatcttgaatggtggtctggtaagctaaaccatcacagcctatacaaaatttgtaagagcccacaatacatgtttgttcagatagatacatgtaattacatttcataaactctcaacacatcagtaggagaaaatgaacgacatagacagacattgacacatgcataacaaatcaatacacaccatgatcaacaaatctacacgtatagtttagagtttaactttagacccatgtagaagcttgacaggtcagtggagaaccagaacgtcctttttgcaccaggtacaaatgtacaattgcacccgagtatatgcatgtcacttagtagtataaaaatctagccgcagtcaaataatttcccggtttgtctagcatcatgatcaacaaatatacatgtacactacagttgtttagcatctaagaaaaataattcacttttatgttgatcaaattttccggtaaaagcaaagcacaaacaacatgctcatctcatcaagatactgtatcttcttttactgctatcaagatttgtaattgttcaattatgcagactcaaagagagcatcattcacaattcgctcacttagcatacatcatttgaccagctagacaaattgaagaaaagagcgcagcctaacctctctgacagtagtacagcagcgcagaacaacaacctggagtagccttcttcaacctggagtagccttcttcaagtaactcaacttagaataatggacacaaaacaaataagaccaatctaggaatgactagattaattttgaattaaggagagggtgaggctcgaacccggaccggctagctcgcagcttgcgttgctatccaggaagacccccggcctttctcaaacgtagaataacggacacatgtcgatctctgacagcatgatttggagtggtcattctgaaatgttcgagagcccgccatagctggttagagatgtagtccgtatagctgccttgtgggtgtagcattttgaacattgtcccggctcgagcttcgtcgaggatggctttgcccagagcaagttcatacttgccccctctgaaagctgtaagatatatccacctcaggtgatggctgaaacaaccaaggtcacggaagaaattgttcccttgatagatgtgttcatcatccgctttgaggagcccttcttctggtgcaacctcatcgtatctctgcagcaaaggcacacacgcgcaccttaatcagaattcacacatgataattctgcaagtcacgcacaattcaaacagaactcagacatattatatattactagtaccattgaactacagagacagttggtagtaattctgcagcaaaggcacgcacgcacaacccaatcagaaatcagaattcagacatagtctaatactactgatgcagagcaattaacagcaaatttcaggacaataaaatgattgattgattgattggattggctgtttattaccatgatctccagtttctctaagcatgggaaacacttcagaatctgctctatctcacggggcaccctgtgacccatctctgtgtagttcacccgtaagccgagaatcctgacagaacgcatctttggaggatgcagcaccatcccagcctgcgcatgatcagagtatagtattgttaattagccaatttggatttggatttgagttaatcgg

SEQ ID NO: 23044 - DNA, 5658 bp, Oryza sativa
acacggacacgattcgatttgatttgatcatacctgaatcacaatgcctttgatcacgaagacggggttgaagagatcgagatagccgatgcttcgcaggctgggcgcttcaccgatgaagatcttggatggtctcgtcggtggtaacaggtgcagcttccggagttggatggcgtcgtgcacgacgaccgtgccctgcaccacgttgttgtgcatctccagagagcggaggcgcgtggtctggacgaggacgtctaccagacggctgaagtcgatcgtcagcacccggatttccgattcggggcggagtgctcgcaggatcatgccagggcagccatacagcccgaggacgcggaggttgacgagggagtcgatgtggtcggcttccatggtgaagaagaagacgtggagtcccttgaggcttgtggcgcagtcgcggatgccctgggggagctcggggtgcccttccatggtgaggttggcgagggtgacctcacgaacacggccgcgctggagcgcggcgcaccagcggtggagttggtcggcgcgccaccgcgtggtctccactcggaagctgtagacgcggccgatctcgtaaccaccatctgggatgtcgtcgtggccgtagatgtcgtcgtcgctgatgacgccgtcgtcggcgcctacgcctccagggaatcggaggcgacggcggccggcgacacctccaccgtcagaattgttgacgactccaccgccttgatctgctgcctcgtgttcgagttcgacggcaaccccgggtccagaatcgtggccatccacgccaactacctcgttgcctccacctccatctccgtcgtcgtcgtcgtcgctcccgttctctccttgtacgcctacgaactggacgccgtcgcctacgtggagctcgagaacgttggcgatggcgtcggcgacgtcggcggcggcgatccggggagaggcgaactggcggtcatggagatacagcggctcggcgcgccagatgtcgagccagcgcggggagaagaggtagccgaggcggaacaggtcgacgacggggaggcggacgagcaccctggcgacgacgtcgtcgggtagcccccgccactcggcgtgcggggcgtcggcgacgggcggcgcgaggacggcggccggagcgtcatgcgtcagcgtcgcccgcggtggcttcaacctggccacggcggaggcgacgattgtcgcgcggcccgcttccattcctctccggcgagtcggaaatctggacacggcggaggcgtgtggagcaagctgcctcctctctctctctctctctctctctctggggtttcaaattttgatataccggaggttggatatttatagagagagtttttctctggtttttttttatcaatctggtgcgcacgttactgatcggacggtctgggtccaattccggataggaagaaaaaaaatctacggcttcttctggaaatacagaataaaactaatcggttagtagcaaatctacggcgcacaatgttgatcggacgacacaccgagcgccacctcacagtcacttcgccgtggacttggcaagttggcgtcagcagaaaagccatcgataccggtgtctcgattctcaattatctcatcagcagatgagatttttatcgataagatttctgcaattcatactgaaacgccacaaacacatttttccacaagacttgcacatcacaagatagtagacaactcatggttttgttaagcaaaatgaataaaaaaaatccatttattattcttcctcaatttaaggttccaaaagtgacaatgcaatctattgtcagttcatatgtcatataactacaagtgccaatccatattattcagtggtcaggcacaaaaattgtaagagagttcaggacatgtttgctcagatagcatgtaattacacttcagagagacacaagcatacatacatacttcctctgttccacaatataagtcattctagatttccccacattcatattcatgctaatgaatctagataaatatatatgtctagattcattaatatcaatatgaatgtggaaaatgttagaatgacttatattgtgaaacggagggagtacaccagaatagaatacacaccatgagcaacagagcagaatacaacagcataagcatagtatagacttgatccatttcattcaataaccatctcactgcagccaaatattttgtcggttcataaaataggttttatttgatcccctgagactgtccctttgcctgaatagttgatcacatgcctcataacctgtcaggatcagccaaccagaattgctccatcactcggctgctgcttccactccaaagctctggttccatccatggaagagtagtgtctcgtacatcagcagaaaccaaagagttcatcagtgatctgagaagcaaaattgaaacatacagatatggaatcaagatatcaggataatttctgtactaaatactccttatattcagatacataataacgctggagtaaagaaatatagaatgcactaatatgtagtttgtattgtaccccttagatgaagttccaacggtaggtcatagaagagaacaagcacaaacttacagtgaaatttgggagtcctgaaagtgttagggttgtctattggatcacctaggtttagatctagtcgggtggttctatttgcgatggatgattgaacaacaatagagaataagggaaagggtttagggatgtgaccggttgacgcgttggatgaagaggaagtcccagccatcgtcgttgtcgtcgctctgcttgacgtgggcggcggcggcgatggcggtcgtgacggcgacggtgctgcgcggcagtggtggtcgtaggggatcccggcgaggtcgtggcgcggcggtggagtcttcccgtcactggctgccccccctcgatcggttagggtttatggggtggagtggcggcggcggcgacgaacctcgttccttgtgtcgttatgtcgtcccgtcctccacccctctttatatggcacagtgtgacgggggcccaccagccattgggctgggcgcccctgatcagggcgcgggtcaaggcccccttgagccgttgggctcaaggggagggagatccatctaacattctcccccttgatctcactatttcctttagctttttctattccatcacagatttacatatagagcatgtttcatcgtcacggttaattaccgatggattcgacagccactatacacatctctattcagaaacagatactttaacttttgggccctatagtccaggattcataaggcttcccttaaaacccatgcatgctacatgttccttgaacatgttgggaggtaggcctttcatgagcggatccgcgagcatcctttctgttcttatgtgctcgagactgattgtttgatcccggactttgtctttcacaacataatactttatgtcaatgtgtttggcagcaccacttgactaattgttgtgagagtacattactgtgggttctttatcgcagtataactttagtggtttctcaatactatcaaccacctttaaaaccgggtatgaacttcattagccagttcacctgccccgtagcctcatggcatgctataaactcggcatacatggtagaccctgcagtggtcgtctgttttgagcttttccatgaaatagctcctactgccagggtaaacatgtatcccgatgttaactttgtattatcttttgcaaagtcagaatccgaataccccactatctggagcgattctgcttttctgtaagacatgatgaggccttttgttccttgcaatcacgcaagactttctataccaatttccagtgctctaggcctggattactttgaaatctgccaaataacccggtaacaaatgccaagtcaggtcgtgtgcacacttgcgcgtactataggcttcctacagctgacgcatatggctttgttttcattttattgagctcatactgatttctgggacattgcgatgccccatacttttcgcctttgactataggagcaggtgtagcactgcatctgtacatattgaatttcttcaacaccttttctatatatatgctttttgagaaaatcccaatgcatactttgttctatttcggtgaatctctatgcccaaaacatatgaagcctcaccgaggtctttcatgtcaaagtttgaggacaagaatttctttatttcctgcagtagattgacatcactactagctagtagaacgtcatctacatacagaattaggaaaatgagtctcccattcttaactttgaatcaatacagttgtcctctacattctcttgaaaacccaaatttctttattgttccatcaaacttcaagtagcattgtctcgaagctttgctttaacccataaatggatctctttatacggcatcccatattttcgtttcctttcatgacaaaacctttcggttgcgccatgtatactttttcctccaaatctccatttagaaaatgccgtttttacatccatctgatgtaattccaaatcataatgtgccactagtgccattataatcctgaaggaatctttacaagagactggagaaaatgtctcattgtaatcaatcccttctcgttgcgtgaagccttttgccacgagtcgcactttaaacttttctatattccctctagagtcatatttggttttgtagacccatttacagcctactgttttggctcctttaggaatttcttctaaatcccaaacatcgtttagtttcattgatttcatttcatctttcatggcttccaaccattcagatgagcgagcgcttctcatggcctcttcatatgaggtgggatcatcctccatatgcgactcttctatattataaactttatagtcatcacggatagccgatcttctgactctttcagaccttctaggggcctgcacatttggcacatcctgtacctgaggctcttgatgagtctcctgtactggcacattatctatttgaggctgttgtagctcctcctctggtgtggcaaccatttctgttgaatcctgtataacaggttcctcactctcattcattgttgccacaggaggggtaacaacaggtgctggtaccgcaagggcatgcattgctggcacaacattagcaggtagagagaagaaaggttcctgagtcgacggagcgggtacagacacccgcctctcctcaagatcaatttctcgaattaccgagctccccctaatcatttcgtcttccaagaagacggcgtgtctcgtttctacaaactttgtataactgtttggacagtagaaacgatgaccctttgatctttcagaatagccaataaaatggcagcttactgttttgggttaaatactttatcctttgcaggactcccccacacacggaggatccatagttcatacggtgttttgggcaccgatgcattctatgcattgtatgcattgttctaaaactgagaactccaatggaggaagaattacattcttaaccagtctctcaattctccccctcgaaatatggcctaaacaacagtgccataatttcgatgagacatcaggagttcgctttcttttcttgggctgcaggaat

SEQ ID NO: 23045 - DNA, 4193 bp, Oryza sativa
ttgtagttgacaacaaggttgtcaaagttctttggcaatgaggacaaaaccagatggaccagaaagtcatctgagatgcccaaatctttttgcttcaatttggaagccatgttgctcatcctaagaatgtggtcttttacaccacctccatggtacctctctgtaacaagctgcattatcagctgtgtcgcataaaactttgaagaaccagtaaactggctctttatactttcgaggtacttagagacagtgtcatactctgggattgagcccaatatggttggctcaatcgtgttctttaccgcagccaaacaattcttgttggctgaagaccatttcgcatgctcaatgtcatacgacatgatgagggaagcattgtccctctctctcttttgccattcagcatctgactctttttcacctctgaaaatttcagcaggttctataggacatggggtagtcaacacccagtccacctctcccaagataaaagcaaggtcgagttctcttttccattcttcgtagttatctcctttcagggtcggaatatctttaatgtaacccatcaaggagtagccacctaagataatcatgtattgtgagaacaaaattaacattaaaattattatgtattaagtctacatcaccgttgggcagaaaatagacataacacataaagccataactataacattgcaattatcaacgttggtcagaaaaattacaacatcatagcacataattaatgttcctaaaattaaaatctcccgttggttcgaaatttaattttagaaacactaattttcatcaatttcatctatttgcagcggaagatctatatacaattcatataaattgtaacaaaactctgttgtttacgctctgtaaaattctcccgttggttcaaatttaaacagagataaaacatgtaaaaacaattcaaaattctattgtaatttgcatgaaaatatacaaaatacatgttcagaagcatttctcacatttatctattctctaaacaattttcacgttggttcaaattgcttagaaataaacacaatcattaaacatattgaaaatgcttccttcggccgagggacttttattaaacttcctttcttttgattcggccccgagggacctaaaatgaactttttcggcctttgccagtcggcccacggccgccttgcgcgcgggcgggcgccccctcccctttccccaggccgcaacctgggcctgggccgggaaagtggctcgccgtgcgctcccacatgggccgatttcggtccggccgccgtcggccgtccgatcgctagggtttcgatcggacggtcgcgcggcggatcgggcaaacaaaaccgcccccggccgccggcgccgaaaccctagctcctcttctcttctttctcttgcggttgcacggagcggcgtcgccgtcgccgaaaaccctagcacagcgccggcggcggcatggcgacacggcggcgccgtcgcactccccttcgccgatgcgcgcactcactcaagggtgagtgcgccgccgtcgagcggttgtgccgcgacgccctctcctttctcttgcgggcgtgcgccgtgccgagcggcgtcgccgacgccggcagccttcgcgccgccgcgccatggccgacgccctcgcgccgccacgccctctattcttttctcttctcccccccaccgtctcacccctccacgcgagtgaagagtgagagaccggcgacgacggagatggtggcgccgccgcgggccccctcgccggcgcgcgcgtgcacccgcgggtgcgcacgcggctgtcgagtggctcctcggcggtgcctctttgcccctctccccctccgtggccggcgtcaacgacggccggcgacgaggtaagattagggttagggtttcgatcttttcgatccgttggatcgtttgcttttctttgcctttcttttggatttctttccccaaccaatctaaacgctaggatggctctgataccattgttagggttgtctattggatcacctaggtttagatctagtcgggtggttctatttgcgatggatgattgaacaacaatagagaataagggaaagggtttagggatgtgaccggttgacgcgttggatgaagaggaagtcccagccatcgtggttgtcgtcgctctgcttgacgtgggcggcggcggcgatggcggtcgtgacggcgacggtgctgcgcggcagtggtggtcgtaggggatcccggcgaggtcgtggcgcggcggtggagtcttcccgtcactggctgccccccctcgatcggttagggtttatggggtggagtggcggcggcggcgacgaacctcgttccttgtgtcgttatgtcgtcccgtcctccacccctctttatatgacacagtgtgacgggggcccaccagccattgggctgggcgcccccgatcagggcgcgggtcaaggcccccttgagccgttgggctcaaggggagggagatccatctaacagaaaggtcactgaattatgcgtgtcaagattgagctacttcctgccaaacatttgacatgcctcaaatcatctgagaactttgaacccagcaaaaccctgatgcaattctgcctaaagaactggcagacccacattatgctacagccacaacaagtaaacaacccgatatctctcataaccagcccttttttttttgagaaagaggggcagaacgccattttattaatgaaatgagcaaaagctagaggttcatataatcccaaatccatttctagcagatcaacaaaatgaaagagcaacacaaattccgattcccaggtaacatgactaagacttttcattatcagcacgcccacatcatcgcggcagagattcaccaggcgatcataaaaataaaatattcaaaataaccagccaatttacaacaggaaagaaaatatccacacgatcatcctctaccagaagagggcttcgatcgcaatctcgtattgagataaaagcaaagtttagaatcactggcaaatgacaatgcaaacaggcataattcctatgcagcagtgcaccatatttctacaacagcagcaaaagacatagcatgattatagaaggcctcacctatcatcagacatttccatcacatcagaaaaccaaagctgtatccaaacagaagtaaagcagaatagcatggtagaactggtaagcttgtgaattctgaattgataagagcaattcgaatcggccttagcaccaaacaactcaagtagctctcacatcagaccttgataaagtgcacacaggcacgcagttggcttaacagaattctagccatgtactgaagacttaacctaacccaaaacataggtagtatatactacttaactaggttaatgaccagggtgatgatctgctaatgataactaggaaaaatgccatttgcggagccgttcacaggtgtcccagcacattctgcaaaaacagcttcacttcctgtggactcatctgatgatcttgcagcatccttttgtggcattcatccttaagatcttccatgtcgagtgcaatcgcagcctgtacagagaaatcagattagaaacatataaacatctgtctgaactctgaacagagaaatcaggcagcctactatagtatatctaggacaagtttcaaaagtggaagtactttagtcactatatatcttacataatactactatatcttacaaaagaaatcaagctgctaattgtttgttttattcccaagatctcagccaaaatttgggccgttggttctagatccaacgggttctgtgcatcttctacctctagaacactgaactctctctctcccctcacctatcgattagctgcgcaactgcgtgtctgcgccttccccgtctccaccggcgcagcccgccgcctactcggtttccctcgccgtcgccgtcgccgtcgtcgaccccttccaccgccaagccgcgagattccgatcaacgggagaaagagagggagaggaaggtagaggttgaagacgaagtacacacaaaatcgcaacgcaaaaccacacagtcggaaaaatccctaacaattgcaagatgcctccattcccggcgaggagaggagaggagcgaggggcgcttacccttgtgaggtggccgagggtgtccaggtcgtggacgggctgcagga

SEQ ID NO: 23046 - DNA, 6343 bp, Oryza sativa
ccgccagtcgccccgcgctgctcttctcccggggtcgccgtgaagaagatggggaagagagatggagagaggaagaaagaattggtcgttcacatgtggggcccacatggtcccatgctgactcagatgcaagtcaatacggggtataaatactgtcttagacctctggtaatccggttttgtttctggtaatgtggttcagggataaaattaaactcggcgacaaattgaggaacttattattacgcagttcaagctacatgggccgtagaagaaaattctctgagaaaatgaaggcccacaaggcccaatactacctaaagggcctaaaacccctcgagctctctcatctcttctcctcactccgcggccgcagcgaacccttccctcctctctcgccgccgccgccgatccccacctggaagcagcgagccgccgcctcctccccaattcctctccagaatggccggggcgaggagcctgctcctgaggcacctccgcgtggcggtggccccttcctcctcctcaccggcggcgtccctcaggcccgtggtggcgctgcgcgaggccctgtgtgcccggcggtggatgtcgtcggaggaggccaaggggtcgttcctggacaaggccgaggtcaccgagcgcatcgtcaaggtcgtcaggaacttccagaagatcgacgaccccgccaaggtatcactggccgcagcataccgttcttcccccctcccttttttctttcttacttgtcgaatcgaatcgaatcgagaagtgaattggttctcgatttagcttgaattgatcccgtgggatagcatttcgatgttgcctggcgagtagtcctgcagatctggatgcattccgcagtttaggttgacgctctagcctgtggcaatgctgtcggcacgtgtacatgctctttagtggccttgttgaaaccactcttgagtttggtcgaggagttgcgggggattgtgatttgtgagtatcatctgtgctcagttggatgttaattttagcaagttatgcgtatatctgtgatcacattgaggcatacagtaggtgataaaaaccccgtttccttatttttactggaagtttggttaaaaacatagtctgtagcagattggtagaaccacctgagtaggtaaagagtcacagggggactgtgagcaacatcttctgtgttcagttggatgttgtaatcttagtaagttatgccatttccatgcgtatctgtatgacagcatcgaggcttgcattaggtgataaatccttggttctttagcgcataagcctatcatcatcagtagaacaaaggttgtggtggttgaggttgtgatttccacttttcgagctctacacttcgttggaaacaaaatgtaggcagttccacacttgtgtaatcctttacttttctcttctgtcccagaagccatcactctagttcatgtaaaatttggatagagtcctagagtatgacgacaaagtatggttgagcaaactgcatggggtttggtctgtttctgttactcatgtgctcatggaacctactacaagtaaccaatacttgggttgccacagtagccagcaggtaaattgaagacccaacattcactcaattttgagaattgtttggtggattcatcatttatgttagcttttttagaactaatgttagtttaaaaacatgtgcctggcaaatccatagaaagtatgtaggctgcctcaagtgaatctattaaagcaaagaaaaaaaacattctgaagttattgtcatgtttcggttgttcaacaacaaaaatgttttatgcataataattatggaaaatcatcaataatctgtgagaacatgaaattattcatattagctctaactctagttctgtcaaatatctggtttcaaaaggttgcttgggttcatttaaggttttcctgttgcagctaaatagctagtagtcatcttgattctgttccttggacacatttctgtgcacttagttacaaccattataaatgaattctttttgctgcatatttgttttgaagatttaaatactttgggttccccattgatgtgctttaatgctggtttgctgtgattgcaccttgataatctgcagcattttatctgtcgtgttttgatgcctggaatttgcatacggtgccttttgttttgctccaggattgagttgctttagttcatgatacttaagatggatcctttccttacggatactttttaaatatcccagatttgcatggcaccaattagttcacgctaaattcttagtcaatttcttactacgtcctacaggtcacaccagatgcacatttcaagaatgatcttggtctagacagtttggacgcagtggaggttgtcatggctttggaagaggaatttggttttgagatacctgacaatgaagctgacaagatcgactccattaaagttgcagttgatttcattgcttcacacccccaagcaaaatgagcaaatcaattgtgttatactcgttaattttctatgttttgttgtcacggagcctgtctaaggtggaagtcatctgctgtccgcatgatgtccacttttgcaatcagcattgtaccaatgctaccgttctgaatattttcttctgcctgtgggttttctggaccaaataatacttgattctgaggcggcagcccgccatcttgtatggagatttcgctggatatcaaaggtttagtttcatgccaagagtctcactgattctgtctttttccattttcttagattttggtgatatgattacatggctttgcacataattcccaaactgcatgcttggtgcaatcctgaaccgtggattggtgtttaccactgaaggataaatatgttttgataactgtagcatgcatgtctatgtagaatgcacaaatcacaagctgaagagcagttggtatggactggaacagcaacaagattgaatcttgccacaacttcagcaatcgagttaaaacatacttcctccgttttacaatgtaagtcattctagcattatgtctagattcattagcatcaatatgaatgtgggaaatgctagaatgacttacattgtgaaacggagggagtatatatatatttttacaggaaatacctcacggcccagcttatattgaaagccacaaacgagttaaaacaatttcgactgtgaccttttagtctagaacataaattacttcactgcactctacagctacacgctaacaccaatgatatggtgcgcataaatgtccgtgcatgtagttgtagtgtgtgatcactgcaggctggtgcatgagtgcgtcatgtccatgccctaatgagtccattcctgtggtagagcgagctctgggcacgggctggtggttgccgctggagcaccggcgagctgctgcatgtttgccgccattgctcgcgtgagctcttgctgcctcctcgccatggtcgtcgccgcagccgctgcctcgttgcctcgccggtgcctttgtgcccgacactgcctcggtggaacattggtagtaggggggcctcgccgcagccgccgtcatgtggtggttcgcgtggcgggggtcggcggccgtggtgcgcggcaagaagaagcctgtgccgctgctgcgccgcgtcgtcaccggcggagctgctccggtgacggcgccgccacggagtagcgggtgtgggtggttcatcgccggtggcggcgctgggcgcagaaccatggtgttccttgggccacccgtcatgacatgccacggcgcggccggcgctggcaatggcagtcgactattcccaacaagtcgcagttgcagcggcggcgtggcggccacccttggacggccggcgcccgcgagggcgtgatggtccctaagcatttcaccaccatccccgcccgtcacctgtggtcgatggtgacaagagaagagagggcgctgggcctggcgaggtcgatcctcgacgatggcgaggcggcggcgctcgtcggcatctgcgatcccgatgtccctgaggacctccgacggcagccaccggtggacgtcatccatctcgtgcatgtaaacgcagcagcggtcggccattgccggcaaagctagcttgagcttgagcttgaggaagccgatgagtcgacgctggatcgggctagacgaagcttgtgcttcttgttggttgcaactacgtaggagaggtgaggaggaagaagagatgctttgaggtgtggagaatgatgggggtcaaaggagtttatatagagaggtgagagctggactaaagaggaaggagataaatagacatgctccaaataaacatgtttttttgttggctatttttttcttcgtacctagctagatttttttgctattttttcttgatggtttttaatgtgtttttggtgttgagaatgccatttacatgcacgtattgttgtctgaaaagaagcacacttgaaaatgagctagctgaactgaaagttgctataattagatttttactgcatggtaatttcttttttttttttttagtttcagatctctagacatgagggggaaaaaagaaatcgaccggttggtgtgctctgggctattgttgtggcaaaatggctgattgttcatcttgggaagtgaagtaattaaggagaaatttcaatacatatacatatttaatgttttatttttctattcttaaagtcgaaaacgagagtctcctaccgcaatatatacatacaatagaacaatatagaaggaaaagttacagttacaaagcaaataaagaaacaattttaaattattggatccaaacccagataaagtaaggttttaagactggattgtacttccagtcatattttaatgccaaagttttactttcgatcactcttagtccaatcactagataactttatatttgttactctgttccacccctggtctcttctctagctatatctatccacttatcctcaaatgtatgtcttgcctataggtgaggggagatcgctagggcgaaaccgatacgctcgggattgttgatataaatgaaaagattggataaagtgtagtctaaagtaaaactttgataataaaaaatgactcaaattgtaatttaccctttttaaaagtgttttagaaaaaaaactctaccgctagtgtgtttcatcttcatgtattgggaagtcctagcgttttcctctcttcatatttccgggataactacatatgattccttttatggttgtcttgttgctagagctatcttctcgtacaagcgcttagtaaaagttgtaacggcaccgttgcatccatattgtcaggtggagaaaagcaaaagtaccaagtctcgtagtttagatcgactctttttaaactcgtaaccataacaagtcaagtcaagttgggattatatgtggcttgactaggagcataatatgcttgaactttcatgaaggtgctcttcgttttggaaacaaaagtagactaatactacgataatcaatctactcgatgaaatgagaagtgtcaatacacttacatactccctccattcttctttacatgatatcgtaaaactagtgccatacttcatgaactaatataaacagttaatatatatatcacataattttaaaaaatgtatagcacacaattctaagaaaatgtattgcacgattagttcattatcaatgtggtatgagtgtggctcgagtctaataatgggaaatgtttgattgaaaatgtcaatctacaaaatattttcacaatcatgccagtaaaaatgttcccaccataacttaaaaccagttttggaaacaaaacctttgatggctggcttctcactggaataattagtaacaggttaattttacattcatacttagcttagttatcttcaggaaacatatacctctcatcttgtgtggcaggctagcagcaaacatagttttgattaaaaaaggaacttagtttttgattggtgaacacgtgtgcatcttttggaacaagattttcaatagtgctaaaagttcaaagcctcttatggtgagaatatatagggccaacgggtacctagacgtctatagtgcaaccacatgatccaagggttgaaaaatttgcagaaagtggaactagcagaatatttgctaagtaacgttaattgctccatcaacttagaattatttagtagaaacaataaaaccgtcacacttattacgcctttaggtggaaccccaattatataaggtagtgcaattaccgttacttgatagaaaatttggtaagtaataggaaatggtccatcaaattaaaattatttaagtaaaaataatggggg

SEQ ID NO: 23047 - DNA, 4009 bp, Oryza sativa
ggagagatatttccagcacacgcaaaacgagacaactcactaccacatgattaattaagtattaactattataaaattgaaaaaaatagatttatttaatttattaaacaacttctatatagaaacttttgtcaataacgcacaatttaacggtttagaaagcatgctaacggaaaacgaggaagttaaagtttggagttgagaaaaagaaccgagccttattaccactccctctcaacatagacttgtttagtcaaaataaataaaaccgacatacttattacgcttttcggtgaaaccgcacttccgtgaatacgatatcatgaccaaccattccctacattttatgactagagcaacataacatcattagtacatatgattaattcgacgagatatgtaaaacccaagctgatggtatcaactctcccacaactcagtaaacccattctcgagggagggcgagcttgccgcatgcttgaggcagaacggtgttcgaattcaccgtccacggacgccaattctcatcatggctgcctcctcctcgtattgctgacgctcttgacatggacgaggtggccgcttcacgctggccaaccctgacatccccatggccacattggtggatcgcccggttatcgtatgccttggctcttgcagcaagaaaactccgttgcatccggcatcactccacttaatttgcaagatggggtgtctgcagggtgccagcggcgctagcactggttgtggtgaccgcatcaccggagcaaaacctcggcggtgcaacaagcacaccagattttcatcgtttctcatgaactgccacactttcatcggtggtggggcacaaaatttttgaccatatgagttggccgacctaaccagagaggggtgggagcaagaaggacaatggtgagacgtgcggcgaggtcctcgacgatggcgaggttgtgcccctcagctgcacgtttgtcgaaaatgctgatgtccctaaggatctccaacggcagccactggtggacatcgtggaccattgctttctacgcttctttggaggaagagaggctttgaggtgtggagaatggagggatcattggatgagtttatacagagaggtgatgaatgggctatatatagaggaaaaggcgagtaatagacacgtttttttaatcttatcaaaagaacatattcttactgattttcaccttaatttcaaggtgtttgccttatttacttgatgacttttatgtttttttagtgatgagaattaatgtgtcccacatggagtcttaaaaagaaatttgcattatctggagagatgatgtgattcaggcaaagataacttgggtggtgtgctctctctgcttgtgtcaaaattaatgaatttttcctcgcaaagaaaagaaattaatgaattttcatcactgtatattttacctttaaactataactgagcaattgattggcaaaaaaaatacaataaatgatgacaggcaatgcattaattagatgtacttgctggtgcaataagggtcagtactacgtattccatccattcatcttgacgtcattaaagcttaaacccagttcaaagtaatttatcaaacaaaaatgttaatttgaacttttcaaaacattgcaattccacacagtttaatgtggatcatggaatgatcgcgcacatgatgctcttaggtgactttcctcttgctcctcttctctctttaattatttcattcgaggagttactaacttatggtttctatccaagtaactaattaatgcaaatagtatttattcacctctactgttaaaagatagagttctgttcatgtcatcccctcgaccaccatacccaatgtatcacatggaaactgctctgaccaaaaatagaccgacacaaatgaaaaccgcccaacctagaaaaaatgaaccacacttaaatggggtccaacgagccatcgctcctcatcatccccgaaatgccactcacacttgccactgcctgctgcatcctctgcacattggccttctcccatgccacggtaggagattgtgctcatgtagttcagtggttgcagtgaattgaatagcaccctaaggtattgagtttaaattttcatagaattaaatttctgaattgttttaggagctaattttttaatttaaaaaggttgcatatgtccagttgaatgtagaggccaggtaaaaaatactcctctagaaaaacgaaattgttctcatgaccacagccatgaaacaaaagtggtcagcaccctcaagtatgaggcagacgaagcagacaagaagggcctgcaccttcttggtgaagaggaatagtctacccccaactctcatctccacatttctttctcggcctctccttatttggattataatccctcgccctactcctatgtgatgaaaacaactcaacatgatcggtttaaggtgtcagaaaatagatggataatcaatttccagttcattaaatcgtttgctttgcactttgcttgcaatatgtaaatccatttgaccagaacttagaagtggcataaacaattaacctcttcgacttatattaggcatgtagtaacaccctacgtcaggcgctcgacactctggagaaatatcggaaaccactcccccctcttctctctctcatctcattatgcacttgcttccccacagcaccattttatgtacaaatgaatgcatctttatatggttttttttcttaaattacttctctaatttatggtccggccatactattaaatttgttataattaaatagttacaacaagaatacacattccgatgaaaataatatttagctttttcaatagattttttaatattgcatctaattttacttaaatgtttcaactagtgctagttaatttgcacatgttacatgtattaattctttgaatgttttagttagtatttcagtttaatgtttcaaaagttagttttatacatgatataaaaatgtttcaacaatattaagtatttgcaaatatactgcatttttcatatgatttttttatgtctcactcgttgggactcaatgcttcatacaatgattgctagtattgcagtcaatatattcaaaatgttgcattttttttgaaacatttttattgagtaagctggaacatttaacgaagtggtgaaacaaatttttataaatggttaaacaacgttcaatttttcttatcaaaatataattctatgagatattattataaagatttaattacaatgagtataatggtcaaattggattattagcctcataggatggctgtttgaggtgaggcttttcagcgaaagcccatcgcctcgctgattaggctgagagctttcagccagatatacatggatatacaagagctaaaagctaggagctacaaccaccagtcgtagaaattcttcttcgaaccatttaagcaaaacaaaccaaccgatggattttctttggctgaattgaagaaggcaactttggctgatcagccaaaacatttaactttccgatgagaacctataaattagataattaatttagaagaaaatttcacttaaagacctaagaaatagcttaagataagcatataaaatgggcttaagccatatatgaatttatgcacatccatatagcgtcttgcgtgtgttagatagccaaccagagaaaaagattagagggagtaccgccagcatcagggaatgaagcacccgattttttatttttatttaaaaaatcagacgcctgatttgtagttacttccttaagcatgttttgtagttacttccttaagcatggctggttctgttttgcaatcacatgataccaattgccaaaccaaaatttcgcaacattcaaatctatgctgaccataaaatataacaattagcaatttagcatagggattagcatagacgttcataaatggtcgaaaatgtttccaatttggaagcacagcagctttcctgctatgttctcttt

SEQ ID NO: 23048 - DNA, 883 bp, Oryza sativa
  unsure (1)..(883): unsure at all n locations
gttgattgagttgctgccgtcaatcagaactcgtgcgaccttgatattccgaatagtgggttcgaccacgatcggatatcgccctgggatgacagcagtcttgaggtggtcctcttcagagaattctatcttctgctcagactacttcatcttgggcgcagctccctgccacgtcgaacagacttcacgttccaccttcttatattctcgctttgaggagtatgtcgtggaacctccaaagatgtgcgagacatggagatcagagtctgggtatgctgagtccgattctagagtagccgcttcagcgtccttctcgaccacatgcactcgcttgcctttttccaatgccatgtgtattgcgagcgacttttttgaagacgaggcaatcttatagagagtgtctatctgacttgtgtatagggcaccatgttttcttcgtgtcgctgtcttgtgggtctacgcgcttgggagagtccgcgtattctgttgtgagaacatccgcttgagcttaacttttcctactcttgcaattttacttcttgctcgactcaggtgcgtctttgactggtttcttctctcctccggtcttcggtttgtcgttcttgcgtctnnnnnnnnnnnnnnnnnnnnnnnntcgatcgacaattgctcccatcatatttcactattgctcctggtcagaatctttcaggccatcggacatctcgaagtgaacgaccgaaagctctacacccatcgctgggggcggtgggttgtcggcgatcgtacatccttcgtggatgtctatctgatgttgaggatgaggaagatgacaacgatgacgatgggtcgcttggttccggcgtacgattacgaggacatcggctgggttctcgagaatcct

SEQ ID NO: 23049 - DNA, 24565 bp, Oryza sativa
cgaaccaaatactcctactccgcgaccttcattctctttcctgcaaaagttcagtatcgttggttttaccaatgaactaaacaaagctcgttaggttaaagttaggtttacctttggggacagtaatcctgaccagctgtagaccccgtgagaaataacacagagacgtgcgaagagctgtgaccgcgttgccggctcagctccacagctgtaaggccagcacacaccgtaggaccggcacgtggcggccagccacgacaggataagccgatagactgccccggtgccgtggcgtccaggcttaagccccaaccaaaatctgccacgtaacgtggaagctcacgtgggcagccagcactgcagggcccaggcggcggcgccttgccgaccttgccaaagctgagagctccccgcgcctcgccgccgtcgccaaccggcggctttgaattgaggccccagcaacgttcaaacgtgtatccataccaaccgcagccgagcatctgtggtagtatatgcccgtggcatgtcgggaacgcaaatatcgcccagcgcctaacatactagtactaccaaccaaacattatctgatctgatcctgatcctgatccaatctaatctcacatggcgcactaccgttctcgtcatgcagatccagggaggacgcagacggattagcagaagatcagaagaatacgattttcttttatatagggtattttgtagtagttgtagctctaacttgtgcagttgtgcaactcctacaagtagatcggtacggattatgtgtaagacagcaacaaaacagattagccgtcaacgtagccagccaagctctttaaaaagcattaattaaaaccactaccaacagtcaaaccccccaaataaacggaggcgcgcttctactgcccgtgaggcacaacagatcgttacgatttcgaaccatctccatgtcgcatgtcgctgacgacggcagctggccctttttactgcagtcacgggtgagcgaacggccgaagcgacactggcgactgggccgtcccccaccggttgccccgccacgccgaagcatcgcgtgcagacgcagacacagtcaccacgtagtcaaacacatgcccactcgaggtgatatttttccctctgcgttgcacttgtgtgtggcgtacacgtactactaccggatacagtacagtcgtagcgaacgtggctgagttatgggcgtacacgtgggtgtcgcgaggcggagccgcggttgcagtgggaacttgggtctcctccaacctcgtatggtcgacacgtcacggtcggcagcgagggttgacgtgaaggggattgcgggggggactgacgcgtggatggtgactcccggtccccggcacgtgccgctccggcgggtcagtccatccatctggctcactcgtcgctctgtccacgtcggtcggttccaccacctgggtcagtctttttttcgtttttttgactcgtcgctggcttctaaaaagtgtagctaaatttaaatttcaaaaatatttcttttttttgttacgagtactcctactcctatcatttcgtttcacccttagggtgtgttttgttcacgccacaattagaagtttggttgaaattgaaacgatgtgatggaaaagttgaaagttcatgtgtgtagaaaagttctgatgtgatgaaaaagttaaaaatttggagaaaaaatttaaaactaaacaaggccttatcttcgaaactgttgaaaacgaaaacgcagtaatataaggtatgaatgaggtattggcctgttcgactgctagcaacagtatcggcgatacggtatcgcgcacacgcgacgcaaacacagctgcccatctgctgaacaagcttatttatgtgaaaaaaattgctccaataaaaattgatgttttaaagagacgagttaggataagcactcaacatgaaataagattaatactattcgcacacatgggtgcagccagtaatgaagtctactctctttaataaaaaaatataacttaatggaggacaatccaaatttattgttttatgtctcatttctaattaagatgattttcttttatggaggaactctatctatgtgaagctaggcattcaacgtataatcacctgcgcgtgtatgtgcgcgtgagcacaaaagtggtgtgtttactcagttaaaagaaacttacatctataaatacattttagtctacacaagagtataaaagtggtatgtctaaattcgtagaaatagataattgcttatttgaccctgttttaaagcataattatcaatttgaccctacttgtttttagtttacttatttggacctgtttttcaaaatggaatgaactatttgaccatgttccgttaaggcgggttaacacggttaaataggggccaatagtccattttacccttacttatttgacactgttatatcaaaatatacatatatttggaccttttaacaaatctaaatcaatttgacaaatttaatagacagtagctagagctcggaggttgatgctgggtgccgctgtggaccaccctttgcacgccgccaccactccaccgcacgacagcacgcgcggacgtccctacacgcaccgcacggtggcgccgacctccatctgcacgccgccgcccccgaagccgtgcgccggcgccgcgcgatggcgccggcgccgacttccctcagcacaccgccgccgccgaagcggtgcaccgctgccgacctccctacgcatgccactgtgatggcgccactgccgacctcccaacgcgcgtcgcgtgacggcgtcgccaccactcctccctccggtcctccgccagccaccgtcgcctgcctcaccgtgcgccgccgccagtgctccctcccttcccacagaaccgccgcctccccatcaaagtccgccaccgctacaccgccttcgctgaccgccagagctagatccgtcgtgcgcgtgcctcggcaccactggatccgtcgcctcatcgccgagtacaaaagtggtctgttcaaattcgtagtactataagactggctgcgttcgttcattggagataggggagattgtcactcgttttccgcgcgcacgcttttcaaactactaaacggtgtgttttttacaaaaattttctatagaaaagttgctttaaaaaatcatattaatccatttttgatgtttaaaatagttaatactcaattaattatgagctaatggctcacctcgttttgcgtatcttcccaatcctctctccctcgaacacaccctaatgttttattcggttgtatgttcttatattttagaatcgagaaagtaattaactggaatagttatttagggcttgttagtcagggatggaaacagttaaaatgggaacattaattataaatgtgggccatgaatggatcacggacagtagccacgcgttgatcctatccaatagcgtagcacggccgggggaacggtggtccccagcaaaaggagtacgagaagaaaagaatggagggacggcatggcaggcacagtgcaagattgtggggcgccgccacattatcctctctctcccccggcccgtatttcgtgccgcgtaagccaaccgggtgcgtgcccctggcccccactcgcaacatggcttttgctacagctatagagtagttgtactccagtgggccatgcctccatttataactccattggccgcccgtacggatttgctaccaacttgtggaatcaacaacgatatcgttaacccatacccgtaatagcttcgttagtttagtgatcatcgtcacattttctatacttagttaagtttagttaagtatacgggtttttttagttaagtatacgggtttagaaatgaaaattaaagttcgttactcggatacgcttacatcgttttttaatatatagtcgcaataagtgaaaccaaggtaatcttttagcttgttaatgttagcataagagatcactattttttttatataggccttgtttagtttcacactttcaactttttcatcacatcaaaactgtcctacacacgtaaacttttaacttttccatcacatcgttccaatttcaaccaaacttctaattttagtgtaaactaaacacacccatacttaatattttttaacttagaacttaatcttttaagtattttagctaatatttaattaattatgtactaatttaacgttctttttttctgcacgaaggattaggtggtgtttggattcagggacttaactttagtgtctatatttatacactaatttatagtattaaatatagactacttacaaaactaattacatatatgaaagctaattcgcgagacaaattatttaagccaaattaaatccataattaaagaatatttactgtaacatcacataggctaattatgaattaattaggctcaatagattcgtctcgcgaattagttcaagatcatggatgggttttattaatagtctacatttaatatttataattagtgtccaaacatcttatgtgataaggataaaaagttttagtcccatctaaatatggttttagttccaacccacgtaaaagaatacagcctaataaagtaatagtgctaacttagtagtattatcttcttctctttttttgcccagctactagttgctgctagactactgctgctgtgctgtacaagcttgacaggatcatgaagagaaggttagaatgtactaagaaggtgaggtgttattccaagtcttgatcagaaagtaaagcacgcgatctgcaaaaaggggaaatcctcggacgggataacataatcaaagcaatgtgcacagtgacttttcgcgcgaaaaaaaaacatatattagtacgtactgatcctgcatctggtcctggtgatggaattaggtatgggaaagagataaataatataatgggcgaacagtattataagggtggacccggcgctatcaagaacgtgaaggcagtgttttaggatataataaaccaaccaaatcttgacgtactggtagatcattaaagagatggtcctccacgcggccaattcattaagaaatcgataattaaagaagggattaccactacgctagcagtagcagtagtagtagtagcaggtaggagtaattgttatccggataaggttactgcagctggagctagcattatggtacttagtttgtttaggttaatcctcttctgcgcccgcactcagatcggaaaactgcaaattgctgtaatgctgaagctgtcatatgctgtgtctatgtggcccttttcatttgacccgtcttttagcaattttcacacgagaaattccgacgttttcacgctgctagtcgtgtgctcgtgccgggaaacagccaggcgcgcgccgcacagatcaacatcgtgtgctgcacgccgcgggatcggggcacaccagtgaaaatcaccaccgccagagtcaaccaaaacgtacgcgtcgtatgcgcgcgattcgtcgacgcgtctcgtcggagcaggcagcctctcgctgtcgcccgcgtcgcgctcgtcgatctcgatccgttgctaaactcgaacgggaatgcgagctaattacggggtttagcatgtgtaataaggtgcggtgattcgatcgatcggcatcctcgtgcatgcgagccgtacgtaccggcctaccggggggatcgaaaaaaatcgtgtgggtctctagggtcccaagtgtaatcgcttccatgatttttttggtgaggatgatgtatgatgttgacgagcaactcagaaaactactatctcctcaccatcaccacttttatcctctccaaaaaaagagtacgaagtagatttcatcagatggacacttggacggatggtggtgctacgatcacgatagatctcttggggccccttcccaactgtaccagattgcttaaaaaggatggcactccatgtctcacctgaaaggctgatgactcggagctatttccagacgtgctagaaggtgaggtgtcgtccaacgacaccaccacgcaacaatgctcgtcagaaatatatcgtgcgatttctgctgctgctgctgtgtgcgatgcgaacatttcgctggagaaaaagaccagcgcactcgactcgaccaccatgcatgcgctgcgctgcgctgcgctgccatgtgtgcgcctcggctcggcgacagcgcacggcgcgtatgcgattcttgccttggactccatgccattgcagcgccgtgccatgtcgcgccgtggccaggccgccgcgccgcgccgcgcccaagtctttgactcgcgggacgcgccgcgcgcgcgcttttctgcgccggaatgcttgaaattttcgaccgatcggggccctcgttctcccgacatctccgcgccgacactgcccggtaatccgcttgcgttccggtcaactcgtcgcattgctcgcgatggatttcgtcgcggtgcgtacactggttgcattgcatggccacttggccagcaacggcgacgtcgtcgtactcgccgttttttcactcatgtcgttcgaccacaacacaaccactacacacgactacacgagtcgcgactcgcgagtgagtacactacactgcacacgaaaggaacatgacgtagccgtagtatcgcccggtggtcgagatgtcgaatgattggtcgcatccaacgatcggagataagaatatcgtatgctactcgatcgtctgtactactgctattatcgcaaaggctaaaagggggattagctagctagcgacatactcacattggggataatgatgctgtggctatagtgcggcagctgctgctgggatgacaggatgagggcagtgggtacaggtgttgcttttgctttctctgcagatcttcttcaatccatcgcgagatctttgccgtgattgtatgggtttgaccctggcgaatttcggttggcaattgcttagacagttcgatcaggatcaattcccttttcatttcggcgacgtcgtcgttgtggatcagatcaaagagtaggttatggtataaaaacagtacggattcattggaccatcctatacttgattagcatgttcaaatcctttactccaggaatgtttggcagcattccggctcagcatgtttcaggccaccaatgccatcgaaacatgggtacttttttgcacagaatacgccatgttatccggggtatagggcttcggtttgttgatggcgatcttatctcttcccgttttgtggcgaactaattgcgaattatatattgcacgcgcgagaccgtaccgaattagaagtccattaagaaaataaccgaagaaatgaagttgttggaacgtaggagtaaatctactttaattcatatctgcaaatcttgctccagaggcaactaccagcacatttctgtgcctaatccataacaatattaaattactggcacacacgtatgcactactaccattgtagacttggtagtagttgttggcaccactactacctttcgttgctgatctgggtcatgaccattctgcccctgagaatgctatacattcacaaagtcaacaggtcatttgtaagtgtacccgtatatattggtcagctcctgtggtctccgttaatatcggctcgttttggcatgactttatcgaataaattaaatcaggtcaaaccaataatcgagtttgctcgaacaaaataggtgtgtgtgtgtgtgtatatgcaggatgcttaggagacaggtgctgggatgcaggctctccttgcatggtctaattggtatttccatgtcgtgcagaaataattgggaggagatcgtacggctccttgcataattgcattgtatattatattgggtactgtactaatttcttcatctagatatataactagatttagcatcgaccaatgaaacggagtaactggactgcacgcaatagctagctactccagcttgtagtttggtcacacaagctaggtgaggaccagggacaaaaggaagcagagagaggacactgcatgcgtgtcttgtgtcgtgcataatttggggttaaacatgcgttcctgctgctatcaatatgcacgaatccaaggcaaaccaaaacagtagcaaccgataactaactccgaccttaaattaccacggcaatttgtcacgaaccaacacaatcacaccaaatctctcacataaatgccaccgatatattacaatccactcaagaatataagtgtttagggatacaaaattgaggagaaagagaggtatagtttgagaagagagatcagacaagaggaagcaggagattgggactagagagtaggaattgagaggggaagcagcagcaaggaggaggaagaagctatcgtctgaggcgttctggtaattgattcatcgatgaccctggctgctggctgctggctgctttgcctcttttctagtctccttctccctagccgaatgggcccaaagccagcccacttgtctagcctcctggaaagacatcacagcaggccatgtacatgacattcttcccccgttaagaatcggcttgtccccaagccgatgcaactgactcgccagattaatgcccccaagatcccaaggtacctgcagggaaatgccttgttgggcagaatcccagaacaattgtttgatgaccttcgaaccatctgatgtagaccctgcccactgttgatccacttatccaacatacataaaacctgagcattacaaccacactctctaccatgcttttgctgcctcaaccaccaagccttcacgccttcttcaccactactatcagcatatactccatgagagcccagatgtaacatgcaaatattgagatcagtgggctgagaaacatgcatatgcttctttgtctgaatgagagctacttctttgtttgcaaactcccaaattgctaaaaattgtatggttttaccttgatcaccaaccaatcttgcatcaactaatttaaccactcgataggcccatgtgtgcaagactatgctgtcctcacaaactaaacaaatgaggcatctctctgaacatttaaccagttctattccacgagaattcttactgaaagtgctagcttccaaactgagatggactgcaccaagtttcagctgctccctttgtaacaatagctcatgtgtctgcccatgttaattattccattgaagaataagctcagatgtacatagcaactgttgtagcactgcccatattaaatcccaagaattggcaactgacagccataacaccttgtttgtatattctcttctaataactttcacatttgtccataacattagtttcccttcagatatacacttccaagaaaaattgagcccttgccctcctgctgcacacaaactgaatacctcactcctccattgcgaaggaggaggccaaggttgcaagttgaccaactttcttgttgaaaccctaaatgcctcaccattgtttgatccaaattgagtccaagaagtatcatctagtacatcattgttgttactctgaacctgaaatgaaattggaatagtatagaaccgagcatggcgatgggtacgtctctcatgtgacttgcaagtgcaattaccatcaacattagctccactgaacaaacaatcacaccatgcatcgggtgatagatgggaaatcagcatcagcagcaagaacaattcatgatccccatatgcccaaccataggttgaatgatgtgtgtgctgataggccttcctaaaggcaccagagagacatatctcataccaaatacaccatccaacaatcagattttgcagcaagccctcagtggaattaattgttctactcatgaattgggcaacgctgtagttcaaggagacttgatgagactcaccatataaattcagtgtttcaatttcagctcaaacacttgtttgaataagtggcggccagggttgtaagagttttaccaccacgcctccgctgccttgacaaagctgtggatcaagccatggtaacggccgagaacctgaggtcatctcagctttgttccgtggaattgctgctctccaaggtggtactggtggagggctagctgtgtattctgagctccggtcaaagcaaccatagagtacttccaatttcaatgaaacgaaagagaggccgacaactccaaagtagtcacggctcaagcaccaactccagttcctgggaggaattgcattgatgattaacaatggatctctgaagcataaatacatagtggtgaacttggtatctacttccatgagctccatccactcctccttggccatgtctttgccaccatcatcatcagccaactggttctcacacttcattgaacactcgatggttgttcccatgccaagcttggctgtgtcaacatggttagttgagccggcctctgtactgacctccaatgcgatggaagttggatcagtgttggcgctcaacgctgccacatctctagtggaatccttgctcaaggataaatccaccttggtgtggcgaaatgcctccagcatccgatcgatcttggtgcacaggtcttgaatggtcttgtctaagttctctaccgccttgtccatgtcagtctcagccttcttggtctcgttgaaaggaaccgatgtcaccatggctgctgatgtaattgagggtatagatgaagctgttgtagcagggaacacgcgttctggtgtagcagcagtactcttggccgctggcctggcggtggcgctacttggtaccattgtcaaacaggtggtgtgcgtggtggtggcgccatctccagggaacatctggacgtgctgcacatccattaagcagcccccgtcgtagatgtcgcgaccgtgggtggcggaccgagccctctccgcgtcatggctggacataaatgacacaagagccttgacttgccatgtgctcactgcaagaacctgcaccgccactgctccataggtattgtacacttgatgcaacacctcagatgtcactggatatatgatctggctcacggtgacgcgaaggacagcagctgaatcgcctcttggacaggtcgacatttcatcgaacaggtggtgggcatctcctccaaagacaccaccaccaagttgttggcagttcctctgaccaccagcgctctcccacttcatctccacaccagaaaccccacgaattgactgctctgataccatattgtcacgaaccaacacaatcacaccaaatctctcacataaatgccaccgatatattacaatctactcaagaatataagtgtttagggatacaaaattgaggagaaagagaggtatagtctaggaagagagatcagacaagaggaagcaggagattgggactagagaataggaattgagaggggaagcagcagcaaggaggaagaagctatcgtctgaggcgttctggtaattgattcatcgatgaccctggctgctggctgctttgcctcttttctagtctccttctccctagccgaatgggcccaaagccagcccacttgtctagcctcctggaaggacatcacagtagcccatgtacatgacacaattccgggctagtacgggaccaaaagcatggaaaaatcatgctttctccaacgaaaggataaggctcttggaaacagctactcgatcgtactcccatgaaacctatattcaaatacgtagtaatagaatacgtcacatccaatactatgttgttatattatggaacggaggtagtagtatcgatggtgtttttaagaacttctcccaaaaaaataataataataaatctctaaacagtttttctttttatttcattatgtaaaaaaatagttattgaattaaaaaaaaggtaattttatcatccttaaatttaccagaatgtatcacactttctaatgtaaaatttgataaaaattagtctaaactttaaatacatcgaaatactttttctaggatcataaaatttctcactaaaaaaaactaaaagctaaaagctggctttctcatcttcttcaaattgctaggagctaattaccgatcaataatttgccataatcttttgcggatctaaggagttgttggtacgaatatcgccgacgaggcgcgccaaagatcacccacacacacaacacgcacctcacctcacctgccctccgctgatcgaaattagagcaagcccagcagagcttccatccggacatccatcccatgtttggcgtatggaggtgaaaaaacacggtccagcagagtctccattacacacgccattttagatgtcctccaaaccaagccctctccatgccatatttggcgtttctctctcctcacgccattcccccaactgcccagctccgacgaactcgcgccaccatccgaactgtgccaaggggaatagagaggatggacataccgggtctgcagttggagatcgccggagtggaggccccgccgtccgcgccgccccactgctcccgccactgctcctccgccgcgcgccgccaccatccggactccgcctgcgccgcccccactgcaggcgccgctgctccttcgctcgtgctggagatcgccggagtggaggccccgccaccatccggcctccgcccgtgccgcccccactgcaaatcaaccggcgtcgctgcttcttcgcttgcgttgcccatcgcgactccgtccgtgtcgccgcgccaccctgccacctgcaccgctgtacctccgcccatggcgccctgcccccgtcggccgcgccatcctgccgcatcccctccgtcgctcctccgcccgcctctcactatctgttggtctcccaggagcgatggatttggtggattttgttttgttttgttttgtttttagcgagaggataaggtaaatgtggctgatgtggttttaaaagaggattaaaggtggtacacagtgttctcaaagtggtaactgcaattaaatcgaaccaacacctattcaaaccattgtaaatatatgcctcttaaaaaatcattagatatatatgggtagttaaaaaatattagtaaaatatagaatagtgtgatatgaatgctgtaatatggatgatttattggagtgggtaaaggtatagaggaggaatcttttttggatgaccattcaaatagaaatatagaagtccaaatttaaatgatctgctgggatgctcttaagcttcttctactagtcctctgttgcgtacgagcaggacgtccaaaggcttcgtcatttaatcgcgtctcgccttgcgcgatctccaatcgagctaatggtggataggtgatcgatgtgttggatattttctggtccggacacgcacactaaaccctatggttggtagcaaaacgcgctgcacggctgcactgcgtcgcgtcgcgtagcatcgcagtgccggtggttatgcttgtgcctttgtcgatggcgtttactagtacatggaaagttggaaacgggagttggttatcgatcatctcgccattattagcggtgatgacacttggctccatcaccatgattcacgattattcgtgtcatcgtgtgcgtgagggcaacagaaaaaaaaggagagaaagataggagtagtactagtagtacacgtgagtagctgttcgtggcatggatgaggtacggctttcaatagtggccggaggttgtggatttggagccttggaggacgtcctacaacggctacaggagtggagttcgtattattggagggcaatggaacgagatctcgacgacacgtcgatatggacacaccagcgcacagtgcatcgcactgccatttgagatgttgtgagtgcatccttttaaccgggagtccgggccattcgattgtctgcacgaggattactgtactgatgtgggccaggacactgctgccaatgtgggtacgtatgggcctctatggcccattaccatcatgtacttacatgatgtgggtcaggccactgctgccaccgtgggtgaatatgggcctccatggcccattaacatcaccagcaactgtatatggctcttactccactatttggtttctggactatgaactgaactaatcagcaatatgttgtgattcacgtcatgtcaagattcactgggcagaagttaaaatataaatggacggaagggaggaacaagtacaagcattcagataagaggatagacacatattgctttcaaatattcatatattctcactttcatagacatagggtgtgtttggttgcaagccacactttgccacacctaaggttaggcaaatttgacaggtgtttggttgtagccacagttgtgacaagattcccctccaacaaattaggtcccacgtgtcaatggctcaaaaaagtgtggcaagattcccttaggcttagtaagttgtggctaacaatttgatcacctcaccttaggcaaggtgtggcaacttttgttggcaagtaatggtaaagtgtggctgggaaccaaacagccccataaaaacgcagattagttacaactccagtcccagaagagattaggtcttcacccagaacgctatcgtcaacatttacaaagagtacaccgaaacctagttacaactaacaagtattacaactccagcaatcttcacaaagagtactagtattatcaacatgcctgctacaccaaaatcaagtaacaaatgaaccaataggaacagcagtgaacctgtagattctcgcaccacgaaaggaacagcagtgagctacacaaaaaccagtagattctcccaccatgatacgcaaagcaaaataagactgtcagtgtaatcgtctattggctaaactgaaggagctgactttcatgggtgttgccaccaccagaggagcctcaggggagtcggttgttgcaaatttctcgtgcatgaaacggctgtcaacaatggattcgtctttcaggacaactttgtaacaatagcagctcttgagcccttcctgatcgcggtagcactcatggttgctgtccttcacctgctgaaagttccaaatgacactaaatttgccaactgtcgcaacaagatgcttttcttgcttcccattctctgttacctgggaaaatcagaacatatagaggaacatacataaggacatatacttaacaaattgaataattatgcagcatgtaggcattaatttagcaagaaagttaacatggcaaatgccaaatgccaaatggacataacagaactgcaggatgaaactttttataatgcacgattgacgtaagtgaaacaactgattgccactagaacaaaatcaacatgattgacgcaagtgaaacaactgatttactgcaattacttcatacactcttatgacaaggtcacaggttgatccgttaaaaacagagctagggcctaaggtgcagggttctttactttagttctactcattagccccttgacaagctgagaattggaacttcaagcaaccaaatgttccaaacaagcagtcaataagcttgtttttaatttaacaagcttatgtaaatattgaacatacttgctaccaatgaattaactgaaaacatatttattagccgtactaccctaaactgggatggatcataactttaccagtttctcccaaaaggtacagcatgattatttcaagatattaatgtgtcaattaacatacataggagatagagacatagagtgaacacattttcctggtcagattgtattataggcacagcaaattactgacaagcagccattttggatatgaaacgcttgcactgactgatcataagtgaaaacaaacttttactatagacaagatagataagtgtagatggtttgctagcatgcacatatgaagcaacattctgtttggctttactagattacaaaataggaacattcactaccgtgtgttctatctcaattatgaaaaacaatatgctgtacaaaataggaaattcacacttacccaagagaactgcccgccatggaatttgttctcggaccctgccaaaattgaatccaatggggagagcttcagcaatcttggtgctgcaatcctatttcccatacgcccactgaatcctgtcttctctttaccatccttgtccttaaagatggtacagatcaagatcaaatatgtatcagtagtgcccagaatccacttcccatcataagtaacatcaacatgtgtgattggtgatccaagccctgggaatgctgtcttcgccatccgcatcgaactcttggaatagagcctaatcttgccatccacagaaccaaccacaatcgaaccatcccctgtacttgcaaagcattggaaattggtgccccttgagaactgatggccctgcgaccattgcagcaccggtgactcagatgagctcccaattgtttgcaccctgcccctggaatccctcatatcccaccggcatagccggttgtcatccaatcctaagaaggttgatccagagggttccagctgcgcgcccttactgtcgttggcgatgtctcgcattgtgatgtcagttccatccttctcaaacctccactgagccacaaccttgccagtctctatatcaacatgatggacgccattggaatggcgagtgccagtctctccagggctcatcagaagcatattcgtctcgccacgcataagcagagccttctgcggtgtcatgtacgcgttcccaccaccacggccatcagatatcctcacagagacgcccttgccgtgcacgccatgccggaaattcttgaccacctgtatccctgaccctccaaccaagaagctgttgtcaagcgcgcccagcgcgaggctctggatgctgccgtccccggcctcctcctcgaactcctcgagcaggtctctcgccggggtcgcaacgggaggggtgaaggagtcctctgcgtcggcccagacggcgtcgtcggactcaccggggcgcgcccacgcggcgaagtcagcgccgaacacctccttccggccctcatccgtggcctcgacgccatacgtgttctcgaacaggcaccggtcgtactcctgccggaatcggcggaaggcggcgtcggtcggcagccgcagcgcccagacggagccgcccgcggcgaaatcggcccggcgctgcgcggggagcgccttgagctgtagcgccgggccgacgggggcggagaccctgggacccggaccaacctccagaacccacctcgggccgccacaatcgctgtcgcccgccgccgtcgccttgtcgacgaaggcgtaggtcgcccgccgctcggccggcacccagcgcgcggaggcggaggcgccgccgacgtggaggtacagcttcgccgcgttcggcgcctggtacttgagatcgagcgctttcagcttcgcgtcgaggaactcgagggaggagggggtagaggtccggaggatgtcctctcgagaggcggcggaggtggcggtctgggcgtcgtactcctcgtcgtcgtcctcgtcgtcggaggaggtgaggtcgaggtcctcgcggctgtgggcgccgcccatggcggttgcggtggtcgacgagaattccgatggatgcttctcgctgcgacacgggaggggggaatggagcggagatgaggggaaagtgagatcgcgggagaggggggtataagtacagaacgccacgtggccgcggtggcgccgtgatggtcggttggtgcgtgcgtgcgcccgacgcgacgcgcccggacgcggcggggacgacgaggtgagggcccacttggcagttgcttcgcccagggggtcaagagaaaagaaaagtaataagtctactttatctccctcgactcatgcgtctggttgaatcgcacccctcaaccgtaaaaccagaccgttgcaaatcgactccctcggtggtttcggaggcggttttctcttacctagcacttacgtgacgggttgacttggtctttatcctatgtgcatcgacgtggcgcttacgtagcactaaagtaaaaagaaacctaaatagaaaggaaaagaaattttgagcctacatgtcagttactcatctcctccctctttattctcgacgacgagcgagatgaagagagcggcgaggcggatggcgggagctcgccggagcgacgggacctcgccggaacggcgaggcagcgggagcggcggcggcgggacctcagtggagcgacaggagcagcaggacgtcggacatgagttgaaggaggcaaaatgaacttattccaaaagaaaaataggcaacctgttgggccgtgaagcccacggaaattcatggatagcatccgctaggcccatccgaggccacgcgtgaaaccagcggcccaatatatatcggctccgctcgaccaccacgctggccgcgtcactctcctccccctcgtatcgctcgggagcggaggtctcctcgcccctagagcgccgccgccaccgccaccgccgcggccgccgcggcggggacttgccggtgccaagtccacacgccatcgtcgctcgcacccttcccgcgcaggtaactccatgcaccttgaagtttcacctcatgcgttgagtgtccacgaccctcgatcccctccgctttcggaaccctagaaacccatctccactttgattccgtcggtttcgttgcttatgtggttcgatccgtcagccggttctagttgaggaaccgtaggaaagctcatctcgtgacgggatgtgatttttttttcttttttgggcggctctcgattagggctacttttggttgggctatttttggtttgtgcgcaagggtatgaaattggatgttgttagttctgtgttgctgtcctgtggagaatctgtgatgcttcactttaagcgatatatgttctttttaactcatactccctctggcccaaaataagtgcagttttagcactgttcatatccaacgattgaccgttcgtcttatttgaaaaaagattatgattagtatttttattgttattagatgataaaacatgaatagtactttatgtgtgactatttttttaaatattttttataaaattttcaaataagacggatggtcaaaacgccgagcacgcatatttatggctgcacttattttgggacggaggtagtactgattaaacctgaaaggtccgaggttgggttaaggattactgcaataggtaagaatctccaaagtcgatactgtggactattatggctgtttcatgttgtgtcgatcagcttcagatttctgacacctagctctttactactatgtggatgaaatgaattcagaactgcactcttagtaaaaagcttgaaaagcttcttgaattagcttgtagcaagtcatagtttatggtctgaaggtgtaacatttatcttttggtcctcttgcattcatgtagaaatatatttagggaagagctataattggttcctttcttacttcagggatttgttcacgatggcccgcttgtatgttggcaacttggatccccgagtgacttccggggaacttgaagatgagtttcgtgtgtttggagttctgcgaaggtcagtttctgcctaggcaatttttccacttcatctaattgggtgtttggtttttgcattgtgctgcattagtcttgtgtagtttttggatagactagttcattaattgtgtgccggaagggtaatagttcatcccagctgtgcataatgccataactgacttgtgcatattcatgcaactatattctgcttgcattataacatcagtcttatggtattttagtgacagaagttcattaatcgtgtaccaggaggaaaatagtgcatcccatgatagtcctacgtttggattgatgatatgtgttgttttaagtgtgacagaactctatgtccttttaccttttttttaataaaaaattcttagctaattggatggccatctattcctgactcaatatagtggtaccccttgtactataagttatttggacgttgcgggtatgtttgttgatgtaattttcaagtgtatttttccatgcagtgtctgggttgcccgtaaaccacctggttttgcatttatcgattttgatgacaagagggatgctgaggatgcactccgtgatttagatggtatgtaacggtgttttttctgcacactgtctgaagtttgtcagaaaattcttttgttctattttgatgaccttttatatgtcaaattagcaatacaggtagacttcttgtcctttttgctctttttgaatcaagctttgagttaggggtgggcattaaaaccgataaccgaagaccaaacccgaaaaaaccgaaaccgaacccgaaaagactgaactctcgggcatcggtcatttgttcgggtgtgacatctgaaagaccgaacaaacttcgaaagattcggtcatcgtgcaatactacccgaagaaaccgaggaccgaagaaaccaaatcaatacaatcactaagcagacaacgtgaccatcctatggaccaaaacagcccaacaacaaggtgaggcccaaatccacgtcaatgacccaatccccatgaccccaccattccattgaccgaagcactcctaaccctagttaggccacgcgccgccggcgcaccacttatctcgtcgcatcgcatgtccccttccttccacgccgccatcttctgcagtgctgccgcatgctgctgctcgccggcgtcgccgcagtgtcgcatgcaatcgtgtggtcacgtggaagccataaggaggccacaggctgctggcttgctgatcctgctgcacagccgcatgccggccgctgcgccatcgcgtgccgtctgcgtcgcgcggctgatttctgccgcgtcgtcgccttccgtcccgccagcacttgtcaccatgctagtggatatccgtcccatgtgactgaggtggagccatggaggttttcaggagcaagaagacgagaagattgaagaggacgcacgttctggttcgggcacctcggtttagaccgaagaccgaaccgaattttcggttaaccgaagtagcggttagtaatttttgcttaacaacttcggtttcctgtttccaaagaccgaatttttaaaagaccgaactaaccggaccgaaatttcggtctagaccgaatgcccacccctgctttgagtggccaggaaattttatctgtttgacaatgtctcttatctcgagttcttgaatttcttttatcctattgtattaaaatgcatcctgaccaatcatcttcataggttgtgcaagctttgtccctgtgtagttagaattaatttatgcattatcaggatttgttcaaatgcgtggttcctcttttaataggcaagaatggatggagagttgagctctcacggaactcaagtagccgcggaggtcgtgatcgacatggtgggtctgagatgaagtgctatgagtgtggtgaaactgggcactttgctcgtgaatgtcgtttgcgtattggtcctggaggtctgggtagtggaaagcgtcgtagcaggagtcgcagccgcagtcgcagccctcaataccgcaagagcccgacctatggtagaaggtaactttatagtgctcaatgttgtatataaatatagtagtatggttagtttggtgtcaactttattttccatgcccaatttttttttgatattttgtgttaaaggtggggacttacacatcaataactcttgtctcataatacgcttcgcgtgatccactttttacttgcagttaatccacttgttctattaaacacctactttgttgttgaatttattgtaatatatgatgtaaaagaaaggaactgagctaattattctgcgaacagaagctacagtcctcgtgatcgctctccaaggcgccgcagtgtttcaccagttcgtgggcgcagctacagcaggtcaccacgtggccgaggtggttctccttatgctgatgggtaaggcatattttgttaattttacaattctcgtcttgtatggctttataaatcatatattctttatcattcttatgcatgcctgcttttcaccttttttccagaagagatggtggcaggtaccgccgtagcaggagctagaccctgatgcctgtgcttgaccgtctgctctttggcttgcatgccatgaatgctttaagactggcatcaactgattgacttcaattaaggtttactactttatctgccttgatatttcagcctcttatttctgacgttaaaaaacttatgggatggatgtaatatgcaactaagacatattacctttctactatgtgctaaagagggatcattctgcttaagcgactcagccaactaccggctctgtctgcatggttttgttctgcactcttcattcctcgagcgtgttgcctgcttcatgtgaagttgcaagcaaaagagaatcttccattgtttcctgcctatgatgcctcgttgtggttggcactcttcgttgaagatgctgcatcgtcacaaattagtaacatatttcctctcataaaattgataacattttgagcaatactaactagtgattagtgcagctcgtgcaagtaaatagaccatttttttaatagaaccatgcatcaagagattgatacagcaaaataaatcttcatgtcagtcgttgggttaaaacatcgcattcatctgcagcctgtaattcagcgacaaaaggaatttgctgggttggcttccgcaagaggcagagactaccttttaagcggttccaccgactccaccccttggctttattctttctggtttttccttcactctgcgcatctgtcggccttcttcctgcactgcatcgccataatagtagcctctatatatgggaccttcagatgaaatattctcgttctgcattcttcctaccggcggccattagacaaaatatgttttttttttctttctgtttatgtggtttattacttttatttgtatctcaaccgttcagaacaagtggccagcacttcatgtctcaattgttgtgaattactcttttgacctagagctaataacagcctcagttcatatccatttcatatttatgtgctgtacgtcactcatctaatatatctgtactaagtatatgttgcttgtctggttctggaaccgtagagatccataccataaattagggtctgtttggggagcttatctgagaagcaactggttggtagccaatttctcagaatctgggaagctttgtttcccagtttctggtttctagtttattttctagattctataactatagcttctcagaatctggatcaaaaactagagaagctgtagcatcccctaccactagatgttgtgaaattcccatgttcggtgtgttccgtcctctctagtgattatatttttcctataacaaagttagctcaaaataagccaaagaaatgtttcctggaagagatttggatgtgagtttgctgttcctgagtcagttatggacgtatggtatagttaatcggagttcttgctgataactgtctgtgcttgcttccttttatttctttctttggtcaaatatgatattctgagatacctctcgcgtaaccaaatagatgtgttaacaatacaacacttgggatatttcctcaagaagaggtaaaccctggtcggatttttttcatatccattataatttcttgcacgggcacaccacacgatagcgcacgcccacatgttctctaccctggcctctatcacggctctaatcagagttgcttttttttcgtatcaactactagtatcaggctgatactagtagttgatacgtttagcaaacgaagagatgctgtctagttgcagataaatcaaattaatctagtgaaggttggcgtgcaaatatgttaaagcagtcgtgctcttgtgctagtgactgtcagatgacgcgcttcttcgtaaacacaatttactctactcccctcatcacagtgtctatctgtcacaagatgctcgcctgaatatccaatcagcaaccaggcaacctcactgccaaatgaactagataacaagagatcgatttctaaacagaaccaacgagtgtgttcagtatgctactgcgccagatgacgattcgttgatttgtagtactccctccgtcccataatacaagggattttaagtttttgtttgtactatttgattactcgtcttattcaaaaaattttagaattattattttttttgacttgctttattatctaaagtactttaagcataacttttcgtcgtttatatttgcataaattttttgagtggtcaaacagtgcaagcaaaaatttaaaatcccttatattatgggacggagtgagtaatagagtaagtagtggagtagtactcccttcattcctaaggtggagagggattaaactttagttcctaattcctaaacaccacctaaatgatctacctatttcaccagcaaaagcaaggagcagttactaccccatcgatcaacataactttgtatgcagtgctgcttaatacgaagtgccgtccatgatttctgccgcttcctaacaaaatac

SEQ ID NO: 23050 - DNA, 16172 bp, Oryza sativa
ttgctatgcggtttagcgtgtcacgctcggtccaacggatcgatcgatcatgcgcttttcgtcatccaaaatcattacgatttagacgagcaacaatgcaacactagtagtagtccttgactccttgcagtactaagagcacccgcaatggtaaagtaagatgttctctataaaacatgtacatctcagcaatagactagattaaagtaaactacctcaatagtatgtctatatgggtatctataactctctaatgcattgcctcgttttttctctatagactatctccaggttagtagatagctttgctctctcttcatttaatctttttcaagtaggaaaatatgctgacatggatctcttgtagagagcctatagataatcattgcgggtgccctaatgaaacggaatctggtcccttttgctgccctttctgggacgcaccacggcagaaaaaagggtcaaaagagccgcgggcatcatgcagtagtactaagcagcacaaacctgtgtctgtgtttgtccgtccattcgctttcgttgacctctagctctaatcaagccattttgcggtgaccacttggggagttggggacaaatagctactgcccctccatttcaggttataagatattttgactatgtacaaaattgaactgttttaagtttgactatgtttatagacaaatatagtaatatttataatactaaattagtttcatcaaatcaataattaaatatattttcataataattcttcttgggttaaaattgttactatttttctctacaaacttaatcaaatttaaagcactttcgtcttataccctaacctgaaacgcagggagtactaggcaagtgtgcagcagcatcgcatatgccagatggttaatgccacaccatttgcctgcagcagctcggctggaacgtgccagcgatctagagatggcaagacaaccaaccaaacaatggcacctcagtcacctcacggctttcctctgacagatgtcgtcattgggggtccaaaccgttagcctcgacatgtcgccacccgttgtttccacggccttttctgctctttttttcttcagccaggacctgatggatgctgatgactttcgcctagtactagtaacagtcttgtctactactactacacattcaaagtgttcttttcccggtcagttaaatcatttcggatcagaaaaaaaaactcattttatttctcatacccttcttcccctcgacgaccacctaccacccaccttctcatctctcccttctgataatcgccaaagaagagagaaaaagaaaaaaaaagaatctgaacaactctcgcttgcttaccattaaccacagtaacaagtgcaccactaacccccaaagccatcgattagcggcgactaataaagtaattaagcccaaggtggggagcatccacggggaggagtttctgcttcctccaggctctacgagtgcataaggtggagtagtactcccttcattcctaaggtggagagggattaaactttagtccctcgttcccaaacaccacctaaatgatctacctatttcaccagcaaaagcaaggagcagttactaccccatcgatcaacataactttgtatgcagtgctgcttaatacgaagcgccgtccatgatttctgccgcttcctaacgaaatacgatgatcaaattggaacttttatttttggtaatacgaagatcatttaggaatggagggagtactagtttgtaccagatgacgattcgttagttggttttgaacattgtttaaccgccagcacgggacgagcgaatcgagctgcctccgagtgcataaacaacaagcagagtcgcccactcgccaccgccaagtccagtttctctattccccagctgtcgcgcgcacgaggcgccggtggggatcccgaggaaggagagcacgtcacgactcacgacgtggacgcgcgtgagatccctccattctttttgtgactcgtaggtggacttcccctcgtgcgcccgcgcgccaggaacgcgcatagccgcagatggccgcgccgcgtcctcggctcggcaatttgctcgcgatcgccatcacccctcccgtccgtgcgtccgcgggaaacttcccttgcgaatcgcgtgcccgtccgtcctccgcccgcggccccgcccgcccgtgtgtggcgccgcgcgttttctgcgcacgcgcgaggcgtttgctgcagcgacagtgcacagcgctcggagacgccgacgtaggtagttgtatactaccatgaaggcactgcttgtaaatatctgagtgactgtgtctatggcatctgcttttgctatgcggtttagcgtgtcacgctcggtccaacggatcgatcgatcatgcgcttttcgtcatccaaaatcattacgatttagacgagcaacaatgcaacactagtagtagtccttgactccttgcagtactaagagcacccgcaatggtaaagtaagatgttctctataaaacatgtacatctcagcaatagactagattaaagtaaactacctcaatagtatgtctatatgggtatctataactctctaatgcattgcctcgtttttttttctataaactatctccaggttagtagatagctttgctctctcttcatttaatctctttcaagtaggaaaatatgctgacatggatctcttgtagagagcctatagataatcattgcgggtgccctaatgaaacggaatctggtcctttttgctgcccttcctgggacgcaccacggcagaaaaaagggtcaaaagagccgcgggcatcatgcagtagtactaagcagcacaaacctgtgtctgtgtttgtccgtccattcgctttgcacaaacctgtgtctgtgtttgtccgtccattcgctttcgttgacctctagctctaatcaagccattttgcggtgaccactcggggagttggggacaaatagctactgcccctctatttcaggttataagatattttgactatggttaaaattgaactgttttaagtttgactatgtttatagacaaatatagtaatatttataatactaaattagtttcatcaaatcaataattaaatatattttcataataattcttcttgggttaaaattgttactatttttctctacaaacttaatcaaatttaaagcactttcgtcttataccctaacctgaaacgcagggagtactaggcaagtgtgcagcagcatcgcatatgccagatggttaatgccacaccatttgcctgcagcagctcggctgaaacatgccagcgatctagagatggcaagacaaccaaccaaacaatagcacctcagtcacctcacggctttcctctgacagatgccgtcattgggggtccaaaccgttagcctcaacatgtcgccacccgttgtttccacggccttttctgctctttttttcttcagccaggacctgatggatgctgatgactttcgcctagtactatttatagtcttgtctactactactacacattcaaagtgttctttttccggtcagttaaatcatttcggatcagaaaaaaaactcattttatttctcatacccttcttcgcctcgacgaccacctaccacccaccttctcatctctcccttctgataatcgccaaagaagaaagaaaaagaaaaaaaaagaatctgaacaactctcgcttgcttaccattaaccacagtaacaagtgcaccactaacccccaaagccatcgattagcggcgactaataaagtaattaagcccaaggtggggagcatccacggggaggagtttctgcttcctccaggctctacgatccccaccgctgcgctgaccaccctcctcgtgccgatgctgcgcagaagatcggtctttggccgcctccccgccagattcggccggtgaagctgccaaggctgctgcgcggtgtggttgacgagttcttgctcgctgactcgctgtagctgatgccatgtttggggcggggaaggtggacgatgagatggcgctcaagaggcagagaaccgtgaggtgagcctgcacgagcaaagcaaaagctcttctttggtctagttttagcttttcagctcttagagatccaacaggctctgcgacctgcgagtgatttggcatttgctgtgagctttttcttgttgttctaggaggaaggacgctttagcctggattgtgccagctttctaatttcctgttactctgcaaacaatttatgtatttgacctgttttttagagcatagactccttttaagaacccaaattaatccattcgatttattctatagcatggtatgatgaaggttttcatcccttttagttgatctggccaggaaagattaacctttcgtggataagaaatatagggcttcaaccaaaattgatattagaattaaattgtgttaatgtacaaaaactgttctaactgtcagttctttatgtgatttagtttacaatgggaggttctatttcattcccaacattatttttcttattttcactgttttggatggacatacgaaaatattcatgatgtagagttcaaacatttatgtgaggctgtaattcacaggttctatgatgagaaggcaaaaccaactataccaactcaccagaaacaggcagggttcgctgctagtaaacttggtgtggcaagctcaggaaagaacaaaatttttgtgccaggagaagagctgtggtacaaaaggattttggacccatcaagtgacttcatcttgacatggaaccacattttccttttttcgtgcttcgttgctctatttatagaccctctgtacttctacgtgccaaaaatctcctatggcaccccaaattcgtgtattgggacagacaggcatttagccatcactgttacattcttccgatcaatctctgatttactatatttcactcacattataataaagtttagaacggcatatattaatccgagctcaaccatgagggtatttggaagaggagaccttatcacggatccaaaggaaattgcgtggcaatatttgagatctgacttcgtagtcgatgcagtggctgcattgcctttaccacaggtaacttggcgctcttccttttattcttgtcaactggagtataaccagtattaatgatcattattgttaggtcgttttcataactgagtatatttgttagctctgatgttgtcttatgttcatttatctgcatgcggacataaatatgctactgtgctaatatcaatcgtgaagttctattgtggatcacctcaattaagtttctttacagcagatgctactatagtatcttgtggataaataatgatttgtaactgtgttagtgctgcccagaccacactaaggacaaaataattttcccctcgcttaatacaaaagatacgcatgttctgcgtattctcaaaaaaaaaaaaaagtgtcacttgctcaatcatcctgtctctaagtcagcatgaaaatcctagggaatcatcatgttcaatcttggcaaatattcttcatagtttaagagccaatcactaaactgaaacattttcatatgatgcattatgaatttaataactattattttaccatcagtgccgaccacatgtattgtctcttgatttttcttgtgaattcctgtaagctaaaattgaacctcatattaatgttccactggataagtttactacaatgggctccaaaatgcagcaacctgccatagcatctccagtttgtttgagctgattttcaatggttataatcttactcatcgggatttctaggttctctatgcttcatagggcaattttgtacatcgtcaaacctaaaagcactaaataactgaattttatttgtgcagctgtttatattgctctttccttcaaatggaggaatcttcgattttgactttgcctgctgcttatgtatctttacatttatgcagatcttaatctggtttgtgataccagctattaagtattccactgatgagcataacaacaatattctggtgctgatagttcttgctcagtattttccaagactatacctcatattccccttgacttatgaaattgtcaaaactactggagttgtcgcaaagactgcttggcaaggggctgcatacaatatgttgctttacatgatagccagtcatgtatggtattcgtaagcgtttacatgaaatgttttctacatctcaaatattggtgttcagcaaatgtcgaattagatgtatttgcaagtctttaactccatagctataatgtctccaaattttcacgatctccattcatcttctttcaggtactaggtgctctatggtatttgctatctgtcgatcgccaaactgcctgctggaagagcaattgcaagaatgaaactggctgtgatattaaatttctagattgtgatgtgataccaaatcaaaactgggcaagcaaaactgctatcttcaatacctgtgacgcaactaacacttcaatcagttttgattatggcatgtttcagcctgcattgtttaatcaagccccagggcaacgtttcttgatgaagtatttctattccctttggtggggtttgcagaatctgaggtatttccttgtcaaaacatcttcgtgtcaaactacagcgctataagaaggaacttagtttacagtttccttgtgaaatgtgtgtgttcagaaatttcatgggaatcacggagatttttgtgtcaagcaaagcagtaaattaaatatggaagtttagcctagttcttttaatgggatcattactttaccaattttcaagatctatattcattttctaacgagctatatcctcctcttcctttgcaacagttgctatggccagactattactgtgagtacctatattggtgagactctatactgtatattcttggcagtacttggtctcgtcttgtttgcacatttgattggaaatgtacaggtaatttttaaatgtttagtgatcatgtctacactacgattgattcttttggcacttttttatacactgctactatttttccagacctacttgcaatctatcactgtgagggttgaggaatggagattaaaacaaagagatacagaggagtggatgaggcatcgtcaactcccacatgaactacgagaaagggtgagacggtttatccagtacaagtggctcgcaactcgaggagtgaatgaagaatcaatattacaggctcttcctgcagatcttcgtcgtgacattaaacgtcacctttgcttgggtcttgttcgccgggtaaatacttttgcatgcttttataaaatacacccaagtaaatatttgaaactgttgtgcgatcttttgatgtttttcttttaagcaatgaatggtactagaaagttattgtatatactggtcctcttctcttttaaaagattattagagtatatagttagttttagtgctgttttggtctcagtatatacctggagtttctcatgtactcactaaatttgccccttgacctacctcatcaatggaatatttactggttgcaattacttgattccttcatttatattagaattgatcttagcatcatatttggcaatgtcacaatgaactagaagtgattggattcttatatagcagcagtaactatttgatcctagttaagctagtggtgccgggttttgacaatagatggcccttgatcctaattaagtgtagaaataggcagtctgagattgttagtttgcatagttaccgcagggtccaaatattctggagattccaaacaactattttgaaactgtccaaatatacacttcttttttttaaaaaaatgcatttcttgggcaatttacactacaggtttgccttatacttgaccggtgtgctaattttgtctttacctaccacaatatttcaggttcctttcttctcccagatggacaatcaacttttggacgccatctgtgagcgtcttgtatcatcgttgtgcacacagggcacatacattgtccgtgagggtgatccagtgaccgagatgctcttcatcattcgtgggaaactcgaaagctctacaacaaatggtggccgcactggcttcttcaattcaactaccctgaaatccggtgatttctgcggcgaggaactgcttgggtgggctcttgtccccaaacctactgttaatttgccgtcatccactcggacagtgaaggcactcatagaagttgaggcattcgcactccaagctgaggatctcaagtttgttgcaaaccaattcaggcgtctgcacagcaaaagattgcaacacactttccggtactactcgcaccactggagaacttgggcctcatgcttcatccaagctgcttggcggcgatacaagaggaggaagatggcaagggacctgagcatgagggagtcattctgctccatgagatcagatgactcaaatggtgaagatgactcgccacctaagcagaatctcgctatgaagatcatgagtgggagtaggaaaggacctcagaacatgaaagagttgcctaagctaagaaagccggatgagccagatttttcagctgaaccctgtgagtaaggtctaaaatgcaacagccattgcttctgctaactctgctgctaccagttaaccattgctatactaccatatactgttggatcgacggcacgagttgtccaattgttgatgagaaagttcattaacttggaaactaaaaaacatggagaagcagcgaattcacgaagggatcgaggctttgagttgactagatgttttaggcgttggcaacttgtacatccagatatacacgtctgtgcttgtaacattcttgagatcttagaaacggccgcacccttacatttgactgcagagaaagagcgtaaaagaactgaagaaagatcaaacgtaaaggcagtctgtatttttgggagtctgtaaagcgttagggcggctattttttgcttttaactgatagacatttcgttgtattgtgcaatgtatttttgtggccaaaactgcaggttaacatctatactgtgcatacgttgtgcctcctttgtggctctctctcttgaacatatatactgtgctgtggtctgtggaatgaggagctgttccatttggtaacaaaccatggatacaatcagctgggctgcgtatcaaatatccgttgctacaagaaatttgataatttggcacttttatcgttgtcgacttgctttaattggtaatttttgagagtgacttgtgagatcatagtaaataaatgtagattaggatattaaatatttttttcttttttttaaggccaaggggaccatccaaatatattaagaaggaataaagtaaaaaaaatgacagaaaccacatgctaaccacgtaagcactaaaacgaccctgctatgcgtagtcgatcgtcgccaggtttacgacagcatcacaagaagagactctgaaaacggaagtgtcaaattatcaaatctccatacaagcgtggcacgcagggtggcggccggcgggtaggggagggatatgcatgtgggactgtgggcgactcatcagccgtcgctcgtggagaggcgccccacgcgcgcgcatggtgcgatgcgctcgttctttcgcgcaagctgtgcacgcggcgcggcggcctgggcaggacggtgccgctagttcacggggtggttcgcggctagcccaggtgaatcgcgggccgcggctctgcaggatcgatggcgccgccgccacgtgatggcccacgatacgatgatatgcaagcgtgtgtgtggcccaatccggcgccgcctcgatcagcctcgcgcctgtacacgttgccggtcgctgtgctgcgccctgccagcgcgcggcgcctcggacgaacgacgtcgttgttacgctacgcacgctagctgcttgggcttggccagccgtctgcttcgccggcctttatcccagcacgctattcctcccctgcatcacacgctacttgtacggataattgagtcctactactatagtttcccaacccctcttctcgtttttcacgtgcatgtttttcaaactactaaatagtgtgcttttttaaaaaagtttttatatgaaagttgtttaaaaataatcaaattaatccattttttaaaaaagttaacaaatacttaattaatcacgtgttaatggatagctccgtttttcatgcatgggagatggttcccaacacccacctccgaacacacccttaactcgtactacaatattaccaaacggataaacttttctttagataatggaatgaaatagcatcccggcctttactcgaaagagctacagctaattattacaaactagctgtcacaccccaatctgataccgccgtacaacggcacctgacaggagcgtgtcgtagggaaaacggcgtgaaccgcttcctacgaaaccgcgatctcggtaccagtcccaggacatagtgctggtacccacggtgacaaatatgaatcatagcaatccttaaaataaatagatgacttatttaccttaacttaggttgcagctcagacagcccgagaatacaaccgacgacacggacgaggcgaacaccaacaacaacagcagcagcggaaccaacggtctaacacccaacaccacaggcgacggctgggaaccaggacgaaaccctaatcttcacttcactttatcttctcttcagggcggaggaactatatatatatatatttatatagagcaagggtgagtactttcgtactcagcaagtcacgggaacttaggtgtttaatgcaagcttggaagagaggcaaggtcgttttgcaaatcttttatttgaagactttttgaaatcactaagtgatttatttctttctaagtttgggccgaaaagagacttgcgtctcgattcgactttaagagatgtttttcaacagctcatttagtaatgtaccgacctcccgggtcagatcattacttctcggctcccagagccattccacttgattaatcggctcccagagcctttttcattttcttggactcccagagtccagctgcccagcagcaaagcaatccgcttccactcgggaagcctagtctatgatgcccacggacatcccgaatcacacagattcgtttctgaccactcaggtcatccatctgccacataggctgattctggttacgattcccacaccacaataacttttcacaaagcacaggcaaacaaatctacgcaatgggaaccacctcacatccgcccatgactgtgggcacggctgttcgaacagttagttaacctctgcagaggggtacactttacccacaagacacgaacttactctagacactggccggtgtcagaggttcgcgacaaagcctttcccaagccgacccagggatacctcatgccacatagaaggatcaaatcctcacataaacataggccattttaggcgttcacaaatcaaaccccaaccacctcgatcggtaattcagcaagcttctcgttcttgcattaccaggaacccggtttggctccaaccgaccccgtcccggcgttcccaactattggcatgcgaggtttccctgaaccgactagttacttggccagggtgtcccattccaccttgtggttgcactttgattatgttcgatgagtttcccacaggaatcggtccttatatgcgaatacgggacagtgccacataggcacaacccccgcatcgcaagttttcacaattcattttattttcaaacacaccgacaccacatgtcgggttttgaaggcttctcaaacccattccccaagttttcgacaaacagcggtgtatgtgggatatttggtatacgcgctcagagaacacgaataccgaggtaccacaagggtggagcgacaaggaatcagggtagtacgacctacgggaattagtgcgactactgggtaggtccgtcggtttggcacgcaaaccgaggccaagcaagttaagtgtgtgattctaataatgcaagttgcaaacaaaataataatgactttttagttataggggcaattgatcaaagggtgaattgccttgctcaaagtcttcacgaagcttcacgaatcttcaagaaaacccgcgatcgacgaaaatccggtaaccgcaactatacgcaaacaatcgaaaacctaaacaaaagaccaaaagaaagatcctatttagactaattagtagtgccattaaatagatctcaattttatgggaatactggaagttgagcggagtcaatcggagttgcgaattgggtgatatgaattttggaagtttaattggagtttctggaataggagaaatggtttatggaatttgtagaaataatattctcaagaatattattgacagtcactgtcatgcgggaccaaaggaaatggtttatggaattttggaataaggaattgatttatgggacaaaggaaaaaggatttattaaatccctggaaaaagaaaaggatggagggatgttaattggacttgggccgagcgaaggggcgcggcccgaagagatgcgcgggcgcggccgaggcgagcgggccggcgcgcgggagggaggcggcccaaggccgaacgaggcgcggcccacgcgacgcaagccgatggacgcggtccaccgagtcgggcgcgaggcgggacccacaaggcgacgacacggctcacgcgagcggggtgcacgcaaggcggcgcgttggatcggtggaccgggagacctttgaccggtctccgcggggccgggcaggtagatgtggcgtcctcgtggacagccacgttggcacgggcgagggaggaggccgggcggctcattggacggcccacggcgcgcggcgggatccggcgaacggcggcgagccggaaggggcggctagcactggcggcaggaggaggagaaggggaactcattccacggctcggatcaggaagaggacgcgcgacgacggccggcggcggcggccaatctcgccggcacgccgacgtggccgcgcgcgagaagagcgaagggtgcgcgggctcgggcttagccgaaccggtatggtgttgcgacgcgcacgcggtgacgcgggacccgatggtcaccggcggcgcacgcacggcagcgttatgcggcggcggaagcggcgacacggcgcggagacaagggagaagaccgacggccttggggcagccagggggaggtcaaggggatccccgggagcgtggcagcgagaggaatcgacgggagaggagccgacgacgatggattgcggcgcggcaaccaccggagagcaaaaaggggaaaacacgacgagacgacgagggttcgattcaaaggggtgggagcatctccggggttcaaggaatccgtttccggcgtcggattggacggagcggcaccgagattggctggcgacgagaggcggcctccgggacagagcaagagcgcatggcgagctatggcgagcggcggcgggcgcggcgcatcgcacggcaggaggaggattatggtggggagctcaccaacgaagaggaggcagcgttggcggcgcggtcggtgtcgcggcgaggtggtcgcgacgccgaggcggcacggcactgagagggcgcggccggggaagaagggagggagaggtggtgcccggagctcctcgtcacgcgtccacgcacgcaccggctcctccggtgctcggcaacggacgacaacggcgagagcgggacgagcagcaacaaggcggcgacggtggttcggcggcaatggcgcggtgggtgtgaggactgaggcgagtgaaaacgagagaggaaggggtttggggtggcttggttttatagcggaggtgaggtcggtttggggaggggagaactgaccttggcggtcaaggggagctcggctggcggcagcggcggtttcgtggacgatgcgaaagcggcgacggcgtggatgctttgggcgacgaaggcggtggatcgagcggcggagatcgaaccgctggagcgcgggctggcgtggtcaagtagatgaggcgggtggcgcgagcggtcaagcggcgcagaggtggtgacgccggcagtggtcgggaaagggaaaaagaaggggaaaaaggggcttggtctcttgccataatgaggagagggagagtgaggaggaggaggagagggagagcagctgcttctcccactcttggacgggtgcggcgtggagtggcgggggggccatggatgacgtcgacgatgacggcggcggtcggtttggcatggagcgggggcaaggcggcagcgcatggcgtcggcagcgaccggccggtcggccacctcgcgaggcgcgcgcggtaatgggcgaaggcggtggaggttttgggcggcgacggcgggaagcggtgtcggcgcgagagtgaaaccgagagggagagagaaaacgagagagagagaaggaagacgagagagcgagagaaacagagagagcgagcgacggctctctctctcggctcgcatgcgtgcaacgcacgtgcgagggggaaagatgatgggctgggaggggagatgggccgggggagaaaatcggtccatccaaaaatacagggaggtaaagtagacttttacagagaaaaccgatttggatagaattgtagatatttagggtttggattcgaattcaaatttgacattcgaacttgagggtttagggatgtatcaagggaaactcaaggagaagtcatggaaaagattcaaaaggaatacttgggtatttgttctcgggaacatagggtggagtcaaggaaaggattcgaggcgggatttgaataattctggattcgtagaagtatttggtgaggattcaaaggaaggatttgaatttcagaatttgatttcagagactcgaatcggaagaggaattttcgaggtggaggattttgatttcgatgagagggaacaacgggattaaattgagatccctggcacaacttagactctcacacaaagaacgaaaattttcgtaattaggattttgccgagttagtttttaacgactcacgaaaagcggagcgttacactagcactctgtaagagtgaagttcaaatagaagcaaacacaccaaccaaactagacaaaataacattattccagtctattggtaaatctccatccatgattggcaaacagttgcataaccgtcgtttcaaccttacgacatgcaacaattaagaaatctgcatcttcatcacacttttgtaactgtgcccacagacgaagccaatatgttgccttgaaaatgacctgcatataagtaatagtaggtgatttgtcaaaaaccctatcattcctactcagccacagtgcccaacacaaggcagaagctccaacaagtatcagtttgctctttttgtttatgactccctgaagccaatcatcaaaaatatgagatatgctagtaggaatatataaaccaaaagaaaactgaactgccctccaaataaactttgcaaaatgataatcaatgaacagatgttggatagtctcattttcgtacaaaagcaacatcttaaattaccagtccaattccgtcttgctaaattatccttggttaacacaactcccttaagcaaataccacataaagatcttgatcttaagcggcatcttgagtttccaaattaacttatttctgtcaatgtaaccattattaattaaggctaagtacattgatctaactgagaattggccattctgatgatagttccatctaaaataatcaaaagtattattcaattgaatatgaacaatagatgcacacaattcatgccaaagtgttaaattttgaccaactaaagctctcctaaaagaaacattgagcggaacagaagccatcacactagcaacagaagaacttctccttctgacaatagcatataaagatggatacttttctctaaaggccgtatttcctaaccatctatcttcccaaagtcttatgtgttccccattattcacaatccaagaacccatagttaagaaagttttttttgactttcatgagtcctgaccaaaaatgggagtcaccttgtttcctgtcaacttgggtgatagacttattataaagatactttctcttcaataagtct

SEQ ID NO: 23051 - DNA, 8910 bp, Oryza sativa
gaattcctgcagcccttgaaaggacagaattaatcaaaaccagtctacccccaacagacatatgttttcctttccagctgctgagttttttctctattctttgatcgataactttccaatcattattacatagctttctaaaatgcattggaataccgagatatttaactgaaaaagaccctaacttacaaccaaagatattagaatattgcttataacactcctttgcctgaccaaagcaaaataactcacttttgtgaaaattaattttcaagccagataatttctcaaagatagacaaaatcaattttaaattctttgcttgttgtaaatcatgctctaaaaaaatgatggtatcatctgcatattgcaaaatagacaaaccatcatccactaggtgagaaaccaccccatgaagagatccattatatttagctcttttaattagtaaagctagcatatcagcaactaaattaaagagaattggagatagaggatccccttgtctaagccctttatgcgtttgaaaattattaccagtttgatcattcactttaataccaacatgaccaccttgaataaaagaggcaatccactcacaccatttaggagagaagcctttcatcctcaaagtctgttgtacaaatgaccatttaaccttatcataagctttctcaaaatcgatcttaaaaattacagcacttttgtttttacgatgtaactcatgcaaagtttcatgcaaaataaccacaccttccataatatttctcccaggaataaaagcagtttgagtaggactaattaccttttgggcaacagtcatgactctatttgtagcaactttggtaaagatcttaaaactaacattaagtaagcaaataggcctatattgctggattgtcatggcctcaacacacttatgtaaaagaatgatcgtaccaaaattaagagagtataaaggtaaagtaccattatgaaattctttaaaaagatctaataagtcacattttataacattccagaaaacttgataaaattcagcaggaaatccatcaggatccggtgctttgttatgttccatttggaagatcgcctccttaatctctttttcagtaaaaacctgcgttaaagcctcattctccaattgagaaacttgaggaatgtcagcaaatttattctcatcaaactgaagagtagaatcatcaggaggcccaaataaacctttataataagtggtaatatgcgatttcaaatttgcatcaccatttattaattggtcaccatcatgtaattgaaaaattctagtctttctatgttttccatttgcaaccaaatgaaaatattttgtgttagaatcaccctctaaaatatccttagatttcgccctctgataccatttaacttcctcttctctcagaattgtagataatctatttctacaaaaccatctaaaatccaattactcctgactcaaaagcatagtttctgcctttttatctagcaaatccaacttatctaaaatctccttttttttcttttttgtacaagccactagtatgtttagaccaacccctaagatgctgtcttaaacgacgaattttcgcctgccaccgctccatggcagaattgccttcatcaacactagaccatatctcctttaccatatcaacaaagccatcacgtaaaagccaaccaagttcaaacttgaaactatgttgagcattactcaaagaagaagtgtttgtatttaaaagtaaaggagtatgatcagaaatatctctattaagagccaccacagaagataaaggaaatttatgttcccactccgtggacattaaaaccctatcaagtttctcatatgttggattcgctaaattgtttgcccaagtaaatttcctaccagacatctgtaactcccggagacataacccatcaataatagcattaaaaaggaagggccatctatcatcataattatcattattcttttcatcagggctacgtagaatattaaaatcaccaccaataagaattggtaaggtttcatgactgcacatattaactaattcagcaaggaattgatccttaaattcactttgagctggcccatacaccagaactaaagcccacttaaacttatcaactttattacataaatgaaacttaatgtagaaatctccctcatcaatcaaaccaatatcaacattaattaaattgatgcccaaaagcaaaccaccggacctacctctaggaggcttgcaatgccacaaaaattctttgccagcacacagatttttaagaatagccggactaaaatctttcttaatagtctctgacaaggcaataaaatcaaggtgatgttcctttgttaaatcagaaataaacttatgttttttcgggtccttaaacccatcacaatttcagaacaaccctttcatttaaaaatattattttttttctttccccttttagtctttttcttactattaggagaggtatctaaagaatttaaagtggtctgagaataattatcatccacagcactaaaatccatcacttcctccattaattcaccacacaaatgttgaagtagagaattatcatccacctgatcatctaatatcttactatcaacatttgaagtatgtacctgattaacagaagaactaacatatttacttaacctcttttcctctatactatttaaatcatttataacatcatctaagataaaattcgtacccaaagtgatcacaccaagattatcaagagcagcagaaatttgttcatttgtaaattgtaaaaaagaaacattatcatgaaagttaccttttgcctgcaagttgtccaaattcttatcagccttcaatttctcagctctttggagaacaagttgatcactgtcacttgcccttctcttgctcttcctggagagagaaattactgcttcaggaatagcagcgagcttttcccctagactttgctgggtattaaccttcttaaccattacagaatcctcatctaagccatcaaattcctcatcagatacattcaagccatcagattcaggtatcagactcaaatgagcagccggtatagaaggaccacccctctcactaacctgaccaccagaacctattaaggaattgttaccaggatcacctccagattccttccccaaatcctggttcagattcccctcctccttctccaaagtcccatcatccagattctccatatccattggtacaggctcgtcagacccattgtcaggctccactataaaagataattcgtacaagtggtccccaataaccacatcaaccacatctgggataaacttaaccgatcggaacttaatttagcttgtggtcaatgctctggtacaaatttctttaccccggagatgtcggccaagagcccaagacgataggcatcgtggttgcgatttgtgaatgactcagcatgagcatcataatcgtggagcaataatccaatgcgaacatgcgtaatgaagactgtacataatcgtcgtctattattatggaacagatcgatcatcgatccatcatcgcaggtggcggtgatctgatcttgccgaacaagcacgcatgccattggctcctaagaagcttttttttttcttttctgcgaacgcgtaaaaaaattacgcattaatatattaaaaaaaaaattatagttacacaacacaatcagccagactgacttataccagaagaaaaactgaagtttaaaaagctactgtagctaaacacaaacttctcccaataagctttctccaccccgatcccgtgtttgcccgttgctgcacacagagattccgcattcggcggcgatgtggtcactgcgatttggcggaagctacccggctgacccgggccggccgatcgatcagctctcgtgccgtcgcgtctccacgtcaccccgattgacaagataacataagatactggattgatattgagtggccatcgcctggagccctgtaacatgtatgattcatgcaaccagccgcatggaacaaacctgcccagctgctgctgctgccgccttgtctcggaactcgatccttggcatcatcgttctttcgccggttgcacggtgagacgatcgttcgcaatattcttcttgctggaaattggacactggacactggcactgcaatttgtgatttggttgtatcagcgagatattttaggctatcttagggcctgtttagttggtgaaatgaaaattttcggatgtcacatcggacgtttgaccggatgtcgaaaggggtttttggacacgaataaaaaaactaatttcatgactcgcctgaaaaccgtgaaacgaatctcttaagcctaattaatccgtcattagaacatgtgggttactgtagcacgtatggctaatcatggcctaattaaacttaaaagattcgtctcgcgatttacatgcaaactgtgcaattagtttttctttttatctatatttaatgtttaatatatatattcaaagattcgacgtgatgtttttaaggaactaaacatgcccttagcctattacttcactgatttgtgcatgtgcagctgattcaaatgtctaccatttgtcgtccagccgaaccctgctagtatggacctccccgggatatttagggcccatcctagtagggactcggtccatccataaaatggtccgtgctctagaaatcactgttgccaaatcagctgatcggtctgcaactgcgctacgataattcagtctccacatggccccacatgtcagccctaaggattagagcatgtacaatagcagactattagctagctacaaacatattttaatgagataaatgatgagagagaagagcagcgtgctataaaactatagccagctgcagcacagactctaagacacaatatatataggataggtgggaccatgtattaataatatagtaagtaattattgtatgaattggatattagattggctatagatgaattggagttagtagtgggctatactattaaacttgctcttaggctgtgtttagtttcacgccaaaattagaaatttgaagaaattaaaacgatgcgatagaaaagtcgaaaatttatgtgtgtaaaaaagttcaatataaaagacaagtttgaagtttgaagaaaaaaaattggaaactaaacgggcccttacacgcccacgcgcccccacaagccgaaaccgcctcaacccaacgtccccaccgcaacctcccccacatgtcagcgtacgtggactggggtccccgtctcaataaacccccgcgcccacgcccacctcgcctcctccgaccaatccgcgcctctgccagcttgtcgcgacgcgcgctcccccgccttcctatttcacccccctcctccgcctccgcgccactccaacccaatcccagccatcaatacctgcctccgcttcgccatctctcccgaagcctcctctctctctctctctccccccgattccaccacacgcaatccaattccaacctcgtgtgcttccacttgtgcgtttcgcccgctgctgtgaacgtactgcgagatggcagcggcggcggcggcggcggaggcgaagcaccggaaggaggaggaggaggacgaggaggagatgacgctggaggacggcgacatcgaggagagcccgcgccgcagcttcgacgacgactacgaggacggcgggagcggcgacgacgaccgggatgacgacggcgaaggtttgggatcgcctcgctcgttccagtcccgccagtggccgcagagctaccggtacgtcgttgcattctccgcttcatcctcctcctcgtttactgcgttgtttttgtttttggtggtggtgatggttcatggtagttctatcgatttcaaccgctgtttgtgaaatctcatgttgatgggtagatttcgttgaattgtactggacggaataacttgtgagtttcgtgatgggactggactgagcgcttgttcggataatactagattgatcgttgacgtgtttggttgggatagttcgggcaaacagttcatgtttgatccgagtggcctggattctagaatttaccagcactcgtagaacatctgattgattcgacagtgctccgacagcacgggtctgaaaccgcaacgtgcgcggtcgcaatcactgttcgatcgcctcctcgctcgtactacagccgtgcagacatcgtttgatctgtctgctgtactgcgttcaattagtgcttagtgggggcggtttgctctggtggggtttctctggcagtttccactgttgcttgtgaaaattgtatgttgacggggacccggttgtgttttcaatttcctgatgattgggatgggatattgttgcgctagttctgatactactaactttgaccattaacactatctaactctgctggtggtaaactgtgcttgctgtgtccccaggttgggatgtggggtggaattcctctcattttgcttaagaaacacagtgctatggtctataaaaaattcacagcctgagtgctgtaatctcctttcctttctcttgttttagcagagtactactgttgcatttctgataatagaaatgggggctttcaagccctagttcaaaaaaaaaaaaacctctgctggtggtaaactattaacgtacaaaatcattttatggctgcactctttgtttgatcgactcctcgtgcagacatcgtttgatttgtgtgctctactgcgccatggttagtggtggtgttgctctgccaattccaactgttgttagtgaaagttctgtgctgatgtggacttggttgctttcattaacactgactctgatcatggtaaactaatatgtacaaaatcatttttgctttgtcgatcaggggattgtttgtactgacacatcgtatagttgtttttggttgtctcaaaaaaattaagacaagggctttgctggcaatctaatacccaagcttgatgaatgccagctgttaaaccacatgttttgttttcttcccaaccgttatgtgcaaacattatgatggtgatatgctgtttgttttgcagagaaacaactgacacctatacaattgctgcatctccgagctttggttacttgggtccctctacaagcaaatactcgatccttgatggtggtcgtagtagtctgggatccgacctgaagttgcccttgttgtctgataagctagatgggaagcaagactctgtcaagagcttgagaaagactcttggttcagcaatagataggaaaagctcgttacttacgcaacatactggagaagtctacatcgctcaaggatgcagtgtgacacagacggtgttcaatggtactatcattaacatgttagattgctcaattacctgcctaagataaaagaaatgcttaatgttttacttgttcttttggtaggggttaatgtacttgctggtgttggacttctttccactccatttacaattcatgaagctggatgggtaggccttgcggtcctagctatgtttgctattgtttgctgttatactggagttctgatgaaacactgttttgagagcaaagatggtatttctacatatccagacattggcgaggctgcttttggaaggattggtcgtctgctgatctctgtaagtcctggtttctttcctatcaagtgaattgtattgcattgcatgcaagattgcatccgaatatctcagcaccaatcaaagtcatttttaataatctgtggattttcattaaattaaaagaatgacaatctgtagaaacttctattcctttttttttttgcaatgtaagaacaaccattgatggtaataaacgaaataattcgtgcaagtgtatcaaagagtaagactaacctggacaatggagacacgaccactgtgcaggctgtattagttttctattttgtataaccttgcttgtatgcgattattgatgatatgatccatgcttatgaaaagcgctctcttaaggttcagtaactggtagaaacacctgcctgctcaagctctggattttctttttccttttctaaaatgctgactcccactaaaaaggagtgcatatggcatatttgtaaactataaaatatggcatttcaatgtttgatacctcatgactgatgaaatgcatattatattgatctttatcagacttttttgtgcaactaattttaacttctggtagagaagaaacaatggctgattctttttctttaatgtttttgcagattatactctatactgagctatatgtaagtagctttcacctggctttatgttgcaaagttttccatctaatcctatatagttcatccccactaagtgtagttaatgctatttctctcttctctcattaaaccacatcacctcaattatttttagcctttagatgatacatctatggttcaaattgtctcttcttcttctctcataaaactatgcaatcttaattatttttaggctcaaaattgtaccaatttgttttagttttgatcatattacatattatttgtacatattatataacttaattttccgtagcaatgcggcggggtattcatctagttatttttattgatcaatccaactgagcactcttttatcttattcaatcctttctaaaaaaaatattatcttatatatgttattcattggatgcagtcatattgtgtggaattcattattttggaaggagataatatgacatcaattttctctcatattggttttgattggcttggcgtccatattgatgggaaacatttctttggagtgttgactgctctaatagtcttgcctacagtatggttgagagatcttcgggttctctcctacctttctggtctcaacactcttaacc

SEQ ID NO: 23052 - DNA, 7809 bp, Oryza sativa
taatatttaccattgaattgtcatgtgtttcaggttatcaaccctttcaccaagtatccttttgaatatcaaaacttgtagtgttctggcttctaggattacattgtgattatttatgtgcctgcctaattattcataggaattgcttcatccttttttttaaaaaaaaatatggcttgatccttaaccacaacagatatgccctgttgttaaacccattggctcggagtttagaggagttgcgccctgaaggatttttgaacgaaacaatctgctctattatactgaggactgcccttgttgcatcaaccgtgtgcattgcgtttcttatgccatttttcggtacgtatacacaattttctggcatatgtacctaattctgcttcatttttcctgaaactctcttagctgcattctctcagaaagaattttttttagtaaattgctcatttaaccacctatattctacttgagttctcaaaacatcatgtacttataagtaccttttgtgcatgacactaaagatgtaagtgactaacctgcgaacccacttataggccaaaataaaccgttggatttgtgggttagccgcttacacctccagacactccctctataattaaaatgttccacaaaactgggttttgatcatttgaagagttagctcgaagaaataccaactttatgcaatttgagatgcgatattttttttcttctaaaccttttttcccatcaaatggtcaaaaactggtgttctgtggagtgtggagtcagtttaggtggttctatgctcaaagattgctaattcctttgtattacgcaacccagtcaaaatatgttgtctaatgtgcaatttactatacttgtttgtcatgttaaatccagttattaaatcaaaaccttcgtttgtgttttcctatgcttttttatctagattttaaaccctttttttaacggaatctagattttaaacttgtcatagcagtaagcttggtaatgtggagtgggcatatcaaatctgtcttgctgcaaacctgcgtatgctctgtatttctgagttgtgccttgcatatttcaggtctcgtgatggctcttattggatctctgttgagtatacttgtggtaactttcttctgctagaatcttgttttcagataaacccttgaacaaggagcaacaaacatactcatttcaacatttttttttatgattacaggccgtcataatgcctgcactgtgcttcttgaagattaggcaaaataaagcaacgactgcccaggtaaaatgcacatcgcgtggtagaccaacaccaaaaatcgctctctttcttttttgtttcttttgtttgtcaactacatccgtggttgacatttttgtttcaatctcaggtcgttgcaagtattggtataataatattgggcaccataagcgctgctcttggaacatattcgtcggtactcagaattgtggagaactactaattacgaaacctagctcgcgtgcagtgcagttcccagcaggtgaggccacaggcatgtcatatctattactcaccccgcttacggttacggcgctcaaaaatggtcaaatatcgtgtgtttatcagaattttgctagaattaccgagttcactgtaattattcgacccaaccatgtaatgcatgtacctgcatagctgcttgcttctcagttccttgaagtggaatatcttcatcacttgcttataccgtgtttctgtcaatcactgttgttaggtctatccagcatgttacttaaaccgcctttagcaattatatgtactcaattaattatagatcgagattgctggatattgagtgttgcaacttgcaacccttgtttccaaggcaccttctgtgtgttttctgatccctctgttgcacagtacgaaattaatgccttgtttggataggacgaaatcccagcccatcacatgtgaatgggcctggattaaggcacaaaatcccagcccatcacatgtggatgggcctggattaaggcccttccaaatgaggcctaaatggtctgggcctttatcttgtttctgcctcttatgttgggctgttcattagtagtagcaaacacaatccaatagcaaggggttatctacaaagtcattaacttatgatggaccgtattgtttttcgtttatcagaaatgggacacaaatcgttgctgaaagaagcttttgcacatgtcacttcagttcagagccccttcttttgtaattggagaatcttttcgttatcatgcaatgcatgcaagtccttgagtggaaaaaaaggcacctaatgcttatgaacacatggaacagtagagaggcagtacagtcataaaattcttttggtactagtacaaagaatgagcaaatgtgttggcagtagaaagcaagggattgttatgcttgactaataaaaagaaaaagggggaagccactgcgaaaaatgctttgaggaacttttcatacaaagccggagtttgccccttttatggggctccaactttcccttggcacctcacatttgtttttaaggaatcctaagtggccaaaaaacccctccctagcaaacagaaagaaggggtgctccctttatgcaaagaggggcatctttgctgcagagtgcatcccacttcgcaattagcccatcttaaaagacaggagctcttttctccttctccccatgacttttagtagtgcaatctttctgccttcaaaagtgactaatcctttctcttcctttcattggtgtctcaaactccctgaccttttcttctttttcacccaaaaaggttatgccttcttttttgctacacgccctcaccatccatactgtgggcctagttgggcatcatgcatgatgctctttgtcaagctctctcctctcaggtgccttcacaccttactttgcttcccatggagagagagattataaaggggatgagatgaggctctcaaagcacaattataaagcttgccaactttgttgttgctaaccattttcaattggttttgtgtgtgtgtgtatttattcctgagctggactgtttcactcatgccacccatggttaaacactgcttcactaaaatatataaaaaaagtactgcctgattaaaggcttgatagagctaatcatgctggttaaaaggtgcaactttaggtgggtgggtggactatgatgcgatttacgcttttactttgcaccaactttgtttcttcaagctaaggattgatacatacacgagcaggggaggcaggcacacaaatcattcctcatgatggtctactttgagttgtgggagatgcatggtaacttaagcaagcgaaaagtgacatgctagccgctttccctcttcctttctccctatgggctaaagaggagggatggggagaagctaaggggaaagctatagcaccaaactttgcttgcatctcatgacatgaatgaattgaatcggtatgatgatttctcaccaccaaagtgccatccaccgaggagtgaagaagaggggaagaaaagaagagcaaaaaaaagcttactacgccccttaaaaagacatgaaaagcctagtgaattatgcgtgtataaaccacgctactagcctcctttgaattattgatgcttacaaggaagaaatcatgcttgcttggttcgattcacttttcacctttctccaataattacgcacgccctctagttcgtctaaaagaaaagataaaggcaaaaaaaaaaaggattactggcattacatgacaagaacactcagctcctgagctccatgatcagtaccttttaaagcaagattaatagtaacgcccacagttggctgcaattttcaccatatcatcaaaagttggtttagtagcttaccagcacaataaacagtctctaacctgtttgtccatcctttcatgacaatagtattttattctttattcatcttattctctctctggagattatttcaccgctgctgatctatggcaccgacggggcccacttttctcgaaaaacgcatgcagccgggcgacagtttagtcgccgactcgccctctctctcctgccttttttctgccaaatcatcgctccagtctacgtggccagtatgtcgctggcataccagctgctattatacctgctcttaaaaatcgatgccattcctaagtttaccttacggtatatatggtaaagatatagaccagatctagggtctgcaatgcatgctctctgaaattaacctcacgcggaatctccacgatactttgtttttaagaattgatctgtgtgcatgcttcatgctttagtagattccttaatcattcatgcatggtttagtgctaatcatatactactactaaactagaggtatagtactacacggtagtttcgtatttacctagttccgtacaaaatttctacaatgcaagacgacgtagaatactgttgtagccttcaacccaacttgaagcccacggacatgcctgcccatccagcttgctattgagtatgggtcccaatgcataaagctgaatgcatgcatggcatggcaacttccttggattttccctcaaaactgtacaataatatagcatatgcagtccccaaaaagaaaaatcagccacatatacatgcacatccaccagatatgcaactattcaagctaaggatgagtcctccatgcatatcatgcatgcatgcatgcatgcatcttcttccaagaactaaagctaaggtagagatcgagaagaaaaaagccaacgcaatcgatgagcttatgtgcgtggacgcgtacccccatcgatcgatcagctgccatagcgcaacccccctcttttctcacccagctagtatttgtggggaaaaagacgtgtcatcatactaacatgatgccgttgcgtgcatatcattcgccgcagatggacaagcagatgcgctcccgctgatcgatcgcagcgtacgcccggaccagcgtgtggggcgcgggcgcgcgatcgacgtgcgtcgcgtcgcgtcgcgatgaggcgtacgtaacgtgatcggtgcgggggccgatgtgcgcaacgtgcgtacgcaaaaaatttggtggagaccgggtgtaatcggtctcacctgcagccccgctccggatggatgccacatggatgacctagggatcgaacggttagctcggcccggctcccggcgctgcgtgacgaggatgcaaatggcttggctccaggcgcagacgcggctttcagcctcgccgacggctcgattcaacgcagatcgcgtctcctcgcctggatatcggctgcatcgacgaccgtctttctgttcccgttccaggcggccgccgccggcgagccgcagcgccaggcaattgatcccgcggcgcgtttggatgctggctgcgactgtacccgtcttccaatttctggcggccgccacggacgaaacgcaatacttcatcgattacggcttcgatcgacgatgaccctacctccagttcttctccctgatatgaatattgtatattgttttctggttcctaatcctacggcacttcaattttgcatgttaattttcttctcatgccatggagaagcggccggcgacagcacctgaccctcgactctaaacggttcaagctctagcctttagaagccgatctccaaaaaacacaagcacgaagagcacatcagaagcgatgtcggtggtggagctcggcacatcggccatggtgctcccatagtcccatatatgtcagtctcagggacgtctgcggcgccggaggaggaaaaggacgacccctgcagtgccggaggaagacgcgggtcgctgctcaccaggcaaaaggagatgcgatatgatgttcgtcgaattgagccgacggagagcttgaaagacacggctgctcgtggagccaagccgcgtgtgtcctcatcacgcaacgccgggagccggaccgagctaaccgttcgatccctatgtcatccacgtggcatccatccgaagcggggctgtataagaggccggttacatccggtctccactgaatttttttccgtgatgttgtggtgtggacggtgtggtgggtttggttaaaatggagggggcttttgcggggattttgttgggttgcggcttgtgcgggtagcgggtgcccgcatgctgttctccccgtgcctcgcgaacaaaaccggggccgtggccgtggtggcttgtgcgcggcgtctacctggtgtgacgcacgcacgcatgcatggccagccaaaccacctactgcggcatgtgcccatgcatcactgttcggtgaatgagtgaatacatatgaatcgcgatcgccaccgttgggggggcacgtacgtactatacgtaactatactattgtagtgcatgcctttttgtgtagtggaccaggatgtggtaggggcctggtctggtagttgatcgagcttatggtgagtcgtcaattttgaaatgtgagattggtcaacagtatgtatgtatgtaggtatgtcttgattaacagtttaaacttttgggcgagctggttgcaagcggttgttcttacctgcatgcatgtctgcgaagctgtagccaattttgaatttcatttgaattaatttagatgttcctcttatcgctttctatttctatcgttaatgatatagttctcgtccttgtacatcactactccgaataaacatataactagaataaataaaaatatttttggacagcatcaaggatataaatatgaatcttagttcaaaaatatttctatttattctggttatatcaaaccatcaaggatataaatatgattatatgaatattagttcaaaaatatttttatttattctagctatatgtttattaggcatacagggtagtgatgtataaggacggatctaacatagaaaattgggacagacgatgctgacgactttttttaaaacctatagctagtcttgtttataaatgaatataatatcatagtttaaccatgaccggcatgttataacaccgatatatacattatatattgatctatcaaatttctagatccgtctctggtgatatatgttgggaagtaacatctaggcaaatgcaatggtaaaaagtcattgccttatgggtaggctgatttcaaaaaccttatcagttatcacaaattcacaatgtgcactcacgggtttatttctcccaaaatgaaagactttttcaatgaatatgcacccccaccattcacaaaatttgaagttgaaattccagcgatgagaatttagaaaaaaaaaatgaagttgcaccatgcccaccattcttctgctataccccatgagacctcaatagcatgcagttcttctaccgattccctccaaaatcctggcatttctctctttccaagcctttctagtaattaagattacggactcgtgcgtcaaaaatttccgttgaaacttttgcatggaaacccaagaagagtatcaccaagtttccataacaattgacagatctggtttcaggtttaaccgtctgcggaccattttttttctaaacttttcgtaatcatttgaccaacaagtggggaggtactacacgcacgatcgagaaaacacacccaacataggaattcaaacgactcgcaagaacaatgttcatagtacgataatagtacagatgccaaatatgagatttcggaagggtcaaatccaaatagtgccctttgcctggcccgtccggtcccaccctgccagtagcacatacccacacacatgcttcaacgtcaaataatctctctccgtctcc

SEQ ID NO: 23053 - DNA, 24175 bp, Oryza sativa
acctaacctcacctgatcgatcaaccaaactaaccgcaccaagccagcaaccactcgagcactcgcggctaaacctataacaaaccggcgcccccgtagcgtagctatacggcgtacaccacgcgcgcggagttgcagacatgagagcctactcggcgacggcggccgcggcggcggtggcgtcgctgccgtcggccgcgccgccgctgactcccgacgcggcggcggtgctgtcacgcgccgcggcggacgcgtcgaggcggcggcacgcgcacaccacgccgctgcacgcggcggccgcgctgctgtccggcccggcgccgctgctccgcgacgcctgcgtggcgggcctcgcgtcgccgcacccgctccggtgccgcgcgctcgacctctgcttcgccgtcgcgctcgaccgcctcccgacgtccacggagcaccagcaccaccacgcggcgccgccgctctccaacgcgctcgccgccgcgctcaagcgggcgtacgcgcaccaccgccgcatcggcagcggcgtggtcgaggcggacgaccaccgcgtcggcgtgccgcacctcgtgctcgccatcctcgacgacccctccgtcgcccgcgtcatgcgcgaggcatccttctccagcaccgccgtcaaggccgccatgctgcgctccctctccgaccccgccgcccccgactccggcgtctacgtcaacgccagagtgctgcaccggcaggtgtcccaccgggaggaggaggtgaacaaggtggtggaagttctcaagcggggcaagaagcgcaacccggtgctcgtcggcgacacggtggacgtggacgccgtggtacaagaggttgtcaccatgatacagaggcaacggctcggcaatgcgcgagtcatctccttccagagagaattcggcgacctggtcgatctcgacagggcggagctcgccgccaagatcaaggagctcggcgaggcgataagatcggagctactctcgccggcgtccaggagcgccggcgtcgtcgtcaacctcggcaacctgcagtggctcgtcgaggagagatgcgtggcccccggcgagcaagagaagcggagggacgtggtgctcgacacggcgcgcgccgccgtggccgagatggcgcgcatcctgaggcagtccggcgagcgcgagcaccgcgtctgggtgatcggcacggcgacgtgcgccacgtatctcaagtgccaggtgtaccacccgtcgctggagagcgagtgggacctccaggccgtgcccatcacgccgcgaccgccgccgccgccgccgtcatcgctcggcctctcgccgaggtttgcatccgtgacaaacacagcatactgcctccatcatcaacctcgcctttttttccacgacgataacgatgtgtttgtgttctctttgtgttttacagtgttaatggagttaacagaggcatcctgagcagctcggtggaggtgttgtcatcggcgatgaccaccagtgcaatgcaaagcaggtcgccgagcctgtgcagcgcctgcctcgacggctacgagcgcgagcgcgccgacatggcgtcgtcgccgggctgcggcgcgctccatgccacggagcagcccatgtcgcagtggctgcagatcgggacgccgagcagcgcacggccaccgttcgaccgcgcgcaggttggttcggtttggtttttttgccgcgcacgacaacgacaaactaagccgcgtcgtgttccgtcgccgtgagcagcgcattgacgtgcggaatctctctctctgtgtctgtcgctttgcaggacaaggcgcgggaggctgacgagctgcgacgtcggtggctcgaccggtgcgcgcagctgcactcccacggcggcggcggctgcggcggtggccggccgtcgtcgatggtcacttgctcggaatggaacggcgcaagcgtcctcgccaacatgcaggctataccagtaaggccgccgccaccggcggccgcggcggcgcctgccgccgcggtggacaccgacctcgcgcttgggccggcggcatcaacggcgtcgaggccaccggcgtactgtgacaccgacgagaagctgctcgtgaaacggctcacggaggcggtgcgatggcaacccgaggctgctgccgctgttgccgctgcgatcacgaaggccaggtccggcgagcggaagcggcgtggcatggggcccaccagggccgacacgtgggtcctcttctccggccatgacgtggccgggaagacgaagatggcggaggcgctgtccatgtcggtctttggcacgaacgccgtcgcgctgcgcctcgccggcaacggcggcgagcccatcgcgtcgtgccgcggccggacggcgctggactgtgtggccgacgccatacgtgccaacccgctgcgtgtcatcgtgctcgacggattcgaccaccacgacgacgacagagtcgtgcaggcgtccatactacgcgccgtcgagtccggccgcctcgtggactcgcgcggccgggacgtcgccctcggcgaagccatcttcgtcgtcatgtcgctggacgacacgaggcggtgccaagaggatcatcagttcaccgactcgccatggaaccttgagctccgagtccggaacaacgcacggaagcggaggccggagccgcagccgctcgacggcgccggcgaccggcggttgaaaccgcgcaaagactcgcctccgcttcaccttgacctgaacctgtccatgtgcgaggatcacaccgacgacgacgacagcggcggcgaggaatcccggaactcgtccagtgacctaacggtggagcacgagcaggagtacggccaacccgccgctgccgccgccaagttctcggctccgtcgagcttctccgagctcaccaaagccgtggatgcaacggtggtgttcaagcccgtcgacttcgggccgctcaaacggagcgtctccgacgtggtctcggcgaagctcggggacgccgccggcgccggcgccggtttgtccgtacacgtcgacgacggcgtgctggacaggctggccggcgcggcgtggacggcgggagagtcagccacgtcgttggaggcgtgggccgacgaggtgctgtgccctaccatacggcagctgaaacgtagcttgagcgccaacgatgtcgacggcgcgacgacggtgagcttgtcggcggtggaaggcagcggcggccgccggaggaaggacggcgaggtgttcccgacgtcggtgaccgtcgccgtcgacggaaactgatgacgcagtccacctggcatgcatgcacgtgtttactctttttttttgggttaaattggtcatcaatatgatcatcatcattttgtacattagtacatgtaaatgttcagctgtcagaagttagagatgtacggggctaggaaggagtagttgttttgataatcacattttggattcatttcaacaagacaagcatgcatgggtcccttaatatttgccggtccttattatcattgacctaccaactatgcatgcatggaccaaagagtgtcatcttgtagctagcagtcgttcgtgacgtttagtcagcaacctaatgaattggaacaaagacgtttcggcgtgcatttttggtgatttcttaactagttaaatgatggaggatacatcaatatatatatatatatatatatgcaatatttcaaggttaaggatttgataagtactgttatattggggtaatggcatgtatatgtagggggcatgtagtaacgaccctaacgtattacacgtcactctaggtttggttattcacagcgttttgccatcttttgcaattttttcttgcacaaaccaccttaaccacctgcaaactgacacgacatttcatgttaaaaacctatccagatactgcatatcagtagagcccaagtcccatgcatgcaatgtacagtcatatactggctagtatttgatgattgcctgtacgaatgcaggcaatgctaacagagctcttacacataaggttcacaacccatacagtcccatgtacgaactagcctgtttatacacactcctactacctgccatggactcactgaatacatgccaaatgcaagtcctgtacacctctgcacacatacacagtgacacagacacacacacacagatcgatcgagcccaatgctttctgcaggacatttctgaatcctagctaaaacgagtgcaagcaagaagcaactgtatgccatgcatgccagtagtacattacatacaacctatcagcagctggtaaaaaaaaaaattcagtagccgcccgaggtagaaagagagaggagctaggtagatcatcaaaggtggtcaaaaaagggcatgtcccgcgtatgcgatgccgtctcggatgccggcaaggacgacgacgacgaagacgtcgtccgaaaagaagctaagctaggcagtgtatgctatgttgtacgtatgcagcagcagcaagcagagctagcgcacgccggccggtagctgccgccgctttagccaaaaagacgcgagttgatccaaaaaaatgaggaaaagtaactgcggcgagaccatgccgtaactaatcaccttttaaccccgcccgggttaatctattgttcggtagtacatctgccataatcagcttggagaggactactaggatttttacagtttcacacccatcttcctctcttgtcgtcagtgaacccggtcgtacggctggaatatttggctttgtgcgtatataggagtacgtcttttcatggaagatactgctgtatcacgctcgattcttcagtttcttgattgatcagagcaacccagcagaaattctaccccagatttaattttcatgatgattagtacatacctccatgattgactaatcttcataagggcatttctatcttaattaggaaagagaatgcagcgataatcatattattgctggggagttgtatttggttaagtgcttcagggtaattaaaactcctgtttagttaattaatttaatcatgtacccactgaccaatgttatcctctaggaatgcatgcacacacaagaataagtatgtcgttacaatatgatatcttgcagtacatttcgttctcgtgaggtgaaatggaagggaatagatggaatgatgatttgtcgccgtgccaaaattcccctctggtaaagagagcagttggtaattaattagctaacagtagttagtgatcactagtagacgcctgagacaaaatggttgcatgtttagggataagggccagaggacaaatgcactgaaagctaaagtttcgttataactactctctgctacggcctctgaagtctgaaagtgcatgtattaattaagaaaagctctcagctcagctggcccatttgccatcttctgcgtatcgtctactgtacatctattaaccagtaaataatatgtgaaatcatgctcgcataatcaaaaaccaactctataaagtgtctactgaatgctgataaagtactagtataattaagctggagggtgttgtggtaaccagtttcagagcataattcccaataaactaagacacaaatggtaaattgtgatcatttgttaggacatatcactacaacaaatatggtcttttaggacgaaaagttattgtgaagcaatgcaaagttattgccaacaaatctctgaatcaagatagtgacgtgctggtaaacttgtatctttctgaaagtctcaaagaatcagtcaccataagcttatcccttggtagtaggtgcaatgagctctgagtgggaggagaatagatggacagacaagcattgcagcaggagcagcagcaaagtggatcgatagctagatgccagggacaaaattgctgcatgtttagggataagggccagaggacaaaatagcggcacgttaagcaggtaactaccttagctagagcttagcttttctttgcctttgccattgccaatgcaacccagcatctcactgcagcagtgtgggggggctcactgggagtgggagataaagtggtaaattatacccctccctgctttggtggtttggccacagcttatgaactatagcagctgagttagcagaacagatagaggagaaagaatcaaagacgaagctgcaacactgcattgcactgcactgcactactgcagccatcctccacgcactccgtttcaatttctgcgccatcaaagtccgagccggtgctgctgcactggcatgggcaacggcagctttgcttcttaattttccactgcttgcccccacaggattcagtgccatgccattgccaatttaccatgcattgcctggccccaaaatgttgtggttggtaggatcgagtcgcaacgattagcagcagacttacttccttctaaaaatgaataaaacaacttctctctgtaaatcttgatgtactatctctatttcaaaatataaacttttgaacgaataagacatacgcattacttatatatgtcccatctctcaaagacaaagttaaggtttttgacaggtacttatcaaaatttttagtgtgtatattcatacctacgtagagatatcaaaattcccaataaaagatgtgatacctcccgatatgtttttaagaactgtaaaatcattttatctagtgaaattaacatttttttgtgatagagggagtactgcatgcctacagcgacgacagtggcaaaagcagcagcagatgcaacatgtattgtacagctacaactccagaatacgtagtgcccagtgcttactgtttggtgttcagtgagctggggccagcggcttcttcaggagtcgctctcacacagatagatgcaaacaggcagtgcgagaattaacgctgcgtgggtcagattggatgtcgaggaatagtaatgtgaaattgattgaggcccttctactctctttttttctttaaagttggtgacagtgtatgattgttactatttatgtcggctaatattgttttcaaaattatctggttgtggtcagtggatgatggttacatatgcaatgcgacgttctagatagtatttcaaattttactagcaaaaatactggtcaaaattaacttctaccatgataataaatttatgaaaatatccattttactccctcaaactattttatcaaagcatttaacccattaaactacttttcgacttttttttacactcctaaactattgaaatcgattcactttactccttaacggtatttgtttcttttccctgcataagttgtattttgtatagaaacttaattggatgatgatagatgtattacaacttgcgtccagtcatttagaagcaaatcgaacagataaaggggaatcactataagtgtggtggttaagtcatgagtcgatccatcaaattcaaactatagtggtcacgaatattacgaacacatagatgtgcgttcaataggattttagtgagtctaaggatttacagatggtctctttgagtgtgtgttagtgatacattagcggatatgtaagtaaggtgtgagtgtatagaggtgtttatgcgtgtgtttcttctgtgtaatcgtaaaaatgaaaaagaaaaaaagctgatggtttttttcactcctggcatactgtggctttggggccgataagtgggctaaatagatgggccgagcaaaacggcccaagaaacgaagaggaggatgaaatcataggtccagggtaaaaccttacccaaatccacactgatctcgtcatggcagctccaaatccttctgctactatggcggcggcggcggcgtccacgccggcgagggcttggtggcgggcggctgctccggcgagtgcctcaactgcagctgtaagctgcttccgagttggggccaagagcctgtaagacctcctctctctaagcttcttagctttcaagcttaattagtggggtactggggtttcttgtcgaaacattgggttctggtagttttttagcgtcgggatacacgccactttagggcaaaggaggtatcttgtgttcatgaatcttgctatcggctcggaaattgcatgctttgggggtgaagtgctttgattgacgctaaggaagcaggttccccatccgctcagttcatcatctcgtggaactgaactgtactagacaagaacagttcaagtaaaattcaaagttcagtgtataaattgctagcatttttgcactgaattatgaaaattctatgctgttttggtgttctgaagtgaatttggtggcacgggtgtcacacttaggaagaggctgaattcgagtccgaactgaagtgaaaatgctgattccaagatgctatatttcgtatcatgtgacactaaatcgtttcaacttactatagctagccagctaggtccagttttgctaagttctcaatgcactggttgaatctagtatttactctatactcatgcttaaacaaaaatgtttcaataacgttttacttttcatgtgatttacaactagattgctcaactagtcaagttactttcattaggttcaagtactatatatcagtcttttcttctttttttcgaaaaggctaacgaaggaggttgacgctatattataagcaggagaaaaaaccgaaaatcagcaacagagttgactgtacatgccaggttgccgaagcacatgtgaacaccaaaaacaaaacaattagggcaatattctcgctacgtgtttagcgccacccattgaccaacttcgtagctcatccattatgcagttgatcagctgttagatatcattcttctctacgcttgttcagttagtcctcactctagtagtgagtagtcagtactagtgtaccttattctagtagctagacagtgacatcaacttaacaaaatgtttactttcaatgttttgcctggtcttaccaaaatgcttatgtactttcaacaaattgccttggtcagtgtgctttagtatgttgtaataatttatattctcatttcaacagcacagggcttcagatgacaagcacccgcgcgaacaaagttcggacagttcatgtcaaaagcggggaggcagaaggaagtccaagcacagagagcatcacccgcgacgaggaaactctgcagcgtgacttgcaaacagcgattcaggaagaaaactatgcccaggccgcgaagctcagggacgagctccgagtcctccaggaggacagcaggtcagcagtgctggcagcgaatgcgcggttctacaatgccttcaagaacggggatcttgtcgcaatgcactcggcatgggcgaagggcgaccatgtgtacgttgttcatccttcggcaggccggatatcgggctacgacatggtgatgcagagctgggagatggtgtgcgacgcggactacgagttccctctccagattgatctgcaggatgttgaggtccatgtgagaggtgatcttgggtatgtgacctgcctggagctggttaagaccaaagggagcagcagctggggaaggcaggttgcgaccaatgtgtttgagaaggttgatggcaaatggttcatttgtatccaccatgcctctcacttcgatgagtgaggctgaatttcttggagagaggaagagctgcaagtgcagatatggcgtgaggttttgcagtacaggcgtgagacatatacttcgctgttttcttaaggtccttgatatgacctttttgtagaaccctttttgtaccaatactatcatcgaatgatgctgctattttgaggagtattagtagtaggtacagacaaccagaaccctgatggaattgtaactcggcgtggctgagatattcgtcagactgttaagtcccttttcctactgttgtacgctgcaatctatccgcgtgcagatgtattttgccaacagatttttgccggttgttacagcatccaacctgttcattgctttagctaacgtcgatttgatgatgaaactccccaaggctcgtgatcaggggcatcaaaaagaatcatgcacattgcaggaagctgcagttgtaggggttgcacaggttgagcgacaatcaaacagattttaagaaaaactccaatgaacaagatgaaatatggaaccctcgcacatccatacaaacacacttgcaaatatcagctgatataggaaatagctgcgagttcagttattctcgtccaagcaaaaatagtacagcttaagttcaggacacaggatatgcgcaaaccaaaagtactatttcaagagacatactgatcgaacattcatgaaaagtatgtaacgcttgcagggagtaacaaaattaatttggccttggtgttgcccactcaacacgaaggataaggttatcataaccataaccattgagcttgctgatagccttctcagcgtcctctctgtgaacaaagttgacgaagccgaaccccctgcttgctccagtcttctgatccaccgcaacgtagacacggctaactggaccaaatgtgcggaatagctcaagtaggtcgggttcacgggtgtcctctgatagattggtcacacggacagagttctcatcattcctacgcctcatgtcatgtccaaccctatcaacagcaccagacctcatgcttggaggaacatatgctcccttcacggcgccacctggaggtccagagccatcagcagtgggaggcctgtccacaaaagcttctgtctggggagctagatccttgtaggggcactttgaggtccagtgatcacccttcttcccacaggttctgcaaaccatgagaactgcaccactcttgcttgccagtggatcaccagaagcacttggttcttcagctttgctccctaaaattaaatgaacagttagcaaagaagaagacaggcatacacatttacaagactaaagcaaagttagctgagcctttggggaaaaaagggagaggttcttcagctttactctataaaattaagtgacagttagcaaacaagaagacaaaggcataaacatttacaagactaaagcaaagtcagctagtatagatcatttggaacaaaaaaaatgaaggatctcaacaaggctgcactccactaagaagatttgtgtcgatgcattagaagaccaaaagcattggttataacaagcataactaaatgtgacgatactatgtacttcgaagatcaatttggtataaggacgactggacgagggcatgcacccatgatagatatcgaattacctatgcataattcttgaacaacaaaactaaagatacaatgccactgcaatatgaaaattctatcatcagacaatacgcatgactaacacaccaaaccacaatcaattacacaatacgcacataataggtattcacaaaagaattgttttcctgatccaccactatccagtattttcaacacttctcttaggaagaataaagacgtgttaatctgcattatcgatgtcccctgtctcaatattcgattaaaaacaaccgcagcttctctaaagatctaactgaaactttacactcaagtccaaaaatattaactttggactcttattaattttccactcaatgttaaaaatattcaaccccagaatcgcttcaaaattaaacaaaacttcaaatgacattcttgtgtcaccataattacccatttaaatactcctttcaatacatgcagattaactgctcctataaagctcaatgattaacattattgcacatttctttctacctagatgtgtgcctgcaaatgataaaactgaaaccaagcaagcaagaaaaattataacagagtcctgacgtatgtagtgttcaaggaaagcagcaccagctgtttcctaaatagatcaccagcctcgattctataatctatctcacatagaggaatagacagcacgaaacattccaatacatcgtgtctagttctgatgaagatcgcgcacaacgataaacaaataattcgattcgagaacacgtcaatcgacgcagatctggacaggaagggggatgcacaagaacagtgacaacctggggcgcgtgggcgctcaaggacgatctcctcggtggacaccatggtgagccgcgcgccgacgtcctcctgcacggcgtcgccgaacttgggccacgagcggcgctcgatggcgctcttggagaggcgggcgcgggcgatcttgcggacgcggaaggtcctggtgaccttcaccttgttccccttgtcgtcgaagcgatactcgaccaccttcttgaacccattctcgtcgggcccggagaccacgcgcggcgggagcaggaagtcgaggtccccctcgtcgtcctcctcgagctctccccacctgatcttctgcgtcgccacctccacggccatggcgctctctcctctctccgctgcgttcgctagggtttgcgggggcggcggcgtgggagggagagagtggggaagaagacctcggcgtaggaatggaaatggaacgagcggctcggatcgttttgtgcgccccgatctgtaaggcggtatccacgttgatgggctttttagtctacgggccggataagttaggcctcagagacattctattgggcctagtaatattagtgttctcactaatttggatttgtacacacataaccaaccaccaacattcaaccatgcaacttcctcaaaatattataactgatgaaaccattgattcaacaaaatatcacactaatccaacactatagtatgaaacatgcaaagcagatagtagtaagtataatactatgttatccctccgtttcatattataagtcgctttgaccatttctctagttaaaacttcctaagtttaacccagtttatagaaaaaaattagcaacatctatgacaccaaattagtttcactaaaactaacatttagcatttacaactcaagttatattttttctataaatttaaatcaaacttaattttttatctagaaaaaatcaaagcaacttataatatgattgaaacggatggaatagaaaattttagtgctagtaaaggctagttgggccttggagcagcccactcgacattaaggatgaggctatcgtagccatagccattgagcttagcgatggccctctcggcgtcctccctgtagacgaagctgaggaagccgaaccccctgctctccccggtccggtgatccaacgcgacgtacgcgcgggtgagcgggccgaagctgccgaacagctcgcggaggtcttcctcgcgggtgtcctccgacaggttggtgacgcggaccgagttctcgtcgttcctccgccgcatttccgactccctcggcttcgggggcacgtacttgcccggccgggatccgccgccattgtcgccgccagagttgggaggaatattgttgtcgacgagagcgtcgagctgcagaggggcgaagtccttgttggggcacttggatgtccagtgcttgcccttggcgttgcagatcctgcaaaccatcagcgcggcgcccttgtccagtgcggggatgagtggatcttccgatttgctccctgcagtgtagaacagttagcgaataaagatttgcatgcagaattgggtgtatgtttagaatttatattcctcggatagatattctatacatgaatagtttaaatatcacactgtatttttagaacggatcggaattgctacaaaacttagtatcccttttatgtcgaaaagaaaaggaattagtatatcctttgttcagtctcagatatactacatggcctagtctaaatagatctgtaacacgtatctatacacggctaacatgaaaaagacaaattcaaaaaaaaaaacgatcaatccattgttgcagattgatctagcaaagttgcaattaacgagcaacgtatatacgtagtactagtgaagaagagactactgctatacctggtgcgcttggacgctcgagaacgatctcctcgggggagaccacggtgaggcgcgcgccggcgtcgtcgttgtgcgcggcgtcgccgaacttggcccagccgcggcgctcggcggcgcgcttggtgacgcgcgtgcgcgcgacctcgcggacgcgggtggtggtggtcacccgcaccgctttcccctcctcgttgagccggtactcgacggttttcttgatcccgttctcgtccggcccgatgaccacgcggggcgggagctgcagggcgctgaggccgccgccgccgccgccgccgtagtcgtcgtcctcgtcgaggtcgctccaccgcatcgtctggtgcttagccgtcgtcgccgccatgattccgttccggggagctcttctgcgatggttgtgcgacgtaacacgatgcaccgggagttatcacgtagggtttgttaggaggaatcgtggtctaggattctggtgcttttataaaggaaggggagagatcggatgtgacacggtgttgcggcccggcccaatagggattctggtcggtttcgctagaaatcaggcgtgaccgcgtgagaaaagggaaggaaaaggcataagatcatccgaggtcccttaacttaccgaatccgattttcatccttcaaccgaaaaaccagatacaacaggtccatcaactgtcaaaaccggtgcaatatatgtccatggcggtggtttagatggtggttttcgctgacgtggcacctacgtgactatttagactcagtcttggtaataacgtggcgcttacttggcaatttgatttagaaaatattaaaaattaggaacccacatgtcagttaaaaaaatagatttaaaatgatgggacccacgtgtcattctcaccttcctcttcttcctcctctctcccccaactccctgtattcactctctctcccctctcctctgtcctctccgccgggtgacgccgggcgaggaggggcggcgccgttctgctgcgcatcgcgggcggagcggccgacggagtgttgctgccgcgctcgccggcgacctcgtcctctgcctccctttctcctccctctgggcaagggtgttctgaacgtgtacgacctgagcaacagcctcgcgcggcagctctccacctccttcctccgcaagccaatcgaggccatctggtgagtaaatcctgttccagatctgtttgtttattctggtctaaacgatttggatttttggatttgggtttggctcaatctgatttgttgtgtaggcatacgggcgtgctggtgtacgggaacaagtacttgtacggcggcgggatccagtcgctgccggtggggaggacaccgtacgggcggccggtgcgggtggtggagccgggcgtgacgcacatcccacgttaggtgttcgaggacttcctccgtgagaacttcagcaacgagtggcgcaactcctcgtcggcgccggcaccaccgactacaccctcaacctccccggcgaggtgatgtccagacccatggcgggcggagcggccgacggagtggagctgccgcgctcgccggcgacctcctcccccggccacctccgccgcccgtggcctgctgccgccggcgctccgcctgcccctccgctcaccccgcggtctgccgccgccccgccgctccacccgtccctccgctccgccaccactccgccggctgtgaggcgagcgccgtggcgcgagaagcgcccgaagacggcgcgatgaggaagaagagggagagcgtggagcaccgccttgcccctcgcctgatccggccgccgccgctccgccggcctgctccggccgcggctcgccccacccgtcgcttgctccggccgggagagagagaggatttattttgtgtgtagctgacatatgggtcccacgatttttattattttttgagatataaaattgccacctaagcgtcacgtcaatgtcacatgagatgaagaccaagtcaaagaagccatgtaggcgtcacgtcggccaaaaccggactgaccgagggatcttgtttgcccggttttcgtaagttgagggacgggtcatacccggttttgcagttaagagacgaaagtcggactgaccgacaaattgaaggacctaaagtgaacttattccgaaggaaaaacggtcaaagcgcgtgcggctgttgggccgcgcgggcagctaggcgtgcctgggctggtctctgaccgtctgacgcctgttggcggagttcgcgttctgcgcggtccagccgaaaccagcatgccgtactagtcttttataggaaaaagtacatcaaacgtccctcaagttgtcatcgggttacaaaatcgtctcctaaccacacaaaactgttcactttaaatcattcggtggttttggccctggttttatctggcgcgtgggacccacgtgggtcccacatgttcgactgtccacgtcatctctctctcccccctcttctctcccttccgcaagcaccatccacggcggggcttgtgctcctctctctagtgtcccatgggtgattcgaaacggcggtggaggagaagccggaggtgaggcgggtaggcgtccaccggccggaggcgatgaggccggtagcgagtgcacaagaagagggaggaggcggcgcgggagaaggccggggcaccgtgcccgccgagtctacctccgcgcccaccgagtccaccgacgtcgtgtggccccttctcccatgtcgccacgtcgcatgtcgcctgcctcaccccggcgcccagctgggcgacgttgagctccttcacggtgaggaggggaggcattgtgctccctcctttgcgcccctggccggagtagccgccacagtgccacccgtcactggttattggacctcctcctttcccgccttgcctggccggcctcctctgcacccgttggccaccctgcctagagtcccagacgaggagaagagtgataaagaggaggaagagaagagggaaaagagagagacgacgtggacagtctgacatggggggcccacgtgagttccacgctgactcaaccgccacattggacaaaaccagggtcaaaaccaccgaagaatctaaagtgaacggttttataagttgagggatgccatatatctggttttatggttgagggatgattttgtaactcaatgacaagttaagggacctttggtgtactttttcctctttcctatggtcacacggaccgatttatgtaggcctatgcccatttgttagcagaaaaagttcaatgtgcatccctcaaatatgctttgaattttatttgtatccttcaaccgtaaagccaggtatagagattcccttaactactaaaaccaaatcattttatatccctaagtggttttaatggtgattttgttctatgcggcactagtacttttgacttggttttttatgtgacgtgacacccacgtgatgctaacgtgttaaaacaaaactttcatcttgcactggtctgctttaagggcctattcgactgattgttctgctgctggcctgctgcggcgcagccggcaccaatagtgtcgcacgcacacgacgcagccgcagccagcttgtcgaacatgccataagttgctagacatatactaaagaaaaaaaaataaaacttttcacgtgcctatttgtccgaatcaacttacgagaagaaccagaacaagtcaccgggaataaggaggggagctcagcggcaccatcatctttcacaccgcgctcacccccactcctaccagaaccatgcctacccaccgacaacaccatgaactgtgttgccaatgtcgcagatgcatggtcgatggctggtgcgcgaacaatatctggttttacggttaaaaaaaaaagtaaagtggacctttacctccagaggctaaccctgctccagcccagttattgggttgcttcaccaggatgcatggccttctatagtaagctgtttgatcagccttccggctatggtcggagataggcatgtaaaatgatggaatgtagtggtgcctaattaattatgaatcaactgaaaaaactttaaaaaatatattagtatgattatttaaaacaactttcttctagaaaattttacaaaatacatatttttttagtgatttaagaaacatgcacgtaaaaaacgagtgaggagaagtcgagaacatagagaaaagaacacatccaaaataagtatatgatacagtacacccaaaatgagtacataacgcatgctgatgagtcacgggctcacggccaagatataaagaagcaccgctacgtaatattccagaacatttgattttttttttagagagagaatccagaactttgaattgtagcaagtcgtcgtagcacaattttactaccgagtactcgtatttccagaacatttgaattgtagtgaaatcaccggaccattttagcacgcaccacgcagccgcctaaccattttcacggaggtagtagtacgcgtagtaatagtacggaggacctcctcttcggtcttcagaagtcaccctttctagaagaagaagacgatggtaacctgacttctcctgtgatgcgcagcgctgggtcccacacttgggttcctccgcccgccgccatgtccaacgtccgaccggggggcggggagcgcggtcctcccatcccgtcatcaattcaaaaacttgaatgccccttccgatgatgtcgcgctgtgtgtcagccgcctgcagccggcaactaccccacccaccccacgccaccgcggctcgcacgtgccgctgccgtctccccaatccccatcctgtcgtcatctgccgcctcgcgggccagccaatgcaccggctgtgccatggcaggtgggccttggcggaggcgggggctcacatggaaattagtaggagtaccaacgtggtgggggaggtggttagccggcagaggcgtcattgctgctgcgtacgcgcgcggcggcgtgctaccaaccgtgtgcttgacgccactggcagcagagcagaagccggaataaaggcagtgctcccagtgggtttgggttccgccttgcgtgggtggctggattggatgccccactagaccactacacacattctccgatcccaccctttccacatgacgagagctaccgggaaatttgcaaaggaacgggaaggaatcgacgaatcgttaggtgcacttttggtccttcaccaatcactctggcaacataaacaattgcctgaaacaaaacagatccgacattgctccaagctaaccttgctgtttatgactactgtttagtgagtaatagagcttgttaagccaaagtcaagcaaaataaaatagttcgacatattgcacttttcaaataggtaggatcataggaaaaagaaaagaaggcgtaaaaacatggttgttgattttatactaattttcactgttatagtttttctcactataacaggacgtgaaactgataacttaagggggagttgcattttttttcttctcgttattataaattattagatcgtattttctcaacctaaatcacaacttgtgtctatcaacttatttctttgcgtgcatgaaatataagtatagagttttatagatttatgtgtatgtgttatccgttgttaggtttgcgcaggctcaaagaaattgttagatctgccactgatatcactaccaaatactcccatagtatctttaaaattcagtgtcaaattagttatctactcttcctatatatttgaattcagttactcaacatatatacgttgagccacatcatctataaaataaggatagctggatcactactcttaatcacatcggtcggaacacttctatgcataattgcatagaacggattgactatgtaggtataactgtaggtattgatagagcaagtgatccaatacaacctgactatggagaatatggggtactgggtacccacacgacttctatatttgactagagataggaggtgagccaaatccatgtactatgtaatagagtaggacttgatcacaatgttgtcttatgttctataacataatttagaatcccgaccggtattaagtaattgattaggaaactgatactgtgtccggctaggtattactctttgtaacactacccctaacctatataaggtgagcgggaagctctccaaagacataaccagagatagcaagataagtcacaattagattatcatatcaatatatacacccgacagatacaattccgaaataatagtaaggtattacctcttatcgagagagccctgaatttgtcttaattcttgtctctgcatccatcaatcaacttttagatctcatgtgctattctttttaattattgcccatttccataatcgacactgacattgctatcatgctcatcgcaagctcaaacaatgagatgttttcttaataagtacgcgcgtgattgtgattgttaactttcaagatagacatggtttgacaataacatttctttaccaatgacctgattaattagccatttattgtatggttgttggtagttaaggctataaggaatcaacctttgggcgcaaaagagtataaagtatagttttaatattgtggcaccacaccttccacatattttccttcctttaacttgttctataccaatgataatgacggtaaaaagtttcacctcttcgagaagttattgattttatcaaacaaatagaaaatgtatctattaatctataattaaatctctctacttccactgtaaaaaactcaaacttttgaaacaacctgctgtgcaaagctttatattaatacagaaagggaaaaggtaacactgcaaccctgaaaaactataacaagaaaagaacaaaacaaacacacaacccaagagaaggctctagtatcaaatcgaccgctattgagcatgaccgatcgccgctagaactataggggtcgcacacacccttccaaactcaaattccacataggaggtcgttgacggtctcccgattatcatcacgtataaggattggggagaggttgaggacgagagagaccgctattgagcatgaccgatcgccgctagaactatagggggtcgcacatacctctccaaacgcaaattctacacaggaggtcgttgacggtctcccaatcatatcacgtataagcattggggagagggagaggacgagagagaagaagatccactcgtccctcgagccaacctgacgacaacaaccaaaataaggccaaggaccaagctggaggaagggcggcaatgagcgatgaatacttcataggcaacgtcttcaaggaggtcatgacaccaaatggcaccactgtcgcatgtctagatgaatcgggttttcacccagagagtcttaccatgaagagggggttggtagctccacaacactttaaaggggatttcacaacattcagagatgtcatatttgctggctaaaaaaaaagaaatcaatttttaatttttgtatgtatgaatctatatataaaacaacttggtttattttaggatcgaggagatactatactttgaagatggctctttcgagttcatactatttcgaaatattggattttttttctaaaaaagtataacaaaattctgtaaatattgtaaactcttagcactgtattccggaccaaatataagattttccgtaggttgtaaaaacgggcgagacagcgtcaaaatcagcaaacctggacgtgagtcgtgacagagcaaaaaaacaccatcatcattcgtgtcctttccattctctcctgaaatccatccccggccagacgtaacggtcacgcgctattggcaccccaagaagatgcaaagcagcagcacacacagcaataaagcaacgcgcaaatcggtgtagtcaaaactcatctcctctatataaacccactgaaaaaaaaagtcggcacgttttttcccccaatttcatctcgggccaaaaaaaaaaactccagctcgccatagctcgccataggagaggggatttcgaagctgctcttgcttagctgcggctgcgagtgatacggagtagttccggtgatggagcgagcggaggagacgccgagggcgccgtcgacggcgccgtcggcgagggtgtcgatctgggagtcggtgcgcgcgtgcggggtgtgggggaaggaggtggacaaggccgagctgcggaggcaggtcgtcatgccgctgtacgcgcggcgtgcggtcgcggccgccgtgaaggccaaggacgaggccgtcggcgtggcggcggcggcggagaggggcgaggagggggaggtggaggtggaggtggaggcggccgtgacgccggtggtggtgttcgtcaactcgcggagcggcggtaggcacgggcccgagctcaaggtgcggctccacgagctcatcagcgaggagcaggtgatgacatcgccgattggctcggccactcgtgcaaccctgtttccaaattttcacgcttctccccggttgttcctgtgtgggttgttggcttgttgcttgctcttggtatggttttcgcgagttgcgagtcattgattacttttgagattcctttgaaaattcgcagcgatttagacgtatttctgtggaattacactgtcggtgacgtatgaactttcgttctagagtggtactactaccggaaagaggggcaacagcctcagctccgcgtgtgatctgatgaagattttctggctcgaccaatgccatataaggtcaattcaattgctactttatagaaaatggattgctagtagtatcgtactagattttgattttccatctccaaaatgaattttaaatttcctgttgttatcacgtagtactccgtaagtagaatcatgaagttcatcgtgcaattggtactattagcatttatgttgcttattggagtttggacgtgccaacgaaaaagcgtgtgttctgaagagggggtgtagacgtgtggttggggtcttggggataggatgaggagatggagatactaacattgcggttggatgataggtgttgtgaaagcttcagcctccagcagattgtgcatttgtgcctcactttctcgcatggccctggaactttgttgatatggagggatgaagaaaaatattgaagatggtaagcggcaggttggcagggagggaagatcaaaagtttaaacatcagaattttagctccatgcttgcttctgaggtgtaagtggctggagactagttcggcggcctctaatttttggcttgacatgctattccaatagaatacagtcatttgattgtactgttatcttttacggagtttttttttttttgctcaacatggaattactggattttatctgggttcattatgtatcaatgtttggaacctgaggatgtcctatgtaagcattttgcacttacactttgaagattattcgtaactgtttttttaatatgatcaactgatcactttatgtattcacacatgttttcagaattttttccttatccttttgtatgttctgggacacaatattacatactgatgaaactatttccaggtctttgatctctctgtcgtgaagccttctgatttcattaactacgggttgggttgtttggagaaattggccgaacaaggtgacaattgtgcggagaccattcgaaaaaaattgaggattatggtacgtgtgtaatggactttattaggggtactgcatttgttataagtttagagttctctgcacgtttgagtagtcaagcattagcatctgttaaaacttatgaaaggttgttgcttcctttactatcctatctacttataaaataatttatgacagggtgtccttgttctttccttatttactgaatttctcctatgttggctactcattgtcttccaactactttgcataacatccttgcactagttctttctgacaggttgctggtggtgatggcacagttggttgggtacttggctgtctcacagatctttataggttgaaaagagaaccagttccacccacaggtatcatcccacttggtacaggaaatgatcttgccagatcatttggatgggtaaggatccatatatgatgcaattgttctatttatatcctttctttgtaatttacagtgttaactaagcttttgagggaaggtgagcgattcactcatactacaactaataagcatatgaacagggtggctcttttccctttggttg

SEQ ID NO: 23054 - DNA, 1382 bp, Oryza sativa
ccgcctccttttttgtgaatgttctcggatgaacatgttaatacatatggttgtgttaaaggaccaaatctaatattgtgcaggagaatggcactgagttacctgagaaagcttcttgctataaaggagtattctacaactaccttagcattggtaatccttaatcaaccttttttatttgttccttctgtttttttcccatgaactttacatggtgattacatttggtagaagcattaattctcatgaaataaatcctatctctatcctgcctatgctagagatctttaatattcagaccatctggttaataaattggtggttaggtgactaggttctaagtttttgctttagttcccatgtgattagactttcaataaaatgacaaattagtatttcagctggtcgtttgaaattctgagtgacataaataaactaaaacttaagatggtgttcctaattgctgtaatgacataaagttgtaggacatgtagatgtaatgatcgtttaagtttcatcaagaaattaatacttgtttaatgatttttctcttgtgaatcttatggcttcttgcaattatttggaatcttggtcatcgctgagtgctccttattttatattgaacagggatggatgcccaagttgcttatggcttccaccatcttcgtgatgaaaagccatatcttgctcaagggcctgttgcaaataaggtgctgagttgctgacagattttctttatttctgtattgttaattagcttaaaagtccttgcattcagagtgttctagttaaatgtcattatgtcacttgcatattttataagtagcagataagtatgacagctgatagatcacatattcccacacatgcacaaaacttgtgtttatgtaccctcattttacagtaagttccggatgttctattatcctacgaaacctactgtgcatacctgatacatgggttagatgagacaccgcttatataacatatttgaaattggaaaaaagaaataacccagcttcaatgtcttatttgtatgcttttgtgaataatctcagtttctgtaacatagttgttggtatcacagtcatgtttatcttataaatgattcttgtaatgatctttgtttttattctcgtgcagttgatatatgctggttatagctgcacacaggggtggttctgcacaccttgtacagcaagccctcagttaaggtatataaagacagcctgcctttccatggattctaaaatggctccaaagtccgaactttatggtgtcaggcagttttgttttgatccactcaagaatccggaagctgccatgattttaggttaattataggattttttgatcatttgatatattccctccgtttcagg

SEQ ID NO: 23055 - DNA, 1973 bp, Oryza sativa
tttggttaaagtcaaactactctaagtttgactattttgtttagaaaaaagtagtaatatttttaacccaagacaaatatattatgaaaatttatccaattatagattcaatgaaactatgttggtattgtaaatattactacttttttctataaagttagtcaaatttagagtagtttgactttgaccaaagtcaaaacgtcttataacctgaaacggagggagtaccaaacttctaagatatatcatggatctaaacatcgtgatgaatttgttcttagttaacatctgacgacatgaattcaagtttcatgtgtccatcattatccaaaaaaatttcatgtgcccatggcactaatcatgatgcaatagcaatcaactatgtctttagcttttctctccatgttttgatggtttaataaaattacagctatgctatgatattcttcctttgtttgcacacttctctttatctttgtttgaagctgatagaatggtttgttgttgcagggggcttaagaacattttgcgactttacattaaaaaagtcaattgttctgaatgggagcaagttacaatgccttcaaggcaagttgttggtttcttttatatgaaaaaaaaggcttttaaacaattatgatccttaaaagaatcactcaacaattctgtgagatgctgacattttgttaaatctcgactactttaaatacgcagtcgtcttcctccctcccgtgcaacgcgagaatattccgtaaaaacccgaaccagcccaccctgtaaaaaaccaaaccggcccaccccgtattactccagatcctgttgcaataaacgggtatagtactagtgtaagtaataagctagggataatggatgacacttggtaacggacaacgtatgcatatacatgacctgatgccatgctgacccgtgttcacaaatcttcagctgaaaatatgaaaaaaaagtaattaagattaatacaataggttcaaatatgattgtaggattttacatattttcctaaattgtgtgatgccaaaagtttaaagatactactacgttcctatatatgaatgtcttagtggcccttcatccttctgccccaaacattctagtagtgaaaaactctctaaaaataccagaagcatgaaattctgatcctgtattcctgtacatactggctggtgacctggtgtgtcaggcattcagaatgtaatgtgtgctatgatactgttatgaagctcggaagaaatgtcagcatataataaattctggacatacaagttgaattgattatcttcccatttgggagaagtttggaacttaagtagctattgttctcatctttcttttgaatgtgctgtatgaatccggttctgtatttcacagcttgcattcttttcccaactgcagtgttagatccctggtggtcttaaatttatacaactacggcagtggaaggcatccatggggtgatcttaaacctgattaccttgaaaaggttagtagttaatatacatttatcatgttcattgcatatgttctctcaattttagtttgtttatgtagggctttctatgactataaagttgcatcatggatgattgctcagtattctttcaaataattatgtattatttaagaaatcgttctgtcagtttagttgatgcagtagctagaatcagctgcatttaatgggaatgcgcatgcggtatttgcatttatatgcaaattatgtgttcatctttttctttttttggaaacaaaatgatgctttattctattccaaatcccagaaaggttttgtcgaagctcattccgatgatggattgcttgaaatattcggtctgaaagaaggttggcatgcttcattcgttatggctgagctaattaaagcaaagcacattgctcaggtacttacatttgtttggcacactatatttctattgagtattggcaaggcattgctgggc

SEQ ID NO: 23056 - DNA, 11691 bp, Oryza sativa
cttggcctctgaaaccgctgccatgtatcaggctgcagccatcaagtttgaaatgaggggtggccaatggaatcgtgcgtatgttcagatggatggagagccatggaaacaaccactcctacaggagcagtcaaccattatcgagataaacaaagttccttacccttctctgatgataaatggggagcaatgagatcttccccgatttcaatcaggtaatattcctgaaagttcatttttctgctctgtacagcatctcgtttgctgatagctccctactcaccggtcgtcagttttgcatttcataccagggtcgtattctagatcgttagattatgtatagttcgggagcagctgcagggattagccatggccggagcacaatcgggcaaaatgtactgttgtatcatataaattatgttgtgtcgtaggttatttcagtggaaatcaaatataacttgatttgtaatgtatttttaccgtcaaaacaaacaaaaaaaatcaagtggaaaaacacaatgtactgtaaattactcagatttcccctcctgttatgccaatttggaaatcttttgctgctgggcttgaactgaggatatgttcagtttgtcgctattttcaatgccaaaattctggtagggttgtgaattgagtgtcgcccagtgagtggaatgtagtagaacctatttagctggtttaagtactagacttaacatgagtgcatgtatgtactacttcatatcgacaataactcaatattaagatatataagcttagtctctaagatgtgtttagggaaaataagtatgactaacggaaatttatcaatttttttagctggtttaagtactaaacttaacatgagtgcatgtatgccctgcttcttatcgacaataagtcaatattaagatatataagcttagtctctaagatgtgtttagggaaaataagtatgacgaacggaaatttatcaattttttaagtagttaagaggtagtataccgatgaacatgctttcatgtatgtatttgattcccaaaatacatctacattaatcacatattattgttgccatattacactttacaaagccactgccaatgcttcatcggtcaagttgctgaatttctcatctactggtagtagtacagtagtactaggatctatctacaggcgaggagacggttgcacactacttgtacttgacctgtcaatgttcatatcctaccggacacgtctactgggagaacttgccatgtcacatgtacatctaccgcggttgagatgttcccgccaccaccgctgcccgatcggacgagttatcgaactccgccgccgccggagacacggcgccgttcctctcctccgagctcgtggagatgctgaacgggctcatgccgccgacgacttcctccgggatccgtccggcgtcggcgtcggcggcgccggcgacgttgcacgggctctcgtcgccccacctcggcgtccggctcgcggcgtactcgctgccattcctcacggactcgtcgctccacctcctcttgaacgtcggggacttgaggtccttctggtcgtagtgccgcgcccacgcgcgcagccgccgcagcgaccggctcccggagccggagccggagccggaggcggcggcggccgcctccgccgcacggagctcgtcgcgctcgcggtagaagaagacggcgaggtagatgaggagcatggcgctggtgaccacgccggtgatgaggaacagcccaccgaagctccggaagctgaggttcgacgagccgacggcgctgccctggctctggcacgcgccgggctcgccgaaccacttcttctcgatctgcgccatcttctccccctccgccagcgtcaggatcgcccgcgacacgtccgccaccatcggcgaccctctcgggaacacgaacccgaagccgtcggtcttgtagattggtccgaccatggtgtagccgttgcagtactgcgagaggaagagcttgaggtaggggatctcgtcgaagatggcggcgacgccgccgttcgccgagcctttggacagcgcgtcggcgtactggtccaccgtgctgtagctcctcatcctcccctcgaagcccatcttctcgagcaccggcacgatgaaggtcccctcctggaacccgatgtagtcgcctcgcctcaggagctccctcacgtcggtcaccgtcggctgcagcttctggacggtcagcatcgacgtcaggctcgccgtgtagctcgacgtcagtatcagcaccacgaacacccatatgatcaccacgaacctcgacaggttgctctccagcttctcctctaaaaaaacacacaattgaaatcgccactcaaaaatcatgttgctgaattggtagtagaaagtaccccctccatccctaaatatttaacaccgttcacttttttaaacatgttttacttttttaaacatgtttgaccattcgtcttatttaaaaaattaagtaattattaattattttcatatcatttgattcattgttaaatatagtactactactcaagtttttgaataagacaaacgattaaacatgcttaaaaaagttaacggtattaaatatttagagatggagggagtagaaatgagctagagaagaaaaggaggatgcaagcacgtactgtgggagaagacgagggtggagaaggagaagtagaagatgaggccgaactgctgccatggcgtgccgcggaactcctcgttgatgcggtgctcgatcacccagacgacgaagccggtgaagcagaagaaggcgaggctggcgagccagaggctggtggtgagcggctgcaggaagatccacatgctcgtgctcgtctccttctgcaccgccaccaccatcgaccaccccgactccgtgaacggcatcgtgaagtccacctcctccatcctgctcgccgtgatcgtcacatcccccaccaccgcatctgccttctgcaaaccaaacattgcaattcaaccactctgatcgggtaaagtgatttcatacttcgtatatgtcatctaaatagttataatttttttttaaaaaaattggcaatatagattagtattaaatatatcactccacaaacatacagttaaaattcagcttctacaagttgcaacaaaaataacaaatacatatgtgaatgagctacaactattttcaatttaatttgttttttttcaactaacaaaaatcgaatttgatattgcatgtttgtggagtgatatatttcatattcatccatgttatcattttttttaaaaaaaattgctaactatttagataatatgtaaacaacgagtgggtgaaaatccacgtccctctgatcgaacaaatcaaacgaacagattgtctcaagaactcttgaactttggcatgtactgacctgtgacgacacctggtcgacgagcttctcgtaagattccgggctatcggggtaagggtcgtacacgtagctcaccggatagggcataatcttcatgacctcgtcgaacacgtcgatgcagtagccggtgatgtttcgccgcccggtcgccgtgacgttgccgacgtcgacgaactgcgtgaagccccgcttcgtcggcacgctgacacggagcggcagcccgctcggcgacacggtccagcctctcggcgtgtcgcgcggctcgccgggccagaggatttgcctcagcgtcttggcgctgccggcgttcaggtcttgcgtgatcccgaactccggcgtccagaacccgaccgtcctggcgcccttgccgatgatgttcacgacctcgtacgccggcggctggagctgcccgtcgacgagcctgaacttgccggcgagcccgtcgaacgtcgtgctcaggacggcgttgaggagcgccgtgccggtggccgacacgccgagccggtccaggtccgtcagtggcgcgctcgtctgcggtgtctggaacgccgggccggcgacaccggccgactccgccgccgcggcgatcgcccacgccgtgtcgtacgcccagaacctcaggacggtcggctcacggacatcgtcgacggtggggtgatcccggcgtagcctcgccttgaaccgcgccgagaagttcttgacggcgtcggtctcctgcacgtacggccggaggctgaccacgccctgcatcgcgtcgacctcctccggggagaacctgtccatgaacgtggcgacgccgtcggtggccacccagatgtagccgtcggacatcatgccgagcatcttcgcgcggcggaacagcctcccggcgacgttgtggagcatgtgcacgacgaacacgcgcgtcggcatcgccctgaggcggtacagcagcgcgtcgaggcggtcgtcggtggcgtcgacgggcaccgccgtgcggtccatgatcttggcgccggcgccctgcagcgcgtcggcgagcgccgggaggatgccgctcccgtacggcgagtcctcgtacacgacggccgcggcgcgccagcggaaggcgtcgaggacggcggcgacgggcgcggcctggaaggagtcgttgacggcggcgcgcacgaagaacggcgtctgcgcgggggacagcgacggcgaggtggcggagtaggacagcacggggacgcgggagtggctgccgatgtgggcgacgaactcggtcgctgccgagctcggtggcccgatcatggcctgcacctgcacattcttgatcaggtccaccgctgcaacgacagcaacaacaacgagcagccgctcagaaattggagccaagaatttcgcagttgagactatcaattatgaaagttgttgatctgacagttatttcagcttctaatctgacagttcttgagactatcaattgtgaaaagagttttgataccgtttattgcatcattaatcaacttgatgcatatcacttattattgattactggtgcgaagtcaagtcatttctagcattctaatcagttattttttcgaaattagatcatttcattgatatggctttctttttttaaaaaaaaaatcttaaaagatgaacaactctacataacagaagaatcaaaacaaaagcaactattcagtggggttcgatgcttgatttgaacaaattggtatgaacagatattgggcatcaaaacctaaagaaagaacaccaggttcttctttcggtgagacgttccttgacccagatttagaccagatcaggcaaaaatggtactccctccgttctataatataagggattttgagtttttgtttgtattgtttgaccactcgtcttattcaaaaaaattgtgcaaatataaaaaacgaaaagttatgtttatagtactttagataataaagtaagtcaaaataaataaataataattctaaattttttttgaataagacaagtggtcaaatagtgcaagcaaaaactcaaaatctcttatattatgggacggagggagtagcttaggtgcaaagcagagtctggggtgactggactgcaactacgattctattttgttccttcagtcctcctgataatacacagtctacactaatattaccctaccagataattatacactaacacaattggcagtcttgatcatacgatgactcataatattaccctaccagataattctactccagttagaacttaggagtacagtagaagcaatggtacagtgtacactacacagttttcatgaatgctactgctgggtgctgacatgtgatactaatagacaaaagaacgacttgtcacaaactgaaaaggaccttgtatatctatacaaattatggcattttttcagggccattaaaaactgcacttgaccatctctacagtaagtctatggtctatgctggagccaatggcctcactccacacgctttggaaaattcagaactccacgtcgtccaaatccgatcgcgcaaaacgcgcaaatggcacaggtttctcttatccctacactacacatactcacacagacgtctgcatcttcagctaaaatcttctcaatatcgttgtcagctgatcgaagttacttggttagaattatctgcttacattcggaaattagattcagttttacaacttaaggacgtatgcgagagttttaggtcagcaacgaaagggattgacattttaaaacgtcctcttcgcatccttaaattttattaatataatcgtcatgtccttcatggccactgacattttgtgacgagacaatttatttcgaggaagactttatatagaacttgtgaccagctaaacaattcaagcatcaagatttcgtgtacttgacacttgactcaaatcaagcctggtttgaacaccataaaccggaccaaatcgttggtacgtgccatcgtgattttaatgggtagagatgactactagtccaactcgaagtgattaaacaaattagaaggcgacatgcatcatgcatggagctgtagcatattgtagacaagtagcaatggaggtctctaaacaagcatatctcatatagacacgtatctactctgacaaaactgatagtatatactccctccgtttcaaaatatttgacaccgttgactttttagtatgtatttgaccattcgtcttattcaaaaaatttaagtaattatttattattttcatatcatttgattcattgttaactatacactttcatgtacacatatagttttacaaatttcacaaaattttttgaataagacgaacggtcaaacatgtgctaaaaagtcaacggtgtcaaacattttgaaacggagggagtacaattgtacgtgagagttgggggtctatgactagtggattcgaggttagaaatgtcagaacaatataagactgattagctgagatcctaatacagaaatgggattaccaaaaacaattaattaatgtctaatctgtcctcctgttccggcgttgatttgaagacaaggtggcatattctcttgacaacatcagttgggtcagcatcaaggaagacaacaagaccctttgcatgcgagcatatcattgcaaaagcttaataagggttttaattcaacgttttcaagagaaactattatgatagaagggagtatcagcgacagccaaacaaaagaacgtacatatctacataatttcaggagcacagttgacaatacaacatgacaatggcagctatgaagctttttttttttttttgcatcatctgcatcaagatgcttatgcatcatgcgatgtagacatatacgtacgaacaacatctactggctcggattacaaaggactcaaacccacacgcgactatataaaacgaacaaaaaaactccttaaatttgcagatattttcgacgttttgtgcaaattcacccacatatgagcagagcagagcatagctaatcaggccatcagcaattgattctaggaaatcgctgcgaactatccattcaagccgtcaaacaaactaggcgtcgtaataaattagtactagtagtagtctaagcatcattagttagttgattagttcgagcaaggaatgggagaggcggcgagcttaccggcggaagcggcggggaggacgtccccggccgagtccctgaaatggagctccaccctcgtcgccgacccggggttcgcggcgtagtagtcctccaccgccatctggatgccgacccgccgcctcaccccgaccgccgacgtcaagttcaggatcaccccgacccggacgctcgccgccgccgccgccgccgccggcagcgcattccgctgggccgtgaccaccgggctccccgcgagcgccgcaaccaggagcgggaggaggaagaagaagcaggaccgcctcgccatctacacccgcatcacaatatcaggctctcagcaaccaccacttgcactcgcactagcagttgcagatttttctggctctcgccgtgcgctgccgccgcagtccaacgcggcagtagctttatatacggataaaaattttacgggatagtttttttttcaactagtccatccgattaagttctaaatttgacacgaatgctaattattttttcagtaataaacgatatacccgtcgacagcaagacatccatgataactttgtcaatctcaaaatatgtcggtctagtctcaatgagatacctatgatgaattcgttaatataaatatatgcgcatataattattctttcagtggggtagaaaacgtactcgtcgacagcgaggcgttcgtggtgacttcatcaatcttaagatatgtcaccctagcctcgacgaaatgctcgtggtaacttcgtcaatttcaagatatgctgataggggggggggctgtgtttatataggtgagtgtgtgttataagtgctgtgtttgtgtttctaaaaataatacgggacttttccgtcgcttgcattgttgacttgaccttgctgcgctgctcggtgagtgcgtggcaccggaagaaccggtcggaagggtcggtggaaaggaggactcgaggtcgcgggacatatggtctgtacggggaaaactcagcgaccgagctaccgattaccgaagccaatggtgatgttaatcatttctttttcctctttgtctatacttcttaatctttatttggtctgggcttatgtgttggtcagttgactctgattgagaagaagaaaatgactcgagttgcagttaatgcctacaccagatgatatgtgctgtaaactgtaagtaatatgctgcgattttacaatgacgagctgatgggctacaaaacaattggagctagtttaacagttgccatcagtgggtacgcgctttggaacaggtgtatgtttgacaatgtgggcatggattttgagctctcaaacgtgcagaattccagttctctcttccttggctctgttattcttagcttagtctcattgaattattcgcttcatgcgtgcattggttatttgtcaatgtttttttttctcaaaatatttaacttaccctaatataataaataaataatccgtagtaataatccgttccataatctagatcaaacgtgcccttggcttgtgagttccgattacagaagtattggaacaatgctgcctgtaccttgctatgaagaccttgagtccttgattaccttgctctgaagaggatgtcttattgcaaaaagtcaagaaaagcagacagaatcttccgctctaaaatggaacgagcatctgaatattctacacagtctgctgagaagaaaactttttttatggtagttggaaatttcgatctaacagaacattttaatgtgtatacctacccggtcgcttggaaatctaggacatagttctaaaaaaaagaaatctaggacataataatggagcattagatctgtaagcttcctcttaatgtaagcggctaatgcaggtcacaactcagaatgccatctttttagatatgaaatattacattttaatatccggcctctgtatcaattcatgaggcatctccctctaaaatttaattttaaagtgattttacagttttgagaaggtatcaaaagaaaatatatttcctagtgtaaagtttgatatctcttaataacttttaaggatggtaaaatttatgtaaatagtactgtgaaccgagcagtgaacatatttatttttggaaattatgatagtgataaaaaatgatgaaagaacaccaagcaacgtggtaccgaaatgaaaagtggaaccgtggaaaggaacagctgatatttccttcagttgtcaaccacaagttaaacacagtaatgtcaaactttgttccaatgatttttcaattagatctaactcccttgcttctaaagaaagtaattagtttgcctattagggacgcttaccactcacataaacagatactctactagcaattgtaatctcaacgtcttagacgttcatgctactgggaaattaatatatatagttgagttgcaatgtcaatgccattgccacttatgctgggaaatatactattcatagatctacctgtaataaaaagaaacagacttttatgcgcaaagtcagctttggtaggatagtatattttcacggttgttagttgcccattcgtgtaagatcttgaccttgtgagtcacattcaaagcaatcttcatcatttctgactatggcataatcttacaaaaccgtgaatgatcaaacaatgttggtcagtcatcacttgtgtgtacgcgatagaaatgcggtgaatattgaaagaattttctggagagcataccaaaataagacaaagttgaggcatacttcagtctgcctgctgcaatttcccagcatttccttcagagaaagagactactgatctttgaattcatctggcaaaaacagatccgtcattctagtctggtttaagtattctccatgtggtcagtcacatcagtctccaagtaagacaggcgaacaaactgtcgcagttgttgtgcctgcagtagtttccaccgtattcccttcctgtgaattctgatatcgtcatcttgaaatgatctaggccgtgtttagttcaatttcaattttttttaagtatacggacacatatttgaagtattaaacgtaaactaataacaaaaacaaattacagattccgcctgtaaactacgaaacgaatctattaagcctaattaatccgtcattagcaaatgtttactgtagcatcacgttgtcaaatcatggcgtaattaggctcaaaagattcgtctcataatttacatgcaaactgtgcaattgtttttttcgtccacatttaatgcttcatgcatgtgtctaaacatttgatgtgatgtaatttttgaaagtttgaagggaactaaacacagctactcttaggggtggataacgagccagctcggctcgtttgagctcgttgtcttaacgagccaacttggctcggctcgttaatgttaatgagctaaaaggctagctcggcttggctcgcgagctggctcattaggctcgttaacgagttatatctcattaatatcatattaataattacaaatttaacattttattatgtattaacataataataaacactaactaatataatactcactaaatatgaatagttttgatgtaattaaaagactaagcactagtcaagaaatactaagttcatgaagatatgatgatattttatactaacgagccaaacaagaagctcgcgagctaaaatgctagctcaacttgactcattaagagtacaagtttgaatcgatccgagccacgagttttgagctttttgtccacccctagctactttggccttgtttagttcccaaaaacgtcacaacgaatctttgaacatatacatgaagcattaaatatagatacattaaaaaattaattgcacagtttacatggaaatcgcgagacgaatctttttaagcctaattagtccatgattaaccataagtgctacagtaacccacatgtgctagtgacggattaattaggcttaataaattcatctcgcggtttccaggtgagttatgaaattagttttttcattcgtgtccaaaaaccccttccgacatccggtcaaacgtccgatgtgacacctaaaaattttcttttcgcgaactaaacacaccaaactctgaacctagtacaatacctgaaagctaccctggcaggttggcgccaaact

SEQ ID NO: 23057 - DNA, 23435 bp, Oryza sativa
gcctagttccgcttcgggacccaggtccactgaagtacatcttaagaatgtaacgtgtgcctcagactcggtgagaggagcgtagagacctacaagatctacatcttaaaggaaataaactaaggtatgcctcagactcggccttatcctgggtctcgggctcaccttagtccgcacaagtcacacattgctctgagaagaggagtgtggagacgtataaaatctacatcttaagaatgtagcctaaggtatgcctcggaccctgtcttgtcctgggtcccgggctcaccttagtccttgtaagtcctacgtagacgagcgtagagacctacaagatatacatcttaagaagaataagctaaggtttgcctcagacatggccttgacctgggtcctgggcttaccttaatcttcataggtcacactttctacaaggggtggagggtggagacatatgattaagagataaactgaggtatgcctatgtccggcctcgtcctaggacccgggcacaccttactccttgtgagttttacattcctctacaacgaagagtgtcgaaacattatatatatatgtatgtatacatatatgtatgtatgtatacatatatatatatatatatatatatatatatatatatatatatatatatatatgtatgtatgtatgtatgtatatatatgtatgtatgtatgtatgtatgtaaatatcattgtgagctcctcaacggagagtagattcagtaacatatcagtttgcaagaatcccggtggtatctctctctctcactcctccagttttgctatttggtgcagctagtagtttagttgttgtttgtgaaaacccattaactacttttgccgatatccccttttgcttgccttgttagcttgctcacctttgtctgcatgtaggttacgtcccttgattaaggaggaatgtctctgtcgaaacattagatattatctaagatatcttcaagaagcttgtgtaagaatagctaaactatctccataaatgtgcaagggcgcgacctcaggaccagctggggtgttgggcgtgctccacgggctgttgtgaagtagtcctctccgccataaattaaacaggtttatgggggagccccagctagtctggagctgaaaggatgtggacaaggcaccatcactgagtcattagaaccagtggcatcttggacacgtgtcgcacatgccccatgccgcctgatttagccaaacgggtagaaacgaaaccgtggtgctgtttcaggcaggtcgggtctcaccaggcccaccactcgccacatggtgaacatgctggcacgacccagctgtctcggacagaagcccgggtgcttgggggcaatgcaagcttcaaatgtcagtgggttactcgaagactgtgtgagggaaccaacaggcattgacaagacagctgatagacaagacaaggaagtagatttgtagcattgtgagcccatccttgatctataaaaggaaggggacaagctacggatgaagagttggattttttggatcagaacttcttgtctgtagcccaaaaaggcatcccttgttctaagctgatataagaaaaacaacaaaaccaacacgggagtagggtgttacacctccgggtggcttgaacctgtataaactctggtgacttttgcttggcggggagatcaggccccacaaatcttttctctgtttggctttttctatcgtcttgcactgctaaccccctggctgaatcttcaaactcggggaggggtctccactcctcgctgtccgaggagtcgctccatggacacccctctaggtgacatcaaggtcattttaggtttaatatcttgatcacgatttttagcttgctcatgatgtaagtggagcctaaagaacgggtaaacccggactattactgtgatcgattaaaaagaggtacatcatttttttttcaaatagcatgcgcaaaggcaaattaaatagctttaagactatgattgtgtgtagcgcaaatattcattcataagcgggtaaggtagcataggttatggacatatactccctctgtattctaacagaagatgttgacttttgatatgacgtttaaccattagtcatattcaaacaaattatataaatgctatttattttgttgtgacttgttttattattaaagaaactttaaggtatgacttatacttgagcatatttacactaaaattttgaaggtcaaacgttatttcaaaagtcaatggtgtgatttattaagaaaaagaggtagtatataaaaacaaatttggtgggtcgtcatattcatacctctttcccttgatgaattgcttgagttcaccgatgagctcctgtacagtcaacatctccatatttggacaattcaggtacttctccaggccaaatcgatgaagaatgttccacaagattgccttcatattaggattttgaccgattggaacaaaagcattcaaaggaaaacccactttaatcttctcatatactgctgtggcaagggtggttttgcccagaccacccattccaacgacgtatactatctttgtcttcctattggacgtattaagattgttatcacgctcatgttgggacaacatcttaataagctcatcccttggctcatcaatgccaacaagattgtttgccattttctcaatatttaggatgtgaggatcaataggcgtcggacgtgcagggataactatgttatcaactgggtatctgtaatagatgagagtcaagagacaacatcaagagatgacgaatgtaagactacaagaaatagaattcttgagataaatcagctgtaactcgtactatagtcaaagttctcatcattctatgtatgtacctcatgacagatcaatataatgcaatataatacaacatattattaagatttcttccatattactcccttcgtcctaaaataactcaatttttgggtttctgtgttcatcgtttgaccatccgtcttatttgaaaaaattataaaaaaaataaaaagataaatcacgcacgcataaagtattatttatgttttatcatctaacaacaataaaaatgctaatcatagaaaaatttcatataagacggacaatcaaatgttggacacggaaacctagaaattgaattttctttgggacggagagagtaaatattttccatacctgccatgccttgcatcaatctccaggagcttcttttccatttcttggattgcgtccgcgatggtgacgcgatgcttggtcttcttgaacagtttcttcacctgcttgccgaggcgcctgagcacatgtgggtcggctggcttggggccatcgtcgtcgacatgaaccaagaaggcgtcgatgatatcctccatgtcgtaggacgcctccctgaggtcgctcgcccagagcttcaccagctcgttctgctggtcttgtggcacctcgctgaccatgcggaggacggcttgcgctcgccggagctccgccgagagagactcgatcttcccccttatgttcttctgcagattgtacttctccttcagcagctcgcccagcttggggatcaggctactcatcgccccagtgacgaactccatgcttgctagctagctgtggttgacttgacttgagttgagtggatggtattgctgggttggtagctgggtaggagcagaaacaatgcactcctgtatatatatgtgcaactactagcctactagctgacaggttaattaatggacttgtcacaattgggttagagcaagtttaatactccctccttcccaaattaatcatcatactccatatgttccacaaccactttttcaagaaacaattattattattttctaatttggatcatcctaataaatataatacatgtatgcatccaataaatttagagatcttgagagtgaaggatttaaaaaagtaataatttaatggagaagatgtcctagttaattgtatgcatacatgtatgccttatattatggaacataaaaaaaatagttgtgccttatattatggaacggagggagtataattttatgcaccaagaccaatgacaatttaaatcacatcaatcaagacaccatacacacattctcccatactcgattaaaacctcctgccaattacaccctagcatacacatattctcccatactgtattaattgtattccgatgaaatccgtgtccatgcagttatataatgaccaatttgaaaaattttaaattctattagagcaagtttactagtatagcccactactagctccaattcatctatagccgatctaatagccaattcatacaatagttgcttattatactattaatatatggtctcacatgtcatacatccattgcgtcttggagtccgtgttatagctggctacagatctatagcctgctgctcttctctctcatcttttatctcattaaaatatgtttatagctggctaataatttgctgttgtacctattcttacatgattaatttgggaagaagggagtagtatattcaactgttggctccaaatcttctaaagtcaattcatacaatagttatctataaaaatgtactatataattaatgtctgatctcacctgtcatacacacatgtattttggagtctgtgctgcagctggctataaatttataatccgttgctcttatctctcctcttttatcttcttaaaatatgtttatagctggtttataatcttatagctactcttatcggagctcacgccatccattctcgaaaaaacattaaaacgtgtaaatgtttgaattgacaaaatgtgaaataatatttactccatctcactccaaatgcaacgagttctagacctatgcaactagaatgaataaattaagttgcttaaatatcttcatttgtaattgtaaacccatcattataattgatgagccatttatctgagtatagtaccattttgcatacaaaatcctgcctcaggattgaagtgttatatccgatttgtttgtttccattggagcatgaacataacaagagggcgaaaacgcgtgtaattaagtttcaaaacgcgtggtaggcaatactgtgtttatcactcaagttactcaacttgtaagacgccgttggctccacctcgaacgcgtcacatgagaccctctgggtgtgttcgctacagccggatgggaagatgttcgctacagtcggatgggaaggtgcatagtacgtacgaaaaacgaaacggtccaataggacgtaattaattaagcatttgctatttttttaaaaaaataattaatttaattttttaattttttaagcaactttagtatataaatttttttttaaaaaaaatacaccgtttaacaatttgaaaagtgtgcttgtgaaaaacgagagagagggcttaggaaaaggggcatccgaagacagccacacgttgattaagggggtgtttggtaagtccctcgctcctaaccaccccctaattgaagccacgttgggaagctatttttcttctcagcagccagcacgctcaccttccggaaccggttggtgcggcgaactgtgaaaccgaccgtggtccaggtgcattaaagtggacaatggtaagctcttaaaaatcagcatgtgcatcgtcaagtctgttgaaattccacaatacatcttttacaatttaaacgagccgtatcctaaaattgctttgtaggagatctctggattttgaggactagagcggtcattttaaagtgtaccagagcttcttgcaggatttgttctatctccgtttgacgacaatattcgtgacttgtgcaaatttcaagctacctgtgcacgacaaatgtatcagtgttgtaacaatatagcgttcgattccaactgttaccttatgtggttgttaggattgttgtatttgttaaccatggtttagctatgtttgaatagaaaaaattttagttgttattcggctaagatagggttagtgaagatattgttagagtttgtatcgaatatatgtacaaagtcggttacaatttagaacttggacttacagtttagtggctgcactagaggacgtacggatgcgtggaggctgaggaggtcacgataggtggctgtgtgcacgtttgcgtgtcgaagctaaagaccacaaatgactctgttttgggctggagttacgcagcagatcgactcgggccagcggatagactcggatcacgaatcctacttggctacgcatggaagaagctgttgaatagtcccacattggttatgaaagagtaagagacctaacatataagtgggagagcccctcacctcaatggctagcttttggggtgggaaaaaccctttatgattctacaattggtaccagagcctaactagttcaatatctctgacccgaggaacatagtgtgtgaaggcctgatggaccgtaggtgcttacggggcacgtttacctgagggaccgtgtggggaaacggtgaaggggcggtgaaggattgagggacaccaatatgtgaagggggagattgttgaatagtcccatattagttgtggaagggcaagagacctaacatataagtgggggagccactcacctcaatggctatcttttagggtgggaaaggccatttacgatcctacacaagccaagccggtgatctactcgtacacggaaggggaacggagagtttttacgatttgggcagaggtgatttgctagtgtcgagctccggcggtgtaataggtattaggacttggagttgtaataggtattaggactagagtatgagtcagactctatcctaggatctctcttaaatagaggggtgtgcctgttataaccgcatagcgatatagcatagtgagagggagcggctgttggtggcgactggctgtgattcgttctaactctaatatgttgtatatgttggatcggagaagagcgcccgtaatcagtgtcccggagatgttggttacggctgaactctgtaacgccccgacatttgttagccataaatgcagctaactaacaccggggtgttatgcattacatgtgatatagtaccagtcccaggatacactagctgatacacacagaataaatgtgtaatcaaagtaactattttattacatcactgggtagtagtccttacataagttaccatcatggacaggcccatagatgaacaacacaacattacagaaaaaccataaaaggcgacgtcgcagaagcgaacagcgcggagaactaagcgactaagcaactacgcactaggcaaagaacctaggcaactaacttattccacgggcgaggcttggggctaggcacgaaacatctagaagtcttcatactcagcttgctcctggagatactcctcggcggttgggtcgacgtcttcgtcttcaaactctatagattattataaggggcaagggtgagtacttaacgtactcagcaagtcaggggaaagaatgacatgttgatttaaacaaggaagctagtgttttatttgcgaaagctgcctttttggcaaagtgatttatttcacaaaactcctagtgagtgagtcaaattttagttgtcgggaggaggctcacgcctcgacccattccacaagttgctttgcaacagcttgtcatgattaacgaacaacaattaatttgtctcctctattagcttcttctcacaacaacacatagtccacacagttatcttagcacaacaacgccatcatggtcctagcaacacatcggtgtcggacgacaccccaggtcacacagacccgttcctaaccacaaaggttagtcgtctgccacacaggcgaactctagaaacgttactcttctgaacaatcacttttccacaaacatttgcaaacaaaactacgctatgagaaacaccttacacttgcccatgactgtgggcacgactgttcgaacagttcattaatctctgcagaggttgcacgctttacccacacgacacgaaacttacaccgtttacccgtcggtaacggaagttcgtgataagacctttccaaagctaacccatgaaaatcgcatgccacctagttgggctaagatccatagccgaatatcgggcaaagacagccgtcatccactcaagaaataccgaggatgtctcctactgatatcacacgccacaatagaggcaaaaagacacccatgatgggcaaaaatgtgtaaaacttcgtctgctcatcctcggcattccacaaccattggcataccaactcccatgtgataacaatttacttagcaagaggcaacccataaatatccatgtggtctcactgtaatgtgtttggatggatttcccaaaggaatcggtccttaacgacaatacgtagccaaaccacaaaggcatgactccgcatcatcaccactttcacaacacattttatttcacaaactcctcggtacaacgtacttgatttttaaacatgtaatttggaataacccaagtttcccacacggcaacaacgtaagcatggctaagtgaaactacctcggtaatcgtataacaataccggcgcaaatatttgtggagctatcaaaggtatggaaacatcaacctatgaaatataagtgcgactactaggttggtccgtcggttgtataaacaatccgaggcctaaacatgttaatcgtgtatactaagtaatgcacttttcaaacaacatatctttacaaatataggggcaatttgatcaaagaggcttgccttgcacaggatgcgggtcttctccctcgaaagcggcgtccggagcttcctcgaactcgggctctaaacgcgaaaagcgaaactaattaacaaaaggcaataaaacaagctcaaaccagagaaacaatagtgccactgtgtagatctcatttttagaaaaatttaggaacttgaacgggtcaatcggagttacagttgattttctacagattttcaaagaataaaggattttctagaatatttggaaattgacttattaacggaaaggaatattccgttggaatattccgctaacttggacggcaagggtggggcccacctgtcagcgacttgatggagggagagaggcgcgggcccgggctgtcagtgttgagatggaggaaaaaggacgtggggccggcttgtcagtggctggagggggaagtcttcttcctcctctcgctgcttgctcggctcggcctgggacggcgacgctccgcgggaccgcggtggctcagcgtctggcggccgaggggagcggcggcggcacttgaaggcgaggcgcggtaactccaggcggcggcacagagagaagaacgagagggagtgagagaggagagagatggtgatggtgtggaggacaacgggagagttcgagctccttttataggcgggcgacgcggtgtcgagctggcggtctagacgcggagctttggggtagctggctagcgactagggcgggattccggggtggagaggatggcgacgcgacggagttgcgtcacgcaccggtggccactcgatggcgaaacgacggcgacgcgacacgaagtgacgcgtggagagcgggattggcggcgagacgtgggtgacgcgcagccgacggcggctacggccgggatttggggcggtagggctggagagggatgatgcgagcgacgctggcgacgcgacgcgagagagagggagggatgctgctcggcggtttcatggaaggaggcgagcgacaagatgaagcgagagagaggtgaggcttagcggctaagctccttcctctcgaagcaagcgaacggataagcaaaggcgatcggataaggggatgactcggcctagggttaggggtgacgaagggtgaggtggcggccgttatccgttggtgtcgatgcgacgggcgatgggatggtgacgggacaatggatgacgcgaggccgtgtctcccggagagaaaccggagcgtgggagtgggttttgcggcttggcgcgacccgggcttgacgcggcacagcctcggcttggtgcggggtggcgcgacgtggccctggcacgatgcggggcgcacgggagggtggcttggtgcaatgcggctcagacacgaggcgaaagtggtgcgacgctgggtgagacatttcgtcgtaacatcttgcgtgcgtgagctggctggcctgaggaggaacatgatgaatagtggctgggctgggttgggctggcctggtcggggaggtgaagagaggagggagtggaggggagttgggctggggagagagaagggaaggaggcccaaaatgaacagtgaactttcacctttttccagagatttgtagagttgaattttgaagatatttttggagggatttgaatttgaattttgacctagggtttcatggaatttgaaatgaattctaggagaggatttgagatctctattggcacaaaaacaaataagaaccaaattaactccaatttttaaatgacaaacttttaaataaatccaaacaaaattaagtgtgctacaaactccgttaccaaatatcgtgtctcggtgtcgacatcatgtttggatctcctatggcgtttcttccccgtttacactggtggagaaaccctttgtagtcccggttcgtaacccccctttagtcccggtttccaaaccgggagtaccaatccgggactaaagatcgctatctttagtcccgggtcaaatcaccgggagtaaagatcgatctttagtcccggttggtgttaccaaccaggactaaagatcgatctgaccttttttttttgcatggccctgttgctgcatggtttatatatatatatatataaaccatgcatatatatgtttcaatacatatatatgcatacatatatatatatatatatgtatatatatatatatattatattatattatatgtatatacatgcataatatatatgtatttatacatatatgttatgcaaatgcatatgtatatagatatatatatgaccaaaatatatttacattatagaaaatgtgtacacatgcatatagaaacatatgtagtcatgtattaattacaatccattatatgtcctagctagctacgatttcgacgtagtagtactcgctgctagctcagaagctaaggaccggtgaattgtgtttccgtcgtagtagaattcacccttgggatcaaggatttcttcgttgatgaatcccatgagttgttcttgaaccgccgcgataaattccttgtgtgtggtcaggttatccctcatgcgaataaactatatgaatgtatgaaattgattagtaattaaacaagaaatcgctacgtaatgaaattttgaatttatttgtacgtacatcgagctctcttgtggtgatgatttggtctgcaaggcagtggcaatactcgcacacgtaatagccgcacaagttagttccctgcttttgctttgcgcactacaaataaatgacaaacaacgagagatctaattaatatacacttgtatgtatttgaatcggagaaatataaatgcagaggatgtgtactcacaggaaatttgaacttccgcctaagtctttctctccatttgccgcagaccaaatgacggaaccgataccaagccctacatggagtttaaagctatgattcgtagtagcaattaacataacaagattttcttaattaacaaaggaacttatgacggtacctgtctataagttcgaaaaccttgtcaaacatagactcttttttatccattgagtcatatacgttgacggtgcaggcctccaggtcgaagagtaaaagcacccagtggaatctgcaatgtgcgtgggatgcattacatatgaaacacttagcaagttcgtacgggaatgaaatttggtatgtaggaagacagtaaaattaaactaactctgtgttgtatggcaacagtatgaacgtcttgtaatgctgcgccttcaggagatggacgagattgtcctctgtttcttgtggatattggtcgagcattgcgacgtttactttccgagggtcgatgaatccagtatcgaaaaccctccgccgtcgggccctttgaatctccattctacaacgataaaagggagtatattattttctatagtctacttatatacaaggacctaattaattaaaggagacgtatagtaagaaatctaactgaacgatatacttacaaaatccagcaactcataatagagacgtcgagggcgtccagctggtatagttcgtagattcccctgaaattgatccagagaatgtcatctccttgcaagaagtccgtgtccctgatcctcgctccgatcatctctctaccggtggcgctcatctccatgtacagctgatggaacttgtacatttgtgtgggtagggactgcagcagctcaggcttgacaagcggtttaccgagttcgtacatgtatttcacttccaccttttcgattggtgcgactcctagcaattgatccgtagttagaccggtgtcagtaataaattgttctatcgtcatttctttaccggtcaccaacggctcgatctcctggtttggttgctctccaagctgagggactggtttggactttccagaaggctttcttcagcgttcgctcatagtccgatagcttgatggcctccttgacagatgcagacatacccctgaagaagttcctgacactggggtctataggaatcttcttttctggacttcgaggcttgaattgtctcttgacttctgatgcaacgtaagcgtcaagctcctcttgtgtgcaatcgtaccccgggtccttgttcttggcggcgtcaactttcgccttcttcgttgcccttgtgtgggcaggcggtggagctggggggcccttgactttgaaggtgctggaagaggagcttgcgggggagtaggtgtaggagcacgaggaggagtcggtgcaggatcctgaggaggagtcgatgctggagcctgaggtggagatggtgctggcggagcatgaggaggagacggtgcaggatcctgaggaggagatggcggagccggaggagatggtgcacgagacgccgcttgtcgcccagggaggatgatgtaccgcctgcgccatagaataatggcatggcatgtgtctcgtagatgcgtctcaccgtctcctctagggtaatccagctcgaggtcctcgtacgcgccttcgaccaactcaacttcgaccttcgagtatcctgctggaatcggcctgcagtggtaagtacctgaagggtccgttgggatggccatgcccgacgccaccttcatgttgtgagagattatttattagtaatcaacatatataagcaggaactagcggaatggctaaatcttacctttattgataagttcttgaaaggaatatgcagctcacatggtgtccgctgagtgatgtcatcaacgggacaggtcgattcgtcctgtgtttgcatggcgtccatgctctgtgatcctacctgccccgttgaggcgcagctgctacggtttcctgacgggctcaccattgcaggaggaatggtcggctggggatcatgggaccgatgtgcggccatgcgttcatcaaccttccttgccacctcctcttgcatgttgagttcgtagctcgatacccggaactctaggtctgcaatcttcgcctcggtatctctcttgctcctcatccgactcctgtacgtgtggatgtcctccttgaaaccaatcttccaaggaatcacccctttccctcgtgttcgtcctggatgctctggagtttgcagggcgagtgtcagctcgtccctatctctgtctggtcggaacgtgccctgagaggaggcttccactgcatctgttagtcgtcgcgcagcctctcgtatctgatcgccgaagaccagtgagccatcagctgggttgagcgttccactgtgagcatagtaccagaacttctatcgttccggccaattggctgttgccggttcgatacccctctcaatcaagctagcctccatctgctcccacttcggcatcgcgacgctatagcctcctgaccccaagtggtgatggtacttcttcttggcggcattttctttgtttctttccatcatcgcctgcccttgttcacctgtcttatatgcaacgaactcatcccagtgatcccttagctttgggaatgtgtcgaagttcggtgtctgccccttcagtatatacttctggtacagatctcccttgaagctctgaaactgttctgccattttcttcagagtccaccttttcactttgtcctctgtacccgcaggaagggtgaatgtctcgagcattgtggtccacagcatctctttctccgaatctgggacaaagctctcatgatctccgcgtgcccttgttcttcgccagtacaccgtactgacaggcacgttatcccgcacaacccaaccgctgtgacgtacatagttcttggcggcttcggccggggcactaggacgtccatcttcttccacttccgttatgatgtgccgaccctcaagcttcttcgctgcacctcgttgcccgcgtgccctcttctgtccaacggagggttgactaccactagcctcctcctcctggttcccctccacatccctttccacgtgcccctgctggttcccctccgcatccctctccacgttcccttcctcgttcaagtactggtttggatcctcgttcccctcttcttcattccagtactggctgcttccctccgcgattgtatcgtacaatatctgttcctcatcgcggtcagccatctgttgatacaagaaacatctgctaagtcacgagacatttatgttttaacaatctaagtcatgtatgctaagtgtaaatgtcatacattagaaccctacacaaccttacgtgctaagtctaattacaaatcgtgatataagctaagtctaggtgacgtatattatacaaccctagctagtaaataattatatactaagtctaattacaaataaaataatcttatattaaaactcaaataatattacatgctaagactaaaatagtcatgtatatgctaagtgtttcgtgcgtatatgctaagtctaattaagactacaatagtcaattgctacttgtcgcaccaattccgtagtcaataattacatactaagtctaattacaaataaagtaatcttatattaaaactcaaataatattacatgctaagactaaaatagtcatgtatgctaagtgtttcgtgcgtatatgctaagtctaattaagactacaatagtcaattgctaggagtcgcaccaattccgtagtcaataatatcatactaagtctaatttgcaataaaataatcttatattaaaactcaaataatattagaacactacacattcttatatgataagtctaattacaggtctaataatcttaattaattgcattacaaatataacaatcatttatattattacgtcacttgcctgctccaattccttctagggctagctcttccactcaggcttgacggacgactccgacaacatgtcttttctgcaagatacaaaaagatgtattacgataaatacgaagtaacatatatatatatatatatatatatatatatatatatatatatatatattgcatttcacgttcacgttcgttcgctcgttctcattcatgttcgttcgcttgttctcattcacgttcgttccctcgttctcgcttgtcttcgttcgatcgttctcgttctcgctctcgttcgttcgatcgttctcgttctcgttcacgttctcgcggcaacgtacgttgacgtgttcgttctcgctctcgttcgttcgatcgttctcgttctcgttcacgttctcgcggcaacgtacgttgacgtgttcgttctcgctctcgttcgttcgatcgttctcgttctcgttcgttaacggcggtgtggcggcatcggggcggcggttggcgcggcggcgtggcggcggcggcggcggcggcggcgtggcgacggcggcggcggcgtggcgttgcggggccgtggcggtggcggcgtggcgtggcggcggcggcattgcgcgcgtggcggcgaaggcggcggcggcgtggcgttggcatgcggcggcggcgttgcgcggcggtgaaggcggcggcgtggcgcgtcgtcgtcgtggcgcggcgtctcgtggcgggcggcgcaacggagagagatcgagatcggagagattgagatgcatgaagggagatctggcggcggcggctctcaccccagagatgcggcggcagcggaggaggcggaggcggcggcgaggacgacgagctcgagacgacggcgagatacggcggcgtcggcgcggggatttgccctaggcagtggcggcgaaggagagaggccgagagagatcgatcggccgaaaatgtctaagtgttggtgaagaagacgagggcgcaccgggaatatatatacccccggatctttactcccggttgttgagaacaaccgggagtaaatatcttttcccgctatttcgaaattctttttaaacccggttagggttaagaaccgggactaaagattatagcactgcatatgattttcgcttacatatgtgtttataaaatagaagttaatgcattaacattatttaaagtacaaagattaatgacaattacttcgaaaaattatttttgtctgtgataaattaagtggataaatcgtaataagcaaatataattaataaaaattccaataatcatatatacttagcatatatatgaatgatattattatattggtaaaaactctaattaagatatgtatgtacatactgcatgatttaaaattaataaaaattgtaatcatcatatgtacttagcgtaggaattatattaaattaaatgctaaaaactctaattaacatatgtaaatgccacatgcatgatttaaaccttttaaaaattcgaatagtcatatataagtagcatatgaaagatagtaaattaaattgtgaaaaactctaatatatgaatgatagttttaaaaatatattaaatttaatacttttaaaaattctccagtcaattataattagcatatgaatgatagtaaattaaatgttaaaaactctaattaacatatgaaattgccacttgcgtgatttaaaacttttaaaaatcctctagtcaattataattagcatatgaatgctagtaaattaaatgttaaaaactctaattaacatacatatgaaattgccacctgtgtgatttaaaacttttaaaaattgtaagtatcacatataactagcatatacatgatttaaacttgttgaaacctctaataatcgtgcgtaattaacatatgccatacatcaattgatttatatggataatcaatacatccaaaatagtttacatcgtgtacacaataattacggcacgtactttctcctcactattgttccctccttgtgatcgctgcgtgagtaaggggtgtcttcatttgataggaggatgctagggtcaatcgtcaccgtgaaagggggttgcccatccaactgatcgtaatcctcgtcagtcttgtcctcaactccgacgatttttcttttgcctgggagaaccacttgacgcttaggctcatcaggccctctgcccttctttcctttgctagacatgtccttcacgaaaaagacttgcgttacatcattggcaaggacaaaaagttcgtccgagtatccaaccttgttaaggtcaacagttgtcatcccaatgtcatcaatcattacgccttcaccagtcaacctaacccattggcaccggaacagaggaaccttgagaggaccatagtcaagttcccatatgtcctcgatggcaccgtaatacgtggcagttgttccatcgtgtcccatggcatcgacacgaacaacgctgttttggttcgtgctcttcatgtcttgggctctcgtgtagaatgtgtacccattgatctcatatccctggaatgtcgcgatcgacccagacggtcccctcgccaggaaggcaagttgttggttgatcgactcgttacccatgagatgttgtcgtagccacgcggggaaagtatcaatgtgatgccgtgtaatccatgcatcggacttaccgatgttcctggcgcgaactagagccaagtgctcctcgatgtaaggagctaccaatgaagagtgttgcagaacagggaaatgggctttacggaataaattgttgtctaccgtcgttattgctttccttccgagagttccctttccccgtagtctcccttcatggcgtgattcaggtaccccgattgggcgaaggtcttcgataaattctacgcaaaattcgatgacctcctctgttccataacccttggcgatgctagcctctggacgagcacggttacgaacatacttcttcagaacgcccatgtacctctcgaaaggaaacatgttgtgtaggtacataggcccgagaatacggatctctttcacaaggtgacaaagcagatgcgtcattatattgaaaaatgaaggtggaaatatcaactcaaaactaacgagacattgcaccacttcattctgaagggcttctaatctatccggatcgatgaccttctgcgaaattgcgttcatgaatgcacatagctttgttattgttgcccggacattgtctggaaggataccccttattacaactggtagcagttgtgtcatcaacacgtgacagtcatgagactttaggtttgtgaacttcttctcctttgtgcttattattcgcttgatattcgtggagtatccagacggtacctttatgctctccaagcattcaaacatactttccttctctgccttgctaagagtgtagctggctggactcaagtaatagcttcctttctcctttggttccgggtgaaggttgccgcgttgttccatatgcttcagatcattacgtgcttccagtgtatctttcgactttccgtatacacctaggaagccaagaaggtttacgcaaaggttcttagtgaggtgcatcacgtcgattgcgtggcgtacgtccaagaattcccaatatggtaactcccaaaatatagagttctttttccacatcgccgcgtgaccatcttcgctctctatatgctggcttccaggcccctttccgaacactactttaagatctttaaccatagcaaacactgttttcccgctgcgatgtttaggcttcgtacggtggtcggccttatgttcgaagtgcttgcctttcttccgtaccgggtggtttgctgcaaggaatcgacgatgacccatgtatacaaccttcctacagtgcttaagatacgtactttctgtttcatccatacagtgagtgcaagccttgtaccccttgttggactgtccggataggttgctaagtgcaggccaatcgttgatggttacgaacagcagcgctcgtaggttaaactcctcctgttggtcctcgtcccacacggggacaccttccttcttccacaactgtttaagatcttcgaccagtggtcttaggtacacgtcaatgtcgttaccaggttgcttggggccttgaataataatcggcatcattatgtacttcctcttcatgcatagccaggggggaggttgtagatacacatcgtaacgggccaagtgctatggccgctgctcatctctccaaaaggattcatgccatccgtactcaaaccaaaccgtatgtttcgtgcgtcctttccaaattctttaaattttctgtcgatgtttcgccactgcgaaccatcggcggggtgtctcagcatcccgtcctgttgatgctcttcagcgtgccatcgcaacattctagcattccccttgttcctgaacaaacgccttagccgtggtattatagggaaataccatatcaccttagcaggaattctcttctttgttagctgcccgtcaacttctcctggatcgtcccgtctaatcttgtatcgtagtgctttgcaaacagggcatgcttctaggttctcatactcctcaccgcgatataggatacaatcgttcggacatgcgtgaatcttatgaacttccagtcctaacgggcagactatcttcttagcctcgtacgttgtctcgggcaatttgtttccccccggaagaatgttcttgacgagtttcaataaatcgccaaatgccttgtcactaaccctattttttgccttccattgcaacaactccagagtggtatccaactttttatgcccctgctcgcaacctgggtacaacgaagttctgtggtcctccaacatcttgtccaatttatggacctccttttcactttcgcagtcctccctggcgtcctgcaacatctgaccaagatcatccgcaacgtcgttaccatcagcagctatttcctcctcgcccgtttgatttccttcaaatccaacatactgagcaaagtccggaatattgtcgtcttccacttcatcttcttccatttcaacaccttgctctctatgggatgtccaacaattatagcttggcatgaaccccgactcaaacaagtggaaatgaatagtcctggatgcagaatactccttctgattcttacacttattgcatggacaacaaataaaacccctttgcctgttagcttcggccactctcaaaaaatagtgcacgccgtcaataaactctttggaccgccggtcagcgtacatccattgccgatccatctacatgagtcaaaaaaaccgtacacaaataattattcttacaataatgacagtcatacaataattataagatatctttattcatacaaaaatcataaaatattacaccaaataattcttaaaaactatttgtaaagttttaaactaattttaatgtgttttacttcttttaattttcattttagtttgttttctattatttaagattaactttcactagagttttccttctcaactattttataaaaccttgtttagcaaatgaactaaatttctatatattctttcttccccacacacattttctctctcatcaacttacaactaaattttggagacaaaaaaagtgtgcaaaacataggtgcaaatgtagtatgacaaaaaaaacattggaggatgaagttgcaaaccttttaggcacctccgatttgtatgtaatcaccaaaataaattcaatagaaattttggcatgacctcccctcttttttgaaaaaattttgaagcttgctcgggcagctggaggaggaaaaagacatatatatataggggtgggactttagtcccggttggtagcaccaaccgggactaaagatcatctttagccccggtttttattgcatccgggactattgtggaaatcggccgaccgacgaaagatggtttctccaccagtgttagctatcgatgtctatttcggggctggttttataacagatgttgctcacttgcttgtatgaagcatctggtactgttgacatgtttcttggattgaggctattagttacatggtgtacgaatccatgcacctcctgaatcccagcatgttcttgtttttgtctcttttttgtgtttgctcggtcgaattcatgagctaatctatacacaatttatcgaaacttggcaatataccgagtgaaagggtaaccagtacacattagtggtcgttcttgcattcatacaagctgaaggttttcacgatccattttacattcagaaagctgaagtgaaagcaatgctttctctgaatctttcagagaggcactttgtttagttgggcccgaacttgaatgcacagtacttgatgaatcccatatgtagctcggatgcaataatgcattatattgccatctcaatgtttatttagtatttttataaagtaggtatataacatcgtaaaatactaagataattaattaatggtagtatgtatagaacccgataatttttaattcggaccctccacagtactgtacatgtagacatgtgagcctgaaggtatgtgggcccatatacagtaatgtagaggacctcactcgataatttttgttcgggttcgtgtggatgccgcggcatctatccccgtgggaaccggtagaggcggtacaaccgtaggtcgtcgtcggggcgagtggtcgccgtcgtgccgccggcgatgcggagctcctccatagcccagccttcgacgtcgcacccgacggaccaatcgttgacgaaggcccatctcctactccggccgatcttggcgccgtccgccgtggcgatgatcgattccggttgattgatcatcactttccagtagcctccggtgatgtttctcggccgtgggatcttgcgtcccgggctgaacacgtacacgctgccgtcttccgccgcattgctcttcaaattatctaaagaaaaaaaatcatacaagcgattcatcagagatcgatcgatcatggatgcgtacgtcgtcgtcagtgaagaagaagaagagttggggtttcaaaaaaaaaagaagaagaagaagaagaagaagagttagaattagaatgaattaaggtgcatgagtgagagtatacagtagaggtgggaggggtggtcgccggcggtgaagacgttggcgtcgtggatggtgaacggcagcggcggcagtggctgcccctgccgcttctggtcgagggccgccacgagcagctgccgtatcgcggcgtaggccatggatttgggatgatgatgatgatgatgatgcaggcagaggcggagatgaatctgggtcgggcgcccgatcaggaggaggcaaaatcggacgctgatgtcagcatgacgtaaacgttcgatttacgtgcaaaattactttaaactgatttatctcttaaattacttatccaaatcatgatccgattgcaccattaaattcattgcaattaaatcttcaaaacaagaccacacatggatatattccgatgaaatttattttttagcttattattgaattatttttaaatgttgcacgatgttccaccagatatatcggaattgtttcgctaagtagatcgaaaatgtttcactcgtttaaatcgggtgttgtttcatcttatataaaaacaatgtttcagcaaatagtgaatgaatgtttcagttcagtgcaatattatatctatacatagtgaaacattgtgagtacattaagtgaaacatttttggtggaacaaaaaataaaccaaattcccttaatagagagtttcccaaatatgtgggtttttttttgcaaaagagtatttttaattcactgagatctataaatagtgaaacattataaatacattagatgaaacatcttttgtgaaaaaaagggaggaagaaataggtgggtccaaatagacacgtggggggagagggcg

SEQ ID NO: 23058 - DNA, 7257 bp, Oryza sativa
tgcctccccccgcgccgggcgaccagccaacagcattatcgggcagaggcagacagattaatcgccgatatattggttctttgatttttggtacgagtgtttgtaatataatcatgtttgagatcgtgttcttgtacgcgttcgtgccggttcactcttgtacgtgttcgtgtcagagtgaaccgagaattctgttcggttaaactatcagcgtctcggttttggatcggcacccaaaatcagccttatacacttcgttgccaaaatcaaccttattaaattataccaaaatttgacatgttttgatgttttcgaattttagtggttttggttacatttggtttaaagccttatcaatttagttgagtttttatgggaggaaatttccgaaattaccaatctttagtagtctagtaacggtaggattatgctcaatttgttaccctaaccaaatttactaattccagatacttgataataaggttgaaagtgagaaataaagtggtcatgtcctagggattgtgaagtttcgtccgaaagagcatgcatagcccatattatttgtcctggaacgggaatatggcatccatgatgcccatacaagttgggctggaactcccgtgggctgtctaagtgacacgcggggagccactggctgtacttttgacttgtgccacctgcaacaactcggatgattcccttggtcgttctgagatccatccatctgtaatagtatgtgatatatgcggaagaaagaagagtgcagcgcacaccttgctgttacgttcatccatatcaacgtaagtaatatcacaaatattactttactcgctaatacaaatatttgacaagtgaaatgacatcaatagatttgtgtgaaaaatattttgatgtagttatactttctacttgttttttatgaatacttgatagaaaatgaatgataaaatatgcaggacagcagattgtgtcaatgactctaaatggcaactaaacagaatggttgcattttttttccaaaatgtttttctcgagagcagaagtgcaaattgaaaggggattttagctacactggtcacaaatagaacttatcagagctaaatgaaatatctctggtattgtgaaacctgaaaaattgagtgggagaaacttttgacttttgaaacatcacacgtttactaatacacggacaatatgcatgatgaaatggcacaacaacctaaacgaattcgattcactgacattgtactacaacaaagggaaaggacataattaacattagctaactttgcaccggcatattcagacacttacacacttgtgcaattaaacaatagtggagctacaactaaagttgctattcggtggccggtgggacaactatatcaccttgtggagccgatggagctacatgctggtcttgtttctccttgcgagactctgccccttgggaggtgtcagttggagcaacaccatgtcctccttcctccttgagattgtgaggatttttcgagccttgcgaatcggatggaccgatgacaccatcttccctttcatcctcaggttcctctgttggcaagtgaaacagttgcctcctctggagcatctctgggaacgtctccatgccggcatgtgccagcaggagccacacatgggagaggtactcaacacctgatccaaggctcttggcatgcaagtatcctcggcatctaccagcggagaagcatagcatctctacccacacatctattatgacatcccacatcttcttgtaaccccgagccaataacaaatctcgggcaagccggaaagcatcatgaatgaaacaattccttttatgctccaccttctcaattacttttagcgtaagtttttcttcatcatccacaggtagatttttctccttgtgtagaatggagtcaagttcgcggtacgcagttgtgaagagattacttctgctgccagccatcagcatctcaggattagcgaacaacagatgcattatgtagttggagattgctcttgacatcactctgaaagaagggccattgggtggaccaaaagattcatgatacttgtgaaagcagaagtccgtagccacatgccatataaggacaatctcatcgaatggtttctctaagctccagcctagaagccaggtgcattttgctcactcaagtgcccactgtcccatgttgtcattgaaactcctgtagctctcggcgtttctatgtattttgtccatccatctttcacataattgtgaaccaaatttgtaatatcggtggacatatcgcatagattcatgcaccagtattggtctagcaaacccttgcattgtaagcatcctgcgatgcttatcaaccatgcgtgccttttgtttcgggtgaagaatcctacgaggctttgttgtgccatagtgttaggcaagacatcgagatatttccatactacagccatggaaatgatctctagtaaaagggtgccatacgccattagaaatgtcacaatgacatcattatggctataggcttgtttatggctgctgtggaggagaccaacggctgggatcaccagtagtatagctagcatccatgttgataaccaacaatagcggtttgcgtcaggttgttcgctatcaatcttatttctggtgtatagaatatcaaagatgctggagagcccactatttattgttttacaaacttgtgtgagatcaagggtaaagaagtattttaggttatcaaggcgatcggaatatgggtaggcaaaatccacaaacaacatggtgggcacatcgaactctggggatgaaatttcttctctagtaccttgctgtgatgctggaggagaatgatcgctgcgctgaagtaaagcctttgcttcattgacgaaagattccagcatttcttctctgttaacgactatatccaattcagcatcataattagagctgactaattcattaaagcttgcggccttgagagacatgggcttctcaaagcatttgacaataccaacgatgaaaagcaaaattgcagctgccaatagccttctgtcagccgacgacgaccacgactggcaaaagacgtagatggctactgtgacctgatcacgaattcacgattatgtgaaattaacgaataaatagatgtcaaaaatataaatatataattcgaaattccgaaatatgtcaaaaatttcccttgtaattttgaaatcacattttataattacagtctggcctgatattgaaatttaatattcaaaatttagatgctcctgcgctttattatacataattcgaatttcaacagtaaacgtaaggaagcataattctattcccaacttgaacacaacaaattgacatataaagaatttcagaataaacatatctgacaacttagggtttgctcgcttaatctctatgaagaaaggactgtaggggattgaaagggattatttccacacctcaatatatatgtgtaaaattattccccttcaattcctctcgatctttttgttggtgggattaaccgagaacaatcaatattaacccttagtccttgttcagtccacaataatttggcgaaacttaaaatacaaatacaattaatatatccgagcaagaattgcacgttctagctactccttccatgctaaaatataagtaatttttagcatatatagtaacaaatcaaacatttttaactttgactattaataacaaaatagtaaaaaaaaatcaatcatgtaaaactgatgttactaaatttatcattaaacaaactatcataatatacaactctttttacttaaaacatttttacttttatagatattattggtcaaaaaatagtacctcgtagaccatgtcagagtctaaaaatacttatatgttgggacggaggaaagtagctagggttgagcacctgagataatgcggttaggatgtggcgcctccacagctcattgtcttctatgttgtaggcggtgatgaacatctggccgccgagatgcatcagcaggataggagcccacacgacctctagatcatggctaccattgttgtcgtgctgcagtttcttcttgcgattgaagagagtggcaagtgcgtataccgccaacgcatcactagcaaggtacgagagccagatgaaaaacctgtactagggtgggaaacggggtgacttgcgcctgccgccaaaaattgcaagaaagtactgtacgccgaggctgcccaacacaagcacgcgcagctgccactcctcccaccattgcacggcgcttgacaaacccatctactacctgttgaatcgatcgtgtgttagcttttgtataactatagctttacttcgcctaatgacgatgccttttagggctttatgcagctagctagcacatcgtcagtcacagtaaatttatggagtttcttttcaagactttcaactgcttcggtgcttacttggtcctagagaaatattgacgcacttatcaataacctcgatctccattaacagtgggattgatcaccgaaactttaattttaagtgtagtacgagtactatttatacgagtcacccattttacttgttattaaatatgttacgtggatctcgaggtcaactacgaattgactaattttataaaattgcaagccttaatgctactatatgacttggggcatttccattagatggttattaatgaagtttgtaccagttcctaataaataggtagattccatttgtagattctattagcttgttactcatcttcattatattttttttgaccaagcgagcaagagctaccatttcacgtattaagagaaggttcgataggatttgatgtgaatgatcggtctggcatcatacatgcatgagactgtcatctagctgggctgcgactccacttatggttgggccgaaaagaggcaagccgagcaaaaggtaggatgcagcgaattgggttagggtgaaaaggaaataagaaatgaacttaagacccaaaaacaaggaagatttttattcaactttttcaattatagtgtataacgatccaaaagtttcaatttatagttgtatcagtgaaaaaatatctttacccgttgcaacacaaatatatttttttctggtatataagagatggcacatgatgctgagttatccgatgtatatgtgaataacatcgtttaagtgttatagtggtttaacaaagtcaatagctaattcttgaaaaaatggtaagaatatgttttctttggtctgaaattgtactatttcagcacatggtacgtattgaaaaagttacagaacttttacaaactattgcagtacaatatattggcagtatataaatgggtaatttagaattttatagaaaattggaataagttttctagtaatttcgtggtcgagagttaatccggtccagttgggacttcttcacgtgttaggccaccgacatcactgctggatcatgtttgtacgcctgcgagagacgatgacacgcattgcgatggcatgattcctggtcaattatgatcatcattaaaaatttgcatacttggttacatgtgaccaattaccagttaaataatgcaagttataacatagcagatgtgcgtggaaggccttacacgttctgaatcttgctagctaggttaacacattcatacaaccctaacaatgatactagtttttttatctaaattaattactccctcagtttcatattacgagtcatttgactttttttctagtcaaatttctttaagtttgactaaatttataaaaaatagtaatactttcaacacaaaacaaacatattatcaaaatatattcaatgtttgatttaatgaaactaatttgataatttagatattgctaaattttatataaagttggtcagattaacaaaatttgactcttaaaagggtcaaacaacttataatttgaaaccaagggagtactttcttttttaacaaaaatgaccctcacagaataacaaagaaatatgcatttacccttgtaaattttacactaccatctatttaagcgaaaaatcaaatcaatctacaccattaaatcatttatatcagtatattatacagtaaaagttctcaaaagttaacattctcatgaagcctactaccatctttcttctatacctacacagggtatataactgtctcttgctttatgaataggagtaaatgttgaagaaaggatgtgcctggctaggggtggcaatttcccccgtgagggcggggacgggtgctggtttcaatccgcggggagtcggggtcggggccccgataatgggcgggggcgggggaggacagtcacccgctggtgacctgcggagcccaaaggatgtatattcgactattaatcctagtatgtcataagcccaaaaggccaattagcctatcatatataaatccaaaccctaatttccccaccccaccctatccccaatttctcacccacctagcgacatctccatcggcgggcgacggcgcaagcgaccaactactggttaaataatgcaagttataacatagcagatgtgcgtggaaggccctacacattctgaatcttgctagttaggctaacacattcatacaaccctaacaataataccaatttttatctaaattaattactcccttagtttcatattacgagtcatttgacttttttcctactcaaatttctttaagtttgactaaatttataaaaaaaatagtaatactttcaacgcaaaacaaacatattatcaaaatatattcaatgtttgatttaatgaaactaatttgataaattagatattgctaaattttctataaaattggtcagacttaacaaaatttgactcttaaaagagtctgtcggagggtgcacgcctcaagcgagggactgtgaggcccccccgttttagttcggccagaggcagcgggtgagaatcgaggattcggtggaacggtgtgatgtagagggggtcgggccccttggaaacgatgagaccaaaggggtttatacaggttcggaccgctgaaaagcgtaataccctactcctgtgcttggttgatcgactatggaatacatgcacttgaattggtgagacccaagcatgagttagccaaagaacccatctctccctctcaccaagcctggacctccttttatatttcaaggggctgccacatgagcctagattaaatgcatgtcttggtgcttgacttggaagcca

SEQ ID NO: 23059 - DNA, 5142 bp, Oryza sativa
attcaccatttaatgggtgaagacttctgggttcccatctacaccgggaaacaagaaacctgctttgaccagagcggatgaaccgtctccggccgggttagcctctcatcatcatgatgtgacagggcatggcaggcggcatgccgcctgacgtatgaccagtgcgcaggcgcactacctcggtcccatcaatcattcgaccggtcacagaccgatcaggcgcacagcacgtcgcattaaatgcggcgtggcacgcccgctcagggggccttaaatgcggttaggtgggtgttgggaccgttcacctaactccgcacacatggcgtcatgcaaagggggtcggggcagcccgacccgccgcgctaccgtgggcccgacccccttgggggagtgccatgtggtactgggggcagcctccttcctctagtctcgataccctcaggcccatatcaccgatagagtcaaacgacttataatatgaaacaaaggcagtactttctttttcaacaaaaatgacccacgcagaataacaaagaaaaatgcatttacccttgaaattttacactaccatctatttaagcgaaaataaaatcaatctacattagatcgtttatatcaatatattatacagtaaaagttctcaaaagttaacattctcgtgagagcaattttacggtccttgaggaggtaccatgaggtaccaaaaatttagtgtaaaatttggtaccttatagtatctaggtaccaaatttataatagaaaaaatggtacctcctcacactactacaaaaatacccattagtgccgattcttaaggcctaataggtgtcggttccggacccgacaccttttaaaattataggtgccggttatacaccaagaaccgacacctatatttattataggtaccggttgtacactagaaccgacacctatattgattataggtgccggttgtactcctataataggtgtcggttttttataagaaccagcaccaataattctaaaagccaaaaaaaaaatattgtgaaatacatcatcctgaaacacagaaatcacaaaaatgacacaatattatattcgtagattcacatatgcattcacacaaatatggacattcacatatatgcattcgcagattcacatatgcatccacacaaatcacaaaatattacattcacatatgcacatccacatcctcgacatccacatcatccacaaaaatacactatggaacaaaaatgacacaataatattcacatcgtccacgaaaatcacagaatattacattcacatcttgcacatccacatcattcacatttccaagaagactcattttaaaatcccacaacaattcatatcagtaggtatgttattgctaaaaattgaaaagagaaggataaacacgtggcaaaagtgaaggataaacacgtgacaatagcaaagtaaatgcagagttagaaactgtagcattcagtacctagtgttgtactaactagataataccccgcgcgttgctgcggggaataataaataaatttcaaagatgcaccaagagcatagtagcacatgaggaggaaagaaaaaaaaattaatcctaagtgattgacttcgtaaagccttcatattatggaatggagggagtaaaaattatgtgatgagctatctccactttggtagccgtggttaaaaatgcaacagaattgcaggtgaaatacatagttgctgaccggatagatctagtattggaacaataaaattaaagtctattacctcgttgctgaagaatgaaaaatatacaccatcaatagaattatgcagaactatatgtttaatgtccatatgaacctttctaaagaaaatctatacgaactgagactggaaggaaaatatataggtggtgtactggaactgatatcctcattgacttggtagccttgtattctgcataaagtatttcgtagtacagctctccctcactgatccatttagctcggttttagtacctcagtagttaatcttgcaatagaatgctaataagttcttgaataagttgctgaaatatcatatttttattgcggtaagaaatgtacatttagccacaagtaaaaattattatttatatgttgtcatatgatacgccaccaggaatgtgcagttgaggcatgtagcaaatctggtcgatccatgacaaccatacaattacaaaattgataaccatcactaaaaagactctcattttatatttaaacatctacatacatagtccaattatcacggttagctggggaatcataactaaactgttaaacgatcatagagaatagtagaacaaattcctgcttagctatcggagttgggaaaaggattacctctaaaatatataattaagttctcatccttcgttaactcctttctgtgttcgtagctttcagaaaacttccgaaataccaatattactaagctgattcagagtcacaaaaagagtctatatccagatcagttgcatcagcaccttatatataccgagatatagcttcaccagctaaagatcataattgaataccaattaaaaaaaacttcatcggcttagcatgcccatacattcttagatctgattgggtgacaaatcaaccaatggatgtatatgatattgttttccatacccttcaaccgcttaagagacaaatcaagagtaaaaatcaactaagtcagtaatcatgggcctaaaacctgggaaacaaaagaggatgggaaactacagcaacaaaaaaaatgtgttagacagtcaaactgggtaaataatgctactatatcctaaatatgaaccatagtacaaaattgaattaaatattgataggagcaatcgaaatggtgtgcatgtaaaagtgaggttctattttgatgaacaaaatccgattgagcaaacaaaaggaaaggggaaattggtgtgtgatcacctgtgttagatcattggagtgattggagagataatagtgtgagatgcatatgaatcaagccagcaaaaatccaggaacaggagcagactgccagctccaattgcttggtagatcgatggatacgcaagagggataaatttgatatagtggcagaactaaaagagggataggaggagaagaaaaggcaagccattaattgatggatgtacttgatggcagtcgtcggcagtttcagttcctcgcggcaccacgactaggggtgaaatcgggtcgggttcggtcggatctcactcttcccatatcctaacccacattttataatcggaatcggcttggatacggatagtatcgaatacggatacaagcacggataatatcaggcacaaatatgagacgaatacgtacctagacggatacgaccactatcggttatgaatatcttttcggatatcacgtcaaagcaacgatcatctatactatatagacaatagctatatattcaaccatccccgtatatccataatgtgactatattattagggtttaagatatacgagcaatacgtcaaggaacaatcgatttttaactggaaaaattgaaagtttggttgaaattaaaactatgcgatggaaaagttagaagtttgtgtatgtagtaaagttttatacgatagaaaaattggaagtttaaagaaaaagtttggaactaaactcggcctgacttgtgatgagctgctgacttcctgttcctgaagagatgaggatcggctggcagaaaaggcatgtagcggcggtggccacggctcaacggatgcagcaggtggcggtgcgacgggtgctgcaccgcagcaccggtggcgctcgtagtctcggcgtcattgcttagtgggattagtgaacactgaacagtaattagtatttttagttgttgggttgttaagcatggtttactggttgatggtggtcattgtactagtaggccttttggccactagtgctttattgggctaggcatgttatccgggtattatccggatatttaaccgggtaatacccgtatttttaccggataatctgtatccgtcggataccgtcctcccgaacccgatctcatatccgatagaaaatacccgtattcgaacccgctacccgtagaaacttccgggtacccgaaatttttacccgaaattgtcccgaaataatacggctgggcgggcgggcgggaaatacccgccccgttttcacccctactcagcagcacaacgtgccgtccacccacaccgcatcctctccctctcctgctgcccgcaccgtcctcctccgccccccgtcgcatcgcatcccagcgagcgtgcttacgcctgcgccccgtggcctcccgcgccgggcgatcccgcttgcagtgccgcaggtgccctcctgccccctggtcgccatcgcatgcctcctctgcttccagtggaactttctctcccgcgtcgcttcttctcccgtgcctgcttgcctcttcgagtctgctgaggggacagggatgcgatgcagtgcagatggttgatcgttcgattcaaatccaacggccatgagaaaatgaggtgacgtgacagcatcaggaagcagagaattcctagtagtggggatgatttgtataggtatataggattacataggctaaatgtagagtagaactaaatttttgttgttaattaataggttaaggttaaggtgtcctcaggcctcatggacacaccagaggaccaataacatggtgaccaataacacttcaggacacaaacatgatacaggacacttcagctcagattctattaacaagaaagtcaccaacaattcttccattatgaggacaacaattccagcaactaaccaacccaagacacacatacccaagatttcctctaaccactgtgtaactgtccctagatctctgcaaccttgattagagtgtgtctccatgataattatagtgtgattttatagttttctcaggtcgaactgcatgcacttgattaataggtgcttatggcttgtttttttgaaaagtctacatgaaaaatatcataactaatgtacagtacttagctgaaacatttacactatttagccaatttttttgtgattgaacttatttagtagtacaaaattagtcacaggtagaagagact

SEQ ID NO: 23060 - DNA, 8363 bp, Oryza sativa
tgatggcgacgaccacaattgtgaggagcgggcgggcggataaggctgggggcgtagtgaaatacggagtatatactagccacataggtgtcggtttgtgtggtagaaccgatacctacagagataaaaggtgccggctttttattagaaaaccggcacctattcccctcgccggcctatatgatgcaaacacataggtgtcggttcgtttaaataaccgccacctttcgtataggtgccggtttttgtccacggccgccacctatgcaatttttggaccgttggcgggagtatttttagtgccggtttttgataaaaaccggtaccaatgaccttcccaacaaaaaccgacacctattaattgttataagtgccggttttttgctacattgacaggaaatgacttataggtgtcggtttttggctaaccggcacctttgtgaccgacacttatgggtgtttttttagtagtgtcaaggaccataaatttactcttctcgtgaagcctagctaccatctttctctgtacctacacagggtatataactgtctcttgctttctgctttctgaataggagcaaatgttgaagagaggatgtgcctgccactgcactgcctataatcaacgcccggagctggcttaggtaagtagtatatttgaggccatacaattacaccgacagacaacgatcatttgactgaaagacagcctgaacattcatgtcatgtatgctaagtgaaaacctttgggttttttttttcaaaaaaagaaaaatctgtcagtagagaaacaggcgcagtagtctgggcggaagggcttgtgggcttcgtcgagaccacggaatggaggaggggacaagcgcaatggtacagcatgaacaggaactaaccatgaacaccaggtgattgatttattagtaatactagcttgtatagtgtgtacattaacactagtgtatactccctccgtcctaaaataaataaaataatttgtctcttaaatacccttcacctatccattcaccaatacaacttttgtattaatcaggggcaatttggtcctttaacttcctccttaactttacattgggaagctagggtaagagggagtaaggcacaggggttgtcaaggaacaaggtctcattgattgggtgcagtgtatgtgttctagctagctagttaactgcatagggtgatttgtttgttgtaattgtattcgagaattgtattgttgtaaaactgaaatctggctgagcatgtcctagtgaattcaatgttgttcaggaacttaatgaaactaaatatatattgtaattttatagaattaatcgatcgtagttgacctcgagatctacgtaacatgttttacaagtaaaactgattcttatactctacacttaaaagctccaggatcgatcaatcacacagttaataatggagatcgagattattgattagtgcgtgaatatttctctaggaccatgcaagtaaggaagcatcgaagcagtagttgacgcgaagttttgaaaattactcctccataagtcccattagatatatatgtgtgtgcctgactgactatgtaaaggcaacatcacgtagatgaaaaggggacagagctagagagacgggagctagcccactgtaattcgatcgtagacgatggatttgtcaagcggcgtgaaatggtgggaggagtggcagctgcgcattcttgtattgggcagcctcggcgtacagtactttcttgtaatttttggcggcatgcgcaagttctcccgtattccgcactgctataggtttttcatctggctctcgtacctcgctagcgacgccttggccatatatgcgcttgccactctcttcaaccgcagaaacaaactgcagcctgacaacaacgacaatagcagccgcgacctagaggtggtgtgggcacctattcttctgatgcatcttggaggccaagtgttcatcaccgcctacaatatcgaagacaatgagttgtggaggcgccacatcctaaccgcactatctcaggtatgtgtgctcaatgctacttatatatatatatatatatatatatatatatatatatatatatatatatatatatatattcccctatgtatatatacacacacacgcgcatcatctaattctttcttgattggattatgtataatgctgaaatcttgaattattatgtgctagccatacctctgtcttaaaatacgcatgtaagtattttcatatgtatatgtatgtaagtatttccatcgtacgtaataactattttcatgcgtatacgtatgtaaatatttccggtaaatggattctgttggacacagaaagcatatgctttttaaatagatctaatctgacggtgtaaaataatggttctatcaatttaaatgaaaatcgatggtgggattgtagtatgccacatggcggcctaggaacgctcgtagaaacgccacgtggcggtttcggagcgtttgtagaaagtttaatagacttttagtatataataactaggaaggtatcccgcgcattcgcgcgggcatgtgtcctatgctaagtttgagatatttgtaagagcgaaatgttacatctaccacaatttctccataaattgttttcatcggcattaattgcttttataattttctaacctattagttttatattgtatcatatttaaataatatctataagtaattttttataatcttctatatcatttgaaattaaggtagacttattttttaaaaacatgtcaacgaattgaaagtaaaaataagtaaaataaggcatttttgaaattgcatatctattatcatagttcattaaaggattaattaggtggaacatgaagatctactaaatgtttaggtttatatagtctaatatgattgatgtagtttgagaggcaatcatatatgaacatttcatgtacatttcatgtagggtgggtgagaggttccatgcagcctaacatgaatacgataacgacgaaatataattgcgcagtaatattttgaaaatatcatgtaccatgaatacattcttttttatgtaagatagatctaacgattataactaatagtttaccagtttaaaaggcataggagtattgcagaaatgtagcttaaaaattatggctgttttaatatccaatgttattgcgaagtaagcgcagctcaactggattgttttaatatccaatgttattgcgaagtaagcgcaactcaactggttaggtttctcgtggtagagcttgcccatctgggttcaagttctagatttgacatgggtgttggtatttacgtctaattattcttttagtggtaggtgacgtacccatcgacagcgaagcgccgtggtaacttcttcaatctcaaaatgtaccggctctgtattttaagatgctaaaggggtagggtgcgtgcacgctgtgtttctaaaagatttccaatattattgattgtttctgttttagttttatagctaagagagagggaagggacactaaaatctatttgattttttcttaaaaatgtatggattagtgaacagtagctagtccgtataatatatatgatccaaagtaataattttttaataatatagttaacttggttctttaattaaattttatagtaaataatctaatttatctcctacttagggtacactcgatctcattgattgagcttaagtagggcacacaaaacgatataggccattaacgtatgattaattaagtattaaatattacaaacatgaaaatagtttttttaaaaaaatgtatagaatatatttgcacaacacgcacaatttagtagtttggagaacatgctcaagataaatgagggagccaatctgataaacactttacaactcaaccttaaatttgttacttatgtacttaaaaaatatgtataaatcaaaagtgtagatcgagtcattaacggctaaaattcaaaccgtgtttagcgagaaaaacatgcaacttatttttagacaatacattttttatttgtgtttttgacaatatgtcctgaatattttaattactcattatttcatcttgaactatcaatatataggcccattgatgcaaataaatgctatctatactcaacaataatagtgtgaaatgatacgtgtatttgatattttatattatattatagatctagttttggctgtgcatgtttgttaagtgatatatattttttatactaccaccttcactaaatatatgacattggtcatcaatatataaaaaacaataaaaaaatacaaaggaagtataatagaaaatccagattaaagagcgttgttttctttcggtagtttcactaaatatttaacgttggctgtcataaaaaaatacaaaggaagtgaaaatccaagtttaaaaaaagcgatgtttttttttaaaatttttttccagtagtacgtacgtatacagtattttttttttgctgtatatcatttcttcttttctcggttgtggttgttaattcgtacgtaccaatgccttctcagccttttctagtcaatttttttatggaaagtattactcggtaaatttgaagggatagattactatttataacatatctaatccaattgtgtaaactaatggatccaccaactttttaagaatttggagggatagatttttttttcttttttctcagaaattttaagtttttttctattttattatagcgccttgtggtagcttgagagctttttagagcaccatgtggcggcatgagagcgtttgtaggaaatttaatggacttttagtatataatagaatagataatagatagatagattgatggtaagaaagcggagcaatggatagcgtgaggcgccgccgtggcatggggcgtggcttcttcacggcctcgtaggagtgtttggtacatatgcacagtttgaaaaaaaaacttagaggaggaaggaaagagaatataggtagttgtgttgtaaaatacagaatataggtaggtttccattaaatgattatgttatatatacaactaatctaaatccggtaattaaacatttaatatatatctatcatttattcgaaatatttagatgtgtcaatatatcattctaatactcttctcaactatccaactgatcaaacgtatactaatcatgctgaactgctggtagacaataggcgactcaattagcacggggtgctagacttaatctgtgttttggtggttgtattttgttcacaggagataattccgatccgacttgttggttcgtgacagtctcgccgccgtatattacccattaacaaatgaataacggactttttctttccttttttttcacatctgttgcgcataggaaggacattagccggttttaaggagagagagagagattttaacaaatctaatccatatgtttgcgcataaatcaatggctagatatttcttatattttctctaatttattagagtgccatatggcattatgagagcatttgtagaatgacatgtggcggcttgagaacgtttgtatgaagtttaatggatttttaagtatataatagatagattttttgtgtttaaatgtgccagtgcaattgtgcaagttacgtcatgctgatgtccgttctaatatttgttgtacaccatgtgtggaccgtcaagttcatactgtaatcgtgtcattttaacgtattatcgcttctttgcggtacactctacactacgctaccctatactagttatttagacctagttctttttctcaactctaaactcttcaactttctcattttctgttagcacgtttttcaaacgattaaatggtgtattttttaaaaaaattatatagaagttgtttaaaaatcaaataaataaatttttcaattttataataattaatatttaattaatcatattctaatgaggtttctcgtggtatttccagtatttttgcaagacttgaccaactacttcctttgtcttacaaatattattattaacgcaagatgctcatccatctaatgggaaaaattaagctttttaattattacttacctagatctcgaggttgagaacatgatatgagaaatctactcccaagttgtcggtcagttgtacactgcactgttttgtatattagagacaggtgccctaattatgctctccaagaattgaccaacaatttccttaactggtcttatttattacacagtaaagtttaattattttattgtcaactccggaccccttttttctaagactaaactccagactttttttttttactaattcaccgggggaagagcttccgcatccgaattttcattgcaacaaaggggaggaaaactgtccattacaataagtttagagtttgaaggtgggaagagtaaatttgtttccaaacagaaattacatgtcgatcttcaatcttcagattttctgccctgagggccacctcgctaacacacctttgaaggcaggaaacaatggaaggcgaacaacccctgaaaactacgtcatgacgatgatttcaaagcgcccagaaacaaagtagttagaagacctgaaaatgttttaccggcagattgtgcgggttttagttggtgtagcatttgcacttgctgaatgggtggatgaattgcaattgcccgccagaagcttattgcaaaagggcaagtaaaacacaagtgattcgccgtctcagccccatgattacagatgatgcatgccgccgattgaacaatttttttctttagcagattttgttttgtggacagtctattcctgacaagcagccatgcaaacagctttacctttagaggcgccctgcattcccatatccagaaaactccaaacttaaacaacacctaaatgtcagatcggtgcaaagttaactatacccctgttgaggtgcaaagtcagcacctactttttgaaacacagaataaagctcgggaaactgaataatataccgccaatccgtgtaacctgaacaactcctgctttgcctctctattcaagtaagtacgtcgatcaagttcatcaaccaatatgttacattaagttcatcacaatttaaccaacatgttacatgcatctggtgcctctgctgttgttgcgtactccgtttgtgttactacaggagtaaacatgttgcgcccaacccaacctataaagtggtatattgtccattttctcatctctacagcctgaacatttccacagacctttttttttcttttgtagccgcgtaacacatgctttctctgaatcttgggttttctttcagactagatatagctgagtaaacatgttacgccgagacgcgaattaacgttggaggcggcgtagaggtatgtgttcgcagccgcgcgcgttttgtcgagtcatcgccggagctggggccgaatcatccatggggaggcggcccgagtccgagatagacctcatcggagcacgtgaaagaagataaatccattcttactactataaagttatagtatgatccactaactacaattaagatactaaatctcaaacattaatgttccacattatcatcaatttttagccgttggatcattggattagattgcttcttaggtgttggatgaataaaacgcagtcaccacatgtggcccattgatcctaggccaatttaatagtgaaggaattacggtttcttctttgatcggtgaggtcttctcctatagtaacaatgctggtggtgtatggttttctccatcgatggcagtcgatgcccttgtgaaaaatctaatatgttgtattctgatattttttgatatattacatcgaccctctcatgaggtatatataggagtacataggagatagagacttgaaatacaatacatgtaagagtagatttatctctaggattctatctctagaactctattcttatctctaggattctatctctagaatatattttatctctataatttatttttgactcttatctctaactaatatattatacttctaacaaccctaacaggctagcacggcctacgtgtggtacggtgctggcctggccaaaaaacaacatgcagtactttattgccaacggacgttagccattcatctcgacgctgagtttcggacaccaccaccttcaaggacttcttttccccataatttatagtgctgatgtatgcttctttttaaactgaccgattaattaaacgtaataaattaaaaagagaagcatgtgcttccaatagctacatatttgatgagaacggcgtgtagattggatgaaatatagctaaagaccatacaagtcagatactcccttcgtttca

SEQ ID NO: 23061 - DNA, 2940 bp, Oryza sativa
atctatggtacttaccgatgacctccctaagggtgtgttcggcacccccttttcccaaccacccttctcgcttgtttttttccgtgcacgtttttcaaactactaaacggtgcgttttttgcaaaaagttactatacgaaagttgcttaaaaaaatcaaattaatccattttttaaaaaaatagctaatacttaattaatcacgtactaatgaaccgctccgttttccgtgcacactatttgtgttgggatctgggatgccagcctaaggaccggaagaaatgcagggctgggctagataggataacgtgcagcccgttttatgttgggctagtccgctactgtgacatacgtgcggtccaattaattggtccgaaacaaatgtgatccacatacggcccatactaattaggctgtaaagggagtgtggtagttgggccggaacacacctttgctcacgcgcacggcccaccgaagcgccatactagtgaaccaataatgccttgatctgagccgcacagcgcacaagatcggacggctcgcagggacccacgtcgggtggtgtcgcatttctggcctctcctctccggccggcggcgacacccggcggccgcagaacgccggcgagcggaggcaagcagccgcgatcaagacctgaaccgcacgcgcgcctccgtcgttcttggtgagaagttctcctacctgattttctccgagtagttcattcttccgcctctattcgtcgtctagggttttccatcgcccctgctccgccttagcttcttcgcggcctctgctaggaaccctgaatcaggaaatatagggttttcccgtagttgtttttgacggagattcttgcatttgagccaaatcgtcagttggttgcagatgctctccacggcaatggctattttttttgctgcaactgtggttggtaggctcctgggactggaacactgggggaaggggttgctccgaggaaaaagaaaaataataatgtgatttagtcatgtttgatttctatgacgattgccgcaacgaatatctagattcattctcctctcacggataaaaaggctaaaagccatggcaagattgtgtgggtgttggtgtttctgttcttgaattgccaccgaaattgttgttaatttttttcatgtttcaatctccttttccattttctgcttacgacaatgaattcttgactgcatatttactagtgcagtgtagttttctgtcttacttattatcttcctttgctcaggattgtttaattttgtagagacaccagtttgctccacacctgctcgattgaatgcccctgatacaacaacttcttccagatacagggatgtccatctctcactgtgaggataatgattctgacaggatcagcaacctacctgacaagctgctgcaccatgtcatgtcctatctaacagcgcaagaggcagtgcggacatgcgtgctgtcacggaggtggcagaacgtctggtcatctatgatgtttctgcatgctaacgcagccaagtccagcagcatcacaagtttcaagaaatttctcgataatgtgctcctgtaccgcaatcctgttccactgaagggactttgggtttctgccgcctgcgacaactctgatgattcccttgattattccgacatccatcgatgggttcgtcatgttcttaggagcaatgcacgcgaagttggcatattcgttcgttgtggttccaagcttctttctatagatggttatccctttgctttcaactcggtgcacttgtctaagtttgtgcttttcaagtttacagtaaatgactgttttgccaagaagttttcttctggttgcccggttttgaaggatcttgtgttgataagctgtggcatcgatgtcaccatgttttcctcaaccacattgaagagtttcgtcattcacaatgcagaagacattgaacatctgcccaaacaaattgagtatcttgtcatagaaatgccaaacttagttaccctgcatatagaggagattccaagaagaaatattcaccttgtggacttgtcgtcagtgaaagaggccacaatttacttttttgaacactcttttcgaaattccgctgttgactgcaatattctcagtgctctttcaaatgccacaagcttgaagctgatatgtgattctgtctatgatgaagtatgctacctcctttgaacattttctcctatcggtttttatgtgtttttctgatacacctttggacttgtcggcaggtgtcaaaggtattaatgcgtgatcttccaaggtgtaaggcatttgacaacctgaaaaggttgaagcttggtgagtggtttctgagaaatggatgctatccgctactcttcttgcttcggtactcacctcacatagaaaaacttcgcctgcaacttaccaaggcaagatataacacctccccccttccacattgctgtttttggtcacggcttgagtttaatggtttccttttttattcttgttatcagcttggagctgaggagtatgagaagtttccaactgctgcagcagcaatagatcctccatgcaaagaagcagcaagaacgtttcattgtgaaaaacttacagagattgaaatcgtctaccctcagggcgataaaagggtgcacatcattgtgaggatattgattgcgaacattagccctctccctgaaattaaaatcaagccctttccgaaatccggattatcatggtatgtttcttaaaattgcccattcatgcttattgaattagtggcttatgtttggaggcatttgacacacatcatttaaactattctattaggtgatctgtggattttggtgactgaggtgtctatctggctggattagatattctgataccaaggatgatgtttttggaagacttgttcagctatcctttatgttcatagtg

SEQ ID NO: 23062 - DNA, 557 bp, Oryza sativa
gccctcaggcagatcgaagctgccagggagatctctcatacgatgtcatcttcagctgacaaggtgttcctggactccaatgatctcttgctcaatctccagcagctcaccgtggcaaacaagtcgaagaaatgaagtcttctcgcaccatgttctaggttattagcagatgtcagtctaccagacaatgtgaggaacacttggtcctctctgtagttgcactagtgatcatctgtgatacagaactcgacgagtgactcaacttttggcaaccggcaatctttttgcaaattgcagctaaactttgcaggctacattttgactctgctagtccttgaggaagttcaataaggaataccattctgttttaaggttctcaatctgtgattgcgatgatggattaagaaactgttagatctattgatcaatctggtaggtcccctactggtatgtttatctgatatcatgctgaatgtgtaattttcagcaacattacaggaaatatgccgttgaagaatctaaattagtacactgattaacagatcgtcgatatgtcc

SEQ ID NO: 23063 - DNA, 8414 bp, Oryza sativa
gacgctaggatccactgtaaggatgcccttgctgcggaggtgcaggaagccgaggtggcattggcaaatgcagcacacggccatcccaaccgtccagtccttcgaactgatagggcatatgagaggatgatgcgctcacctgatgacgataaggtacgtgtatgcacagtacgtaatgtacttagatcatttcaatcgattttccttatgctggttttctgcctacatatataaaatctgatcttaattatttcttgtgcttatatatatttttcagccaacaagctggtccgatcaaaaagtttttgagatacatgtctatccgtcgtcgaatgaccatcatcgttaccttagctacctccggttgttgaagaagccacgcctggagaagcttatagtcaacatatatgtgtccaaggatggtatggttggggatgtggatgaagctgtggcagctgcgaggaacgtagtcgaccatcatatcaaccatccaacacttgagataaatagaatggaagaaagtatttctgaccaacatcaacaggcaagatatatctctcttcttgagctcgtccccaatattgtactacagagaaacccagttaatttgtaacaccaaccatcacattctgaatcatgtttgccttttaattgtttttatgcatactctacatgagagtgctatatatattttgtttcacttgcagttgctcatagtcatttcacaagatacatatgcatggtggtagactgctaaaactatagttcatcctaacatagcattattttttgactgtttctaggtccctgaaaataattgagtggcaagctgttcatttgaaggttaagattggcacagtgatggcacaatattaatgaatccgagccagactagacgggaagctgtcatagcattgactaatctgtaatccgatttcaaaatgcaggatattcggatcaatttcctcatatgtcgtctactcttttactgtaagtatgacactttatcttttatctcatttatgtatctttcgtaagtggcacagtaataaggtgacatcccattgttattcccacacatttgtaaccaaattctttaataattgagtgcagttctggtgcatgtttgattctctgcatttggtccaagcagaggttacagcacattatcaacggagaaaataactgaaaaaaggtgatgataaacagaatattatgggtgctgtagcataattgactctgcacctgatcaccctcctcatgggttggtaagcacaacagcttgccatcttattgctgtacaatcttttgtgaatgatgataggtgtaattggatgtgtgctggagaaaaaatgctcaatccaagtgacaaattgcgcacttgttttgatctttaattccctttcagagtgatctactctaaggacaatcttggatcacccttggatgaaaaacttaaggattggatgttggacattttacctttgataggcctaaaaacttcatgtatatattatatccaaactagaggttataagtgtgttttggctatgtgcatcatagctatgcaaatgccgggagtatgctcaacatagttgtatcgcctcattgtaattgactgcgttcaataaaatcttccattatctaaaaaatggaaagcttcaatccaccaacagagtcatggccacatgattccctcattggacaccgaaagattcaaagaaagcagacttcaggctgtaaaattgtttgtgaaaaccttcatgttgcatgaatgcaagagtgaccttgaatatgttgcttaatttttcagattatgtgtttcacattttctaatttagtatactgtgaagtttgcgggggaatgtatagatttagttgatgaattcagtagagcaaacacaaagtacaggtacaaaacaataacatgatgggattcagatctcagaaggtgcacagattcgtaactgtgaacctacagaggcacaatgcaacaacaggtcaccaaataatatctcaactgagtaacaactaaaaatcattttacttgaacaacttgcccaaatagagtcatcaaaaggagaaataacaacttgcccaagaataagaaaatctgatccaccttaagatgaccaccctagtcatcaaaatccacatcacttacaaaacagatttaggatcataaccatcaacatcttcaataacgtaactggtggcctaggttgtaaaagaaaacattgaaatatgagtcatggaattccaattcaacagacttgagtgtgcaaatgctgaaattaagatgctcaacattctcagccattttggggatggattttgatttgagggagaggattaataatggaaaataagatcttcacaatgatgtggactcttctatcgccttgtgggcaaatgattttgattttcctaagcttttcacagttaactgctgtccctgttccttcgcatgtgggatctaaatctgcagtagcatttgcagaattggtgtcgtgatcataggcataagctccatgctggtaaaatgaacaaggaaacagttaaactcaattcatgagaagaaaagaaacagcaatgtggagagggggagatataccgaaccttgacaagatgcagggaaagtttctctatgttaggtgagtgccgaagcaagtacagtagtggatagcagccatcactaaaaaacaactcaccaagtgccaaactcgttagattgctgaatatcccacaccttggaagatcacgtagtaataccttttggaccacctgcccacaagttttaaactccaaagatgttaaagataggaatatataaacaacaaataagagcaattgtaatttaaagcatttagcttacatcttcgtagatagatgaagacatcaagtgcaatcttgcagcgtttgaaagagcactgagaatagtgcagtcaacatcagaatgtccaaaagagaacctattaagggtaaactgaagctgattccactgatgatatgtctaggagccgaagatttctgtttgcaatctcctctacatgcaggcagataaggtttggcatatttatcacaagatgctgaaaaccttctgggtcatcttgagttctatctgcagctgtaatggtcagaatcttcaatgtagcagagcaaaacatggtggccttgatggcacaatgtctcaactccagatgcagtagctccgggcaaccagaaaagagtttctcgacaaaacggttatcaatagaaaatttgcaaaggtatacactcttcaagtgcaagaaagtgaaggggacaggatatccatctacagaaaggagcttgccatcacaataattgagtatgccgagagttttaacgttgcacctaagggcatggcagacccatggatggatgtcagaataatcaagggaatcatcagagctgtcataggaggtatggatacagaacatatccaacagggcacagctgcgctgcaggagcaaattgtcaacaaacttcttaaaatgtttcactgtaatgaagttgcacgagtcaacattgaggtatcccacagatgcccagacgttctgccacctccgagatagcacacaagtctgcacagcctccttcgctgttaggaatgtcatgacatggtgcaaaagttcgtcaggcagagcactgatcctgtcacagacactcgttcgcctgctagactgggacatatctctctctctctggaagagcttactttatcaggggcattcaatcgagtagttggtgtgcgagggtgccaactgccatatccacagaatggagaaatagatccacacaagcaaaattggatacagcacgttagtaatttgcaatcaaaaatttgttcttgtaagcaggaaacaaaataagattgaagtgcgaggaaaagaaacaaattttgtggggcatttctcttctacccgaaaaagaaaacctcaaaaacgcaatcatgttccgccctgttggtaggactggatatagaaactagatattgctaatcacagtacagagaacgctagtaaccacagctgcggcaatggctaaataaatcttttccattttggagagaagagaccctggcatcctattacaggaagtgtactacagcagtgaagcatccttttctccaatgcaaaaagcgacacatccacataagacttactagtacttggcactcgaacaaggaataaaatgtactcttaaacaacttgggtggcatttcctttttaccctctattaatggaaatggaggggcttccctcttcttctttaattttaaccccaagatatgaaaaccatcgcacacaattttgttccggcctgttggcaggactggaaataggaaccagatatcaccaattcacaccacaaacaacatctgcagctattgctaaaaaaaaaaaatgtgcattactttgaagctgaatggctaaaactaaagatctcattatttggctcaagtgctaatcgacactacggctacggtcaacagaaacatggcataggggggttcattttattcatccaaatcaaacacaacattgaaataacacccaagcccccaaatggaggcggggaaaaaccctagcgggcgaatggcggatggaagaacacagtaattgcctcaggaagtcagcaagacgaaacgcctcacccaagggaaccggcggcgggctgtggccttgctcgcgctggcctccgttcttcaccggcgtgcggcagccgtcggagggagaggcctcctgccaaagaggaaagagggggacgatgtgacaccaccagctatccaaccagcaacactgcacgctccggcgccgcttccgcctacctccgcgccgcgcaccggcgtgcgacggccggcgaggagcccaaacctgcacacgacggcgcggccacaggcagcgctgcagcgtttccacaaaagatggccctcgttatggcggtgaggggagaatctgccgggggcattttactactctctccgtctcataattaactattctgaatctgctgtcacctctatcgccaaaatctttttttttaattgaatccatgtcattacaaatttatctattcaaaaaaatgtcatcataattcatctattagcagttgtaccactaaaattttataaaattataatcatgccactgttgtcacctttttcattttcttttttatcttcttactacttgctcccgtcttctttcctctcctctcttctttgctcctccaacccggccactgatggagccgctactccaactcgacatcgttggccacgacggtgaggggttggagtcaccgacttggacgaggcaacgccgaggaggtggtcgagggtggcgtgtaggccagcaatgacggcctccttgttgcgggcgagctagacggcggtgatctcgtctgcgagaaagcgaggcgaaaggagctcgggcaaccagatcggcaaagagcgaagtggcatcgcagcagctgccatcgcaaccattgcttctactacgaagtcattctagaacttaagttattttaggatttctcacattcgtataatgcctagattcaccaccatctatataaatatgaaaaattctagaatgacttacattatgaaacggaggaagtacaataaacaacatcggagtggggctcatttttccgagagatgttcctttcattaattgattaattcccccgtatacccggattattgtaattagtattactcctattgttccatccagacattgtagaagcaatgcattgatgcatgtggaacagtctactcaacctgcttggacgctgttgtactccgactgcagtttttgccatctttttcaaaaaagaagaagaagaagaagaagaagaagaagaagaagaagaagaagaagtggagtcaaattctagagcactgtccacgaccaagtttaatttggggggaaaatgtctgaagatacatcattgcatacacttcagcattcaactacaacggataacaagcaccatgctgctggacaaaagtttcgactttccagttaaagagcatcagtagtaacaattttctggggagagttggtattgtgcagtatgacccgcaggacactgcaactctcatcaacaaaatgctactacctccgtctcaaaagagaagcgcagccgtggaaatccgtatccaacaacgtttgaccattcgttttatttaaaaaatttatgaaaaattttaaaaaaattagtcatacataaagtattattcatattttatcatctaataataataaaaatagtaatcatatttttttaaaataagacaaacggtcaaacgttgaaaataaatagtgtaaaacttcacttattttagaacggagggagtagttgtcataatgtcatatcaaatgcaaacatcctctactaggaaaaccattttttgtcgaatatgaggatcaaatcctccacaaatccttattatccttttgcttcaaaggagacctaagcctccaagtcatccctttcctctacatttcaaaaccctcatagatcctcattgcacatagcataatactgccgcacaaacaagaaaaatgcactccagtacagattaatccgacccggcaaaaaaatggatcaggtaaatttacagcaccctcccctaacattgcatgctgaagtaaaccccactgttaatccatttgagccaagatcattcatgcagataacactagcaaatgcgaaagtcattcacctgattctacccaaaaaaaaaaagaaaactaagagatgacctaggcagcgaggaagctacaggatacaggagcaacaggaaaaaaaaacccggaataaggaggattaggagcacagagagcacgcacccaaggtgaccggaggagcgcgctccgcttccgcttccgacgacctccgcacggcggcgcgcgactccggcgagatcgagatggcccggaacccaagcagaagcagccgtggcaccagtgaccgagttgtgatgggggacgcgagcatgagccacagacaagtgggtcccacatgatgaaggcgcccgcatgtcagtgagcaaaccaaccacatcaactatagtgggccgcacgtctccagcctaaatatttttatgggccgagaatttccgttctcattccatgggctgatttggaattttttttatttttaatttttttattaaaagttttacaaaaataatttttcattttgaaaattgacagaagtggtcgcctaccgtcctctgggagggcgatttttaaaaatcgctatcccagagggcggcgaaagtgacgtggcagacggccgttcgctctcgggcgacggccctcaacgaaatttgcaggcggcccccttgccgccctccgctagggcgattctgtggcgtccggggggccgcctgcaaatgggcggcggggggcctggaattttgcaggcggcccccttgccgccctgggggagggcgattttatactgtgctttatatttttgtattaatatcaatagttatcaaatctttttatattgaaaactatacaagattaaaatctccaagactggtaaaatacaattttattatttttagggcctatttggaatgttaccgtacaaatattttgttagtgccaaaatataagcaagttttggcactaccaaatatttggtaaggtaaaattgcatttgatcatatttggtttgctgccaaaatgtaaaattgtagtgaagaatgttctacataatctcaaatctagattacgtattaccaatgaataggcttcaatcgaaatcaaacacaagtactattcaaattaccaaaatattggtagggcatgtttttggtagcaatccaaataggcccttagtcttacgcatacaaaaaatcaccaccataattaaacattgtaatgataagatagataagaagtgccatcgatacacggtacaaatttgtcgatcccgacgaatcaagcatgcggtaacctatcggcaccttctaggtcggtcagaatgcattgcattctcgtggtccttcaatcgttgatactctacttgtgtttctgactctgttatcttctggccatgatatgatggagtgacattgtcgatccatcgagtaaatccacccatccttggattgccctgtaaaaatagtaatgttattcagtttgggtagtaattttgtgcaaatcatagcggattttgtaaatggttagacatacaacgaaatcgttgtctacattggggcagacaaaatatctccttcgaaatgtttgttcagcaaaggatgtagccacctgccagcgatctctgcacccacactttggacgctcggaccatttaggtaaccctaatggattgttcctccagtctaagcttgagtattc

SEQ ID NO: 23064 - DNA, 666 bp, Oryza sativa
cagttgttgaagaaagaagagaaatttgtgtggagcccgcaatgcgagaaggcgtttcaaactctcaaggaaatgctggtttcctcgccagtgttagtcttgccagatactcgtaaggatttcatggtgtactgtgacgcttcgcgccaaggactggggtgcgtgctcatgcaggaaggtcatgtggtagcctatgcctcacgccagttacggccccatgaaggcaactaccctacccatgatttggagttatccgctgtggttcatgctctaaagatctggcggcactatctcattgtgaatcgctgtgaaatatatattgatcataagagtttgaaatacatcctcactcagtcggatctgaatcttcggtagagaagatggttagaactcatcaaggattatgatgtgggaatccactatcatcctagtaaggccaacgtggtcgccgacgctctaagtcgaaaaagccattgcaacactcttggcgtccgtggcattccaccgaaacttaatcaacagatggaagccctgaacctaagcatagttggtcgtggattcttggctacactggaagccaagcctaccttgctcgatcaaatccacgaggctcagaagaatgatccggatatgcgtggactcctcaagaatatgaaacaaggtaaa

SEQ ID NO: 23065 - DNA, 10652 bp, Oryza sativa
cgtcgccgctaacccgagccgccgccgccttcttcttcgtcgccggccgccgtcgtgcatcattttgggtcggggtgagtaccaatgggttcgcctcgttgccctctacgcgtaggtggtctccgtttccgccgccgatgtccctagcgccggcgagctcgtcgtcccgagccggccgccgtcgctgacgtcatgctgacgtcaaccttagggctgacgtcattgtttccagggctgacgtcatcatccctttttccttttcctttttccttttttctaatagatcaaatctttggaaaatcataactaaataaccgtagatccgttccaggtggttcaagttgctaaattcttctaaaataaagatctacatattaaaattgtccataaattgagttaaatttatttaattctttttaaatgggctttaattagatttaatcttgtaaaattcataataaattcatttgaagtcagaatgaggccgttcaagtctcataattcatctaaaattatgatctacatgtttgtttactttttatgtactgttcatttggtttttattagtctttttcttcgttttgcgtgttagcttgtcgtttccgtcgttgcgaaggttcgtgagtgcgccggaagtgatcaagaagattaattgaagaccgattattgcaaggcaagtcacacagatcctaaacacaatcctttgagcatgttgatcctatatttaaattctctatttatttcaactgtgcatttattttcgaatgtcaccgggtggtgtgaacctattcctttgttatggccaatttgcattgaatgccctattccttgataccttgggtaataaattgattagcttgaaccttatgtattggtttggttcagctaaatgtcatatatatatatataattgcttagcaatgcttagaaacattagctcattaatgggatgaattatatacactacattattattatggttatatttaatggcagctcacgatggtcaatcgtgattggttaattaattatttgccaattaaaacttgataatggtgggttgtgagcacatggttttgatggttgtgctcatgacaattaaggaccggttcgcgagctactgttgtgaaacattaaccgtaccaaccacaagccagcgtgggcaacggctttatcttttgtatagcgtgattcattatagtgtgccagactgtgaagtggcgagaagtccatgggggtcgctggggagtccatgcctctggttgtagagggggtgattatgatccaggaatggtgcactgtggtgagttgtgttatgcaggggataatgtcacagcctctattcgggtactttccagtatcgcgacgcatggttgacatgatgttgaggctgtgtcttgtgggtacagtggtacacctctgatcagagtaaaactattcgaatagccgtgcccgcggttatgggcgagttgagcaatgtttttcgtgattagtcccacacctctcacaatagttatagatgttatacctggtaataatttgcttagctcctggtttggagattagatctgtacagccgggtatggttgttcaggatggttgggcctgtgcagcatgggtgtgctgttcagtgttgattaaaatttctgattaattactccactgttttacttctcttaaatgttttgctaaatgctgcctttgcaaatgagcctatattatgccatcctttggtatctttgtgcacttgcatatttgctgtgtggcttgctgagtatgtcatatgctcaccttgcaataatcaatcaacctcagttgaagaaaaaggatccagaaggagaagacgtttggcttaggcttataccccagttgagctgcctgtgggagtggagccggagcttcgctagattttattttcccgctgcagttttcttcttggtgaggactaagtgcctcttaagtaagtatttatcggtttagttattatgatggatttgtatattaaattgtcagtttgtgtacctcggctgattcctggacgaggattttatgcacaaatcagttcggaaattattagtgaatttccgggcgtgacaagttggtatcagagccatctcgactgtaggataagccaaatggtcaaaccttaaggactaattttccgaaaacataatttgtgaaagtttctcttttcttccttatctagaattcttcgcaaatcgttttgtcgttctctcctcttttccctctttcaacgtgagtagttgttaaacttgatggagaaactcgaaggcgtcgatgttgtcaacttctgcaagtaaagtggatcgaggaagaaccgaagtgcccagatatcaagatagagtgaagttggatcctagtttagaacctatgccgccaaagtgtctttgaagaatagttagtaggatagaacgtttgttgcttgcttgtgtgtaggtatggttgcattcccgtcattggagtagtccaatgatgagtgtgtaactatactaggttgtttgcttaatcaacttgaacaatataatggtttacacacatcagatcagtgttaaactggttaaggtcttgtctttagtgtaacccctctccttctatcttctctaatctgcaacagatggtgaacactcgcactagtggaagtggaaacaataacaatgaagagaacccaacccttgctcaagtgctggctcaacagacccaattgatcaacatgttagtgcaacaaatgcagaaccagcaagggaacaacaatgtcaatcctccgccgccgcagaacaagttagctgattttcttcgtgtgaagccacctactttttctagcactaccaacccagtggaagcaggtgattggctgcacgctgttgagaagaagttggaactgctccagtgtacggatcaggagaaagttgttttcgcttcacatcagttgcaaggacgtgcttcagaatggtgggatcatttccggatgaacagagcagaaggacaaccaatcacttgggcggagttcactgaagcattcaagaagacgcacatacctacaggagttgtttctttgaagaagcgtgagttccgggcacttaagcaaaaggatcgtacagtgacggaatatcttcatgagttcaatcgtctagctcgctatgctccagaagatgtgcgtactgacgaggaaaggcaggagaagtttttggaaggcttaaaggatgagctgtcagttatgttgatctctcatgactatgaggattttcaggagttggttgataaagcaattcgactggaagacaagaagaacaggatggacaatcgtaagagaggaaggattgttttccaggaggcacaggatagtagccagaggtagtgtatcaagccactccaaattggtgaatctttttctgctggtcaaggacagtcacaacagttgggcatcagtggtgagattaactcagagactaatgcaagcaatgaaggcaatgatgagcaagctactcaatcagtgtcatttcagcaggatcagtctcaagaagataacagtaatggaagggagcagcgggtgtgtttcaattgttatgagccaggtcacttcgtaaaagagtgtccgaagccgaagcgtcaacagccacaaggccaagtcaacaacattgtcctcacaggagcaaatgcagtgccggttgtgtcttcaagtgttacaactcagccactagtatcaaagcagcagtagttttctttaaagccttagaataattatcgaagttatggaataagatagactgcagtttatctatgccctttttctttctagccgttccgaatctcgggacgagattctttgtaaggggggtagatttgtcacatcctgattttcgtttcaggatttataaattatttaataaattattaatagaatttatattaaatgttctttaatttacaagtgaagttaaatgtgggaaataaaatttcctaaataaaaaaaaagcatggatggatttaatttttattaagtcctccatgattaattatactctctcgaattttctcggatttttcggagctcaattgttaattttaatcatacaaagaaaagttcagcaattatttaaatatcaaattaatcaggtaatgatctaattataattgttaagtgattttcttgtttaaaatccttaaattataaattgttgtttaaaaggaattattagaaatgattttaaaagtttaaaagagaagatcttttcttttaatttgctaaatctcaacataaaaatgagctagataaaattttgttaaatactttgcttgttcctctattttctagatttttctgggaattatttgagcaaaggaagtatttttaataaatgaaacatcatttcacaaattatttttaattgaaaaagtttttaaaatctcctcctaggccgttgggccgaatccggcccaactcctctctctttctctctcttcccgcgcgcggcccacgccggcccagccgagccgcccgctcctcctctctccagccgctgacatgtggggcccacatgtcagggccgtcttcaacctccggccgccgcgccgccgaagcccgaaccctagccgtttttgcgccgccgtttccggccgaatccgaccccatctcttccaattgattgaggggttttgttcctctcggtctcctctttcttttcccccaagaatcaaagcaaatggttgaggattcgatccgaatcgaactcgttttgttttatctctaaaaaacgagtccgagttcttcccgattcgattcctctcgtttgcgacttgatctcttcgattcgagctcatataaaccttccccgtgatctcctctttcgtttgccccctttcctgagtcctcccgtgcctcctagcgccgtcgcgacgagctccaagtccgccgccgccgccggccatcttcggcatcgtcgcgccgccgtctccgtcgtcgctgtcggtcgccgtcaccaccgttaggtgcgccgtgaggagaagaagctcggccgcccctccgtttttgccgttgaccaccggagcgccgccgtcgccgctaacccgagccgccgccgccttcttcttcgtcgccggccgccgtcgtgcatcattttgggtcggggtgagtaccaatgggttcgcctcgttgccctctacgcgtaggtggtctccgtttccgccgccgatgtccctagcgccggcgagctcgtcgtcccgaaagctcggaacagctcctgcggtcggtggagtcgaaagcgtcctcctgctcgtcaccaggtccctctgagcgactcctggagcctggcagatacgtctcgccgctgcctgactgcgagccactggagctgctgctgctgagatcgctgctgccactgggagtagcagacaaccaacccccggtgccactggctggacctctggcggctgacgctggagcgaaggagagagcggacgcgggagctggagctggagctggagctggagctgcaggaactgcgggcagaactggaggtgctgcgggagctgctgctggaggtgggtttctgggcgcaagctggatgcgcacgggtgccgtcgtcgtcttgcggggcgtggtgcggatccggactcctcctggcgctggaagaccctttagctgagcgttctccttcttcaggcgcgctatctcgtccttcaaagcgacgatcctcatgagcttcccatcgttcaaggccttggtcgccttgtgcaggtccgagtgcatcctgtccaatcccctcatcacagcacacatgtgaccgaaggtggtgtcgttctcgccagctgtcggacggaaggagctgacgccatcaccgttggctcgactggggtggtagcggtacgccgtgtcgtggaagatgtagttgtggcgctcccgtagtctggccatcatcaagtaggctgcctcctgacaggcgtgatctgctgtgcctccagatgcctcgaccgccatgttggcgaggcaagtccccacgtaaccatggacctccaagcggacacggtgaggaagctcgccactgagcggtggaatggtcgtgtactccggcgcgtcggggtagcccaccaccagtgtcatgcgtgccaactctgccacgaaatcgatcatgccttctccgcggtggttgggtgggtgaccggccatctagagaagacaaaggagtaggatcaatgcatgctcaaatccaaatttaaataaagcaataaaagactcaaataagggaatcaaataagagcagaattttatgcatagatcattttacatgagagcgaataaataagacagactcacataacgataaaataatgagaaattagatacataataataataacgaacaaagcataaataccttgcaacccatgttacagagctaggacctaatgcattgcacccatcaaaccccaactaactgacgaataaatcccaataattttactaaaaccctagactgactcgttttgaaaaatctcacttaaacgagcgaccaagatttttcccttgaaccacaagaacagatccccattttcccggaacaaaaccaattgcaaagaacatatgcaatgacaaggattcagagggctcttaggtttttccatttggcttgtcctacggtcaaggtcggctctgataccaacttgtcacgcccagaaattcccgaatagaattccaagcagaatgtgcaataaaatccccgtccaggaccagccggggtacacaaacgacaatgttgacatacagatccacgtcttacaaacatcataaagttttacataaatgcagcggaaggaaagaaagacaacaggagctaagccttgactaaactgcagcgggaacaccactccacaggcatcctcgacggcaaggacgaagcctactcctcggagaacccttcatctggtccgaactcaaactctggggttgggaaaagtagagcaagactgagtactacccactgtactcagcaagtcataccggaatagaggtatgatgcagggaatcatcaaagaaaagctaaagtggttcctttgcataaagcgagcatttataaacagagatttcaagatttaaacagttgtaataagtaattaagcagtattaatcatccactgtccaacgctacaccacgttgcaacaggcccaaccatccacctaaactatccaaattaaaggattacactaaggtgagactaatcacggtgaatctggttgaccgcccatgaccgcgggcacggctattcgaatagttttactctgatcagaggtgtacaactgtacccacaagacacagccccacgacacgtttccgtgcgccgacatgccaccacgacataccgaaaagaggccgtgacaggacccttcgcataaccccctctagccaagcacaccacacctcaggtttcacccccgtccccagcgggcgacgggcagtcccctctcgtgcctaggtgaatccggaagtgacagaggccgtcgcagggcccgccccgctccatcacgcccacccttgcctggatgcgtcgactagaggaaagctacactacaagcccagccgttgcccacgctggcttgtggtaagtacgataaattcttccagggcatcccgcgaaccggtccttaactgccatgggtgcgaccagcaaaaccatgcacccacagcccaccatgtgattcattttatttaaccaacaccagagcggtggtattaaaccaacattatcatataaacttatagtctaggttttaaatgagattccccattgtgtgctagttgaactaggcatggctaagcaattcctagtccaaagtctaatcatgttataacccaggctaacaaaggagaatgatatccaaaagcatggctataacaataggtaaccatcccatagtactattataaaacaatgcaatatttgaaagaaaacaatagagcatttgcaatataggatcaacatgttcaagtgacaagcatgacttgccttgctctgctgctggagggacctcggcgactatctcgaagtacaccgaagcgtcggaggaatcggaatctagcgacatacaaagcaaatattgcaaacaggctataagactactgaaacagagaacaaaaccatttttaatggattctacacatttttcttgatttactgagacttgaatggacttaaacggagctcggatgaattagttatgaattttagaaggttcactgtgtttattactataaaagaaaaaccttaaacaatttattgcgcaatattaaccagggctgacgtcagcacgggcggcgcggcgccgacatgcgggacccaccggtcagcggcacggggaggacagaggaggcgtcggcccgcgggcccaccggtcagcggcacggggagggcggtctaccgtggaccgggaccacgcaggtgatccaccgccgatccacgggaccgacggcccggatcgccctcgggccgatcggacggacggcggcggcggcagcccccgggctcggatcggcatcaaagccgatcggccgacccggggctagcggcggcggtgcgtgcgcgtcgcgtcgctggcgacggcaaccggcggcggaggcgacgcgaaagcggcggcagcggatggcggcaacgacccaaagcgacggcgagcgcgggcggcggcgacgcacggggaaacggggaaggagaggagaggagatgcctcaccgagggtggccggcgcggaggaagacgatggcgaatggcgacggcaagccacggggggcgacggcgaccggcggacgagctccggcgtgccctaaggaaggagaagggagggattagagagagggagatagaccccggcgaccggcattcgaggccgaaagcggcggtagggtttagaccctatcggagcgcgaggagacgggggttccggcggcgaacctcgacggggaaggggcggccgaggtagatctcgaccccgcgaacccgacggcgacgacggaacggtgcggcggcgaccctagcggtggctagcagcggccgaagtagcaaaaacggcggcggcgggtggttgcacggcgcgggagcgttggggggctcgggagaggtcggcgcaatggggaaaaagagagagggggtgccggcgatgcttaaataaggggagagggggccggacgtggccgggagcggcgggaatcaccggccgacgtgggggagtggggaggagagagaggcgggattcgattttcgaatcccggccatctcgggcgcgggcgcgagcgggagagagaggggaatgggcgcgggggatgcggcgcacgcgcgggcgtggtcgacgtggcccggggaaggcggagacgtgggcgcggcgacggttgcgggcgcggcggcgcgccgggatcggcgggaggagggagacgggcccgacaggtgggtcccacctgtcggcgaccccgggagggagggaggcgggcgcccggctgccgggctgggcctcggcctgcggccggcccagcagagaggagggggaaagagaggggaaatgggccgacggcccatttaacaaaaaaggaggaaaaagaggggaaaaagaaaaagaaaaaggaaaaaggattttccctggaattaaaaattgcactttggtgatttttaattggttacaattgtttctagagctctgaaaattccattaaaaatcctgttaatgaatttcgacatgtagaactcaagaaaaattccacatgtcaaatccgattattatttgcattattttcttagggttttctcctgatttcacctgcattttcttagggtcttttataaattacaatttggcttgggaggaaaacttcggggtgtgacatcagcgcaccttcagaggcggacgacattcctgtcccactctgcgagaaggactcgaccgaacgcgccgccgcgattaacgtgagtgtactcgatgattcctttacatctttcttctcgagatcgcgttgtgacttcatattgtgcaggctctccctctgacggacgccatcggaccactcgtggatcactaggtggtgacgtcgttgaaggagggcgtcaccaaggaggcatcagacgctgttgctgccaccatgtcacgactggaaataacccaacaggcattccttatgtgcgtgcattattccttgtcccaggaggcaaggtacaccaaaagttgatacaattcagagtttaacaagcggaagcgtaaataattaatttattacatgggcggcgaaggcccagcatacacaaagacaaacgggaaacagcggaagactagggcgatgaccacaggcgcttaacggcaggcacgagctaaacaccaaagccttcatcattcaggggctcctcttctgggtttgggaaaaattgagcaagactgagtacaaccaccgtactcaacaagacacacccataagtgcagaataaatgcaagggagtacaagggggttataatataagggttaggatttgcagtaaacagcattaaaagacacttagttgctcaaagctattttgtaaatacgatcctagagctataccagattattaatgagggccgtcaacccacacgaatctgccttaacccaaggcctacgatgattcag

SEQ ID NO: 23066 - DNA, 6088 bp, Oryza sativa
cttcctcttccgaatgatgactccactgaactcggcaaaaccgggtgaccttgtttctggttctcctttcgctggtatccagtatacgaaccggcttctcaacataagttaggtcttcctggatatcaatgtgttccgaatcagcctgttcttcaggtacccttaagcacttctttagttgggacacgtggaacacgtcatggatgccgatcatgttggatggaagttctagctgataagccacttctccccttcgttccaagattttgtatggtcccacgaagcgtggtgccaacttgcctttcgtctgaaaacggtgtactccccggagcggagtgacgcgaaggtacacgtgatctcctgcctcaaaagtgagctcccttcgacggttatccgcgtagctcttctgtcgagactgagcaatcctcaacctttccctgatgattctgactttctcttctgcttccgctaatacttctgttccgaatagttgacgttcgcctgtctgatcccagaagagaggtgtgcggcacttccggccgtataaagcttcaaacggtgccatctgtagactggcctggtagctgttgttgtacgagaattccgcatatggcaagcttttgtcccaagctccaccaaaatcaagagcgcaagctctcaacatatcttccaagatttgattgacccgctcggtctggccatcagtttgcgggtgataggccgtgctgaaatttaaacgggtccccaattcttcctgcagcttctgccagaattttgaggtgaactgactccctcggtcagatacaatctttttgagtactccatgtaggcacatgattctcgaaaggtaaagctccgccaaccttttgcccgtatatgtggtatgtactggtatgaagtgagcaaccttagtgagtcgatccacgactactcagatcgaatcgtgacccgacgatgtccggggcagtcccgttataaagtccattccaatttcttcccatttccattccgggatttgaagaggttggagtaaacctgtgggtctttggtgctctgccttcactcgttggcaaacatcgcagagtgcgacgaattcagctatttctctcctcatgctgacccaccaaaacttttctttgaggtcttgatacattttggtgctgcctgggtgaatggagtactgggtctgatgagcctcggtgagtatcagatccttcaattccttgtcgtcaggtacacacaatctttctcccatccagattgtgccatgctcatccttaaggaaatcccgagcctttccgactctcatgttctttttcagttctgctatttccggatcatttacttgagcggctctgacttgatccacgagcgtaggccgtgcctccagagcggctacgaacccgtgttcaacaattcctatgttgagatgttcaaactcctgccgcaattcctcacacatgctctcgatgcatagagcagtgcagtaacttttccggcttaaagcgtctgccaccacattggccttacccgggtggtagtgaatactcatgtcatagtctttgattagctccaaccatcttcgttgtcgaaagtttaggtccggttgggtgaagatgtatttcagacttttatggtccgtatatacttcgcagcggttgccgatcagatagtgcctccagatcttcaaagcatgaaccaccgctgccaactccaagtcatgagttggataatttccttcgtgtggacgcaactgccgcgaggcatatgcaaccactctgccctcttgcattaggacacatccaagtccgtgacgggatgcatcgcaataaacttggaagtctttcatctggtcgggcagaatcaaaactggtgcggatactaatttcttcttgagctcctcaaagctcttatcgcactccgctgtccatttaaatttctcatctttcttaagcaactgagtcatgggtcgggcgattctggagaagtttccgatgaatcgacggtaataacctgccagtcctagaaaacttcgaatctgcgacacagtcttcggtggggtccacttggtaactgactccacgttcgatgggtcgactgccacaccctgagctgtaatgacatgacccagaaatttgacttccgtcaaccagaaatcacacttgctgaacttggcgtatagctggtgctccttcaacttctcgagtaccagacggagatgttgttcatgttcttcttcggattttgagtagataagtatgtcgtcgatgaataccacaacaaacttgtccagaaattctatgaacactttgttcatcagattcatgaagaatgcaggcgcgttagtaagtccgaaggacataaccgtgcactcatataacccgtaccgagtggtgaaggccgtcttcgggatatcctcttcccggattctcaactggtggtagcctgagcgcaggtctatcttagaaaacactttagcccctttcagttgatcaaataaatcgtcgattcgcggcaaaggatatttattcttgattgtgacctcgttaagtgcgcgataatcgacgcacatcctcttcgtcttatcctttttctccacaaaaatgaccggagcgccccaaggtgaagtgcttggtcgtatgtaccctttctgcagctgttcatcaacttgcttcttgacctccgttaattcgttggccgccattctgtacggtctcttatagattggagcggttcccggtgccaaatcaatccggaattcaatctctctcttgggtggcatggtagtgaggtcttcggggaacacctctggatactcgcagactatgggtatatcatccaattttctcaagttcttctctacggtgtccactgggatttccgtctcaatctgattcaacgagactcctttctttggcgagactagagatttgtacaccacggtttctcccttctcgttggtcagggtgactgtgcgattcgcacaatcgatgactcccttaaacttggtcagccaatccatcccaagaatgacatctaggtctttggattcgagaaggatgaggttggctagaaccggtgacctttgaatttctattgttatagaagggctgaattgaaccgaagtggagctattccctggggtatgaacccgcatcggtgtgctaagttcctctcttattaacccatgcatcccgacaaatttctttgagatgaaagaatgcgttgcaccagaatcaaaaagtactgttgcagggattgagttaacaggaaacgtacccagtacaacctctggtgctgcttgtgcctcctccgcagatgcgtggttgacacgagcctggataaaccttggcccggcacgcctaggcttcgggcatttgtcagcgaagtggccaagctcgccacagttgaagcaggaccctggttttgcttccgtctccttcttggcttgcgcgggctggcctgactgtgccgatgccactggtgggcgtggagctgcaccgcggttgggctgacctccatggtggttctgactgtcactggtgccctggtagaagttgctagggttgaacgggcggtgctgacggacgatcatggtggtaggtccaccctgctgtccgggagtgaagcgcggcctctggtgacttccctgatgtgccctgaactgagcggccttcctcttcctgtccatcttgttgcgttggtcctcctgacggattgccttgtcaaccagcctctcaaagtcagcgtagtacccggatatcagctggttggtcagctcatcatccaggcccgccatgaacttctcctgcttctcggcgtcggtgcggacatcctctggtgcatatcgcgtgaggcgattgaactcgtggaggtactctgtcaccgtcctgttaccctgatggagtgcacgaaattccctcttcttttgtgccacgaccccatctggcacttgtgccttcctgaagctacggcagaactctgcccatgtgacttcagtacccggtgggcgggtggccatgtggttgtcccaccaagctgacgcaggaccctgaagctggtgtgtggcgaaagcgaccttctcctgatcattgcactgcaggagattcagcttcttctctattgcatggagccagtcatttgcctccatagggttggtggtgctggagaaggtgggtggcctgactcctaggaactcaggcaatttggattgagggggagggggaccaaagtgctggtgctgctgttcgacgtgctgcatcatcctctggtgcatttgctggtgttgttgctgcatctgctgcatcatggctgccatcatctgagtctgatgcgccataacttgggcaagggtcggattctcgggaagtggtggcggaccattgccggaatcactgttggggtgcacgccatcaacgcgttcttcgccgttgctgccctcgcctgtcgtgcggttgccagtcctggtgtagaccatctggagggaagagcagccggggtaaagaagaaaaacagatgctcaagaactaagctttattacaaaggaatttaaactgcaattgttctgatctgaattaaaacacttaaaagagcaagcaaccaatccttattaagacagccataccataggcacatgatatcgaccgtcgtctgacccaaacaaacaacctaaacacacaaactaacgaacaaaagctagacagtcggtaaactagtgggaaaacgagcataatgctcggaacggctcctgcggtcggtggagtcgaaagcgtcctcctgctggtcaccaggtccctctgagcgactcctggagcctggcagatacgtctcgccgctgcctgactgcgagccactggagctgctgctgctgagatcgcggctgccactgggagtagcagacaaccaacccccggtgccactggctggacctctggcggctgacgctggagcgaaggagagagcggacgcgggagctggagctggagctggagctggagctgcaggaactgcgggcggaactggaggtgctgcgggagctgctgctggaggtgggtttctgggtgcaagctggatgcgcacgggtgccgtcgtcgtcttgcggggcgtggtgcggatccggactcctcctggcgctggaagaccctttagctgagcgttctccttcttcaggcgcgctatctcgtccttcaaagcgacgatcctcatgagcttcccatcgttcaaggccttggtcgccttgtgcaggtccgagtgcatcctgtccaatcccctcatcacagcacacatgtgaccgaaggtggtgtcgttctcgccagctgtcggacggaaggagctgacgccatcaccgttggctcgactggggtggtagcggtacgccgtgtcgtggaagatgtagttgtggcgctcccgtagtctggccatcatcaagtaggctgcctcctgacaggcgtgatctgctgtgcctccagatgcctcgaccgccatgttggcgaggcaagtctgtcacatcctgattttcgtttcaggatttataaattatttaataaattattaatagaatttatattaaatgttctttaatttacaagtgaagttaaatgtgggaaataaaatttcctaaataaaaaaaagcatagatggatttaatttttattaagtcctccatgattaattatactctctggaattttctcggatttttcggagctcaattgttaattttaatcatacaaagaaaagttcagcaattatttaaatatcaaattaatcaggtaatgatctaattataattgttaagtgattttcttgtttaaaatccttaaattataaattgttgtttaaaaggaattattagaaatgattttaaaagtttaaaagagaagatcttttcttttaatttgctaaatctcaacataaaaatgagctagataaaattttgttaaatactttgcttgttcctctattttctagatttttctgggaattatttgagcaaaggaagtatttttaataaatgaaacatcatttcacaaattatttttaattgaaaaagtttttaaaatctcctcctaggccgtgggcccaatcc

SEQ ID NO: 23067 - DNA, 3837 bp, Oryza sativa
aatagattatactctgatcagaggtgtacaactgtacccacacgagatgaacaaggatcaaatgctgcccaccacacaggtgcgacctacaagtgattcaagctcatcacatatcctttcctagcccgaccccaaccatttaaaccacaccgaggcccccgacgactcagtcacgtgcgtgtgatgtgactaaggcgggctcaccacgcgggagataccccatgccatacctcggccaaccgggcactccgcggatccgaaatcctcacgtttctccgatgggtgtaaatgatcacggtaggtctagtaatcaaacaagccggtcccatgatacggcatgtggtaagtacgtaggttgcttgaatagacgtcaaaatgttcagtccttaacgacccagacggagctactgcatcaggggaaacatacctcccatcatcgccctaccacccgttcaagtcaatcatatttcatcaaccattatttaatgtaagtgcttcagttttagcccattaaccaagttgtctatatcccagaattaacaaaactgtccagccatatagttgtatccccactaagcaaaactaagcataatgaataaaacatcccaactattcccaaccaggagagtaataggtatatggcagctatatataactaaggtaaatgcaccaattaattatataccatgtcacccaaaactattaactaagcaaatgcatatatatatatacatatatatatatatatatatatataggacactcatatggggcaccatggtgcccgggcaccatggtatcaaatgcacaaaatcacttaaattttttaaaattttcaaattgtgagtatatactagttataataactcgattcatacctatacctatcaacaaaacaactcaaatttaactttatttcacaatccatgattacatacctaactaattatatgtatggatgctatatacctagaatcaaaatctaacaaaaataagttcaaattcagttcaaacttgctttgaactagttagtaaagtagctaatgttaatatctaagtaattgaaaaagtttcatactcatttgaattgggtatatactcaatttcaacaatggtgcccgggcaccatggagcaccaaacaaatttactatatatatatatatatatatatatatatatatatatatatatatatattcacaaccaaagtaatttaagtaaaacatgggtgctagatgcttaggtgctcgccttgttgttgcagatcatcagactcaatctcaggttcttgctccacgtactccgaaacatctgaatctaccgataaaagacaaatatgtaaataagattcaaataaacatgcatatgcaacatgctctataaattgatagataaatacagtggacaacgtacaagttgacataaaaactacatttgctgctctagcttaggagatacacaactaaccagtcatatacactaaaatggcaacttttgaaaataaaacaaacagacccaaccatatactgatatttttagcaaccttacgtgaataaaacttatatcacaccaaggagccaaattcactggttctaatataatttgaatcacccaatttagacttggaatgaagtaactatgcgcgttgacttaatgtgacaaatggaactgctactcgctgccccttagcagaaatttgatttcatagcttacaattgaaagaaatgatataggtgcataagctatgtggtgggataattgatttagttcggtaattattagcacatgaatttagtgtaattacattgtaactccagttatctctttctcatatattaccaagtgactttagttccatcctcctctgaatatccccatgcttcttgctaattaacaatctacctaaagcaccaagaacagtgttcctagaattttgcaactactagctattggtggtggagttcagtggcaaagcaatctttgtgaggtccttttgtgtgagagaaaacaaattgccgaggtgctgaaaaatctcaccaaaggatgaggtgcagcaggctggccctaattttcttagggacgacaaactcaacaacaacttggatcactaatgcaaatcaccatgatccactgatggctgcagaaggataggtgtgagctcatttatatcctacatttggtgaggttgcagtgcctggtacacgggtttaccggagaagggtatcaaactatcaatatagaaagagcacgatcaagtagtacaaggaagaacaatacaaaactcaccttgcgctacttgcaggacaaaagcaccgtgagtacttgatcctaaagctaagaacataaatctacaggaggtagagacatgagaactcaccaaaacagaggaactcaaaggaaacatgggttattgttgctggagtggagatatatgaattgtagctgctctttgctctcaagatttaaatcggtgacccatagggagggggagaaataagggattgttagcattataggaactcaagtagggagccatggatgtagaaagaacttaccaacacagaaaagaaacgtgtcatccagctgctgcaacctcgcagcctgcagctccttgctgttcctccttcccgatctctctcaaatggccatgcatgtgcaagatatttggatggatggaaaacctagagccccagggatccaaaggtgtgacatgcagggtttggttttggatgtttgaagaagattttgggggagaaagtggggagggagctcagcctaaggaagaacgtaaagtggctagcaatggaaagggaggaggaggaagatgaagggtttttcttgctgtcttaagttcctgaggtggggttgcacgcccaagaggtgatctaggagatatggaaccggccaggtcagtaagtcgaactgggcccataggacagataaagcaaggttagaaacatagatacacaatgaaattagtgaattttcaggaattttctctctctccttctggttaactagtttgacctagctacaagaattccaaaaatgggtgatctggtgtgtgtgcatagcttgagttacctagtttccatttttcaaagtttcactcaaaaattcgaaatatgttaattctggcaaaaaggtgaaaagggatatgctgagaactaaattgaatttcaatgaggtcaaaactaagtgtaaaaattgtagaaaaattatattaactcatgataaataatctagtatttgaataaattataaaacatatatccttctgatcaatttttaagcacatttaggagttgcttcattttcctgatcaggtttctaattaatcaatcactgtgactatacttgactgatatatttgaggtagtaaaaagagtgataaaatgatgaaacctttacagtggtcatcttaggttgtctaattgacatgaggacctttatggaattttatgttgcttagatttgttacagagtatctatgttcatttaacatgtaccaattagccaaacaaagaaaatcatttaagccaataaattggactacactacaaccaggtacacaagcatacattcactagttactcaatctactagccaaaagctatgcgtgatcgggtagattatcaaataagcgaaatatgagttacaaaattaccgattggtcattcattatagttaaatacaaagaggtttcaatttggctttagagctaaaagggagaaaaggaaaggtggatcttcgtgaattatctggtattgagtcgtgaattatctggtattgagttggcttagtctcttatattctcgttccattcgtgcaaggaa

SEQ ID NO: 23068 - DNA, 6852 bp, Oryza sativa
atgatggttacaacctatgcgaaatgaccaaactacccggaaccgccattaggatgtgatcagggccgtccacacaaaatttggcgatcaacggccaccaaaagggttcgaccgaactaggggacggctccgttcggcccatttttcatcgtggacactaattttaaggccctcagcccaatggcatgatagttgggcccatttggagttatttaattgacttatagggcctccaatccgtgtaaatgtgtcatgaatgcgcggaggtgcactttggcgcttgacggatgtgttttcttctcaaaatacctgcatacacatatttcaccaacactagtggaaataattagtaataatacctaccactaagttggataccatgttttatttcattatatgcaggtattgacggtcagatattataatttaaggaccgtcaacactctaacacgtgaaaaaacaggattcttctatttttatattattctgggtaagataaactactccctccgtcccaaaatatattctttttagcatagtgccaagtcaaatattcgtaactttgactattaataataaaaatataaaaaagatcaattatgtaaaattgatgttactagatttatcattaaaaaaactatcgcaatatgaaaatctttttatttaaaacatattacttttatagatatcattggttaaagtagcatctcaatgaccatgtcgaagtccaaaagtgcttatattttgggacggggggaaaagatagtagtatttaggagtactactgtactcaaagcaagacctgacaattgaggaaaaccaactatgtcacttactgaatgggagtccaaacaaaaaaaaaaaacattttctctctctcttttgttaaccaaaagttgcacatatgataaatgaaagtctagaagccttttactcttttttttagacgaaaacttatatttctggaaaatgagtctattatctgaaacaacctaaatatttcattggcatatagattctgtttttttttcttttttcacatcatcgctctgttttacattttcctggtatatgcttagaattcacaatctactagccaagtctcctcttctgaagattaacaaacaagcaatcatgatgcaggactcaatcagctgataatttctgaaacaaagatggacttgaactgctttctacaaattttctgaacatgaatttgattacataaatatgcttgcaatggataatctgaagaataagattagactgattgcagtgccaatgtgctaatggccttttgcaatcatcacccctaagagcaggtacaatagtgctattaagccggctacaaaacttattaatcagcttaatctgagattaatgaaagaaaatcacggggaaaggaacaagcaggcgcttgttttggcgccggcgcttgcacagcacccgaaactgtacgctcacatgcagccaaaaagacgataaaaaatacatttatgtgggtcccacatggaaccatgtaactatttaatgtatatatgtatgctttaaccaatgcagcttatagctaacttgtagttagtttgttgtatgagttgtctctttaagttagctctattttaacatgacaaaattttggagcttgctgctagctatactattgaccttgctctgagacaagactaccaatattgctaagttacagactgacagacagaataggtggtgtgcaggatcctgtgggctgtgagcctgtgaccatgcattccaagctgccagatcatgatactaattggatgaactacagttattacattcaagaatcaagatggaagttcctgttccttttcagaatacatcgctccatgtcgtctgaagaagccgatgttgttcagtcttataatatgaatatgccttcaggtagtacaccaaagaaacaagattacgctagtcaaatgcctatattagtgaatgcagagtactctgctttcttcttctttttctatcaaaactctgattctgacagatgaagtctattgtctgaaagactgaaacaaccaaaatactccaacagcagtgatcacaattcacaatgtgtccttttgcacaacggtttccattcttttggatgtcacttttcctgaagactaaacaaacaaaagcatccatgaagcaggactcaaaacaaactgaatattgtaaaattggggaacactactctactcaagcaagcactgaagtctgaaagtgcccaaacaaaaaagatctaaaactttctctcttttttgttaaacaaaagctctagatatgataaatgagctataaaatttttttactccatcttttcacagaaaaactcagattctgacaaatgagcctattgcctgaaacaaccaaaatactccattggcatagacgactctgtgtttgatattcctggtagcttatgtactcaagacacaatccataattccaaatactacaaaactattcccttttcctgaagattaacaaacaagcagtaatgaagcaggactcacaaagctgaaaaaaatatgatatttttattgaacaaagagggccttgaattgctttgtacaaattgaataggatttacataattatgcttacaaatgaataatcagaataataagattacactaattgcaatgccaatttgcaaatgcaatcatcagtcctaacacatctaactgttctaagttacaggcggactgtcaaactgaaactgacactctctgtcttcttctcccagagctatccaaacagaggcacgaagccagggaactctgctttcttgggctcctcggcgaaccacctgtgctccagcgcctccaccgccgtcatcctcttctctgggtcgaaagccagcagcccggacaggacctcgcgcgccgccggcgacagctccggcaggacatcatagaagagctcgttgagctggtcatccaggttggtggacaggtcggcgagcagctcctcctcagtcatgtcgcctccgaagagcggcgcgccggtgaggagctcgcccatgatgcatcctaacgcccacatgtccaccgcggggccgtagcaccggttgccggccagctgctccggcgaggtgtacggcagcgtgccggggcggcacaggtcgtacggcttcccggcgggcttcatcagcgtggcggccccgaaatcacagatcttgagctgcccggagaagctgacaaggatgttctccggcttgatgtcccgatggatgacgcgcgaggcgtgcatcttcttggcggcgtcgacgagcggccgcatcatggcgcggacgatgtcctccgggtgggccctggggaactcatcccggaggctgcttccgacgaactcgaggacgaggaagaggtcacctgtcttggcgtcggcgacgacgtccttgatctggacgatgttggggtggccgcggcaggcgtgctggcaggcggcctccaccctgagcgcgtcgaagtcgggggcgaagcggccgccctcgtccgccccgatgaggcgcttgagcgcgacgaccttgccggtgcggcgatcccgcgccctgagcaccacgccgaacgcgccctggccgaccacgtcgaggcgctcgtagtcatcggcgctcccgaagttgtaccgccgccgcttcggcccgctcgccggggaggatccgcagcaggcacggggctccagatcgtagggcgccgcgcgcttgcggctcgccaccgccgaggacgccatgggcgggggaggaggagaaggaagcggatgggagaagaggatttggatttgggaggagcaggcgcgttggttggcggcggatttggagaattggcgcttggcggtggtcggtggatttatttgggggattggtgagtccgactccgactcgttctggtagataggctgcgtcggacggtcacgatcgcaccaacatgatcggtgattctagaattctggagtgtttttttagataatgtttttattttcctttttgttgcgaacgattattatacacaacctatgcggcacatgtagcggtttaggagatgtgttcatcttgcttttaatctgcttcacacattctgttagatccatgggcatgcatatgctattatttgcaaaattatgatttaaaaaagtctttatgtggttcatttataaacaaattaatcctaacaaaagataactttaaaaaaaattggagaggaaacaagcaatattctttttttactatgcatgatattactaagcatcttttcttggagaatttaactatttacaacttttaggtttggcaattataatttttttccctcctaagaggtggtctgttaactattcgccacttttgcccacatggcatgtcagcgtggcaaactcaagtgaaaaatggtgtgggactcactcatcaatctcttcctccacttcatctctctcctcgggttcgcgtcccgcgcccatggtggctgccgccgtcctgagcccatcccgacgcgcccatggccgtcgctattatcctgagtccatcccgacgtgcccgagaaacccagcacacgccgaggccgctactatcctggcgagccccaggatcgagaggatcatatgctatccctcggcgctcctgcgcctatcgctgtcgcctccaccgtctccacgccatccgcgagctctgcgccgtatttggtggtggtgtaggagctctaggactgcttggtgcgccgacgccgacactgacaccgacgccgaggttgaggttgaggttgagcgcgccgtgctgctatcgctgctaccgaacatcacggcctcggctgccacagcagctgaaccgatgggcgtgacagggacgcgcgtggcgccgggccagcgggttggcgtcgtggatgttggcatcgcaggcagcacatagcaccgcggcgttgaccttccaggtgacggcggcgggcgccaacttgcacaccttgcacatccatacccactcgtgcgccctccgcgtgtggtacaccccgctgtagccatgccagtgcatggctgctggccacgccttgcatgccccgcatcctcgccagcccacgcctaggctctacgccgtgttcgacgtcatcgcgctcaccgtcatcgtggtgggctctcctggcgctcgcgccacccgttctccgcatacatgcactcgtccgaaccggatttccccagcatcacctccgtcgtcgccaactccaaatggtggcgccgccaaccctccaccaccaccgtagcggcggcggaggccaaggacggtgacacgggcccgatgaacgcccacgcccagcccactacctagctccgttcacaatgtcggctcggctgtgaggcggcgccgccgagagatatgaagggaagggaaagactgacaagtgggtcccacactatttttcaccccaagtttgccacgttggcatgtcacgtgggcaaaagtggtaaatagttaagaaaccacctcttaagaggggcaaaaaaaaagtgcaaatctgtaaagggcatttggataattgccaaaatctaaaagtggcaaatagttaaattcccctctttcaccaatattatgatttcatgtcaagatctatataatggttatttccttagttaatgatttatagtcgaatggaaccaatgagaaatttgactagaattaaagcattaagatgtgaagttatatttaatccacgttattataatttcatgttaattataatttttttgttccttagttattttctacccaatggggtataattaaggaattaattttaagattattcataattatttatgaccaatggtgctttgactatgaaattctaagtttattttgcatacgattgattaagccaaggtaaactaattatatgcaattatcaatgtttattatttaagatcaatttcaatactgagtaaattatttctagattaatggagccaacaagaagtttatctagaaagaaagatgatctcattaagattgttatttccttaattatttctgcccaacggtgttgtaattatggaaaaaaaatctaaacatcgtcaatcattattttctttgtcattttttgcctaacggtgatgtgacttagaatcttctatatgccgaagtttcgccccaaccttacggagaagtatgatggcagcatcaatccctccgagtttctccagatctataccacgatcatcgtggcggagcggggggggggggggggaccaccgagtcatggcgaattatttccccatggctcttaagggtcaggcgcgcggctggctgatgacccagcccctcaactccatccactcctgggaggacctgtgccagcagttcattacgaacttccaaggcacgtacccccgcccaggagaggaggcggacctgcatgctttgcagcggaaggacgatgagtccctctgctcgtatatacagcgcttctgccaggtccgcaacactattccgtgcattctggcacgcggtcgtttatacgttttggaatggcgtgcggcacaaccacatgctggagaaaattgccttcaaggagcccaagaccaccgccgagcacttcgagctggcagacaaggtggctcggaaggaggcgtgggcctggaactcccccggcactggcgcggcgggtgcggctgtccccgagcccgctccccgctctaagcggcaagataggagggggaaaaggaagccggcccgctccgatgacgagggccacgtccttgcggccgatgggccctcacgggccccgcgcaaggaaaaagccaccggcggcaggccgagctccaccgctccatccgggaaggtcggtc

SEQ ID NO: 23069 - DNA, 5854 bp, Oryza sativa
tcgggcgccgcgcgcttgcggctcgccaccgcgggcgccatgggtggagccggcatgatggggagaagcataggagagctgatgggagaagaggatttgggtgggaagatttggaaagggagcgtggatggcggcggagaggaggcctcgctggatgacttgattttatagggcatcggtcgatcggacggctcgaaggcgctctccgacttggaagtgggctgcatcggacggtggccgagtgcactccgactccaacttcggcgacagatggatggagtaagcgttaagtttacgcgggtcgatttggaaatgggaaatcttttcagcgcgcaaacccctggcgtagtacaattaaaagggttggaatccaaatacatttgcacttaataaagacagcttgtaccaaaacgaagtggagaccaacatagattcgttgtattaggatgtgtcacatccagtacaaagttgctatattttgggacggagagagtattttttttcatacactctcgagggacccattcatctcaggaggcggacagtggtcgagacaaagtgagcagtggcgtcgcacgcagatagagcgaagggagcagaggcggaggcggcggaaacgcacggaggtgcagcagcggtagcgcacgtcgagattggcgacggcggtgcgcgacgagaccggagggagcataggcaaaggcagcggcggcacacaaaggtggcggcggtgataacgcatgccgaaatgggcgacggcggtgtgcggaaggagcagggtccacggcggtgcgtggcgggcacagtgcgcaaaggtagcattgcgaatggcaacagcagcgcatgacgagatcggcgatggcggtgcttggaggtagcaggtgcggcggcaatgaccgccaactgcgcatcaagccaggatagtggcacaaggaaatcgcaggcacaatgacgatgatggcatgacagtggcgatgacagcgatggcatggtaggtgggatcccgcatcgagctcgacatccacctttggctccttctatcaagatctagccgggtcctcatggtgcgtaggccaggtgacaaggtcagtgggcggctgtaggcggagggcgagcaaggggcggtttggcagcgacattggatttttcccgccaagcatccccatcttggagctctatatgtgtttttcttcactgtatgtagtcttggatgaacaaaaatgagacaacatgttgtcaaaattttacaaaaaaaagcccgtttaattttgtcaaaatcttgctaaatttgtcaaaatggagtcaaatctatcaaacctatctctaatatgtcatgcttgattcattacaaatatataaaaagttttgaataaacaaaatatttttatacaacaaggtcaaatgaacaagggcaaaaaaggataatttggcccttagttaactccgttttcttgccattatggaatagggtcagccactctgattttaaaacgaggggtcaaataaacaaaataaaaatattagcagataacaaaatcaaatcggttgccccaaaatcaaagccaccaactgtttccttctggtatagaagtatattgccactcaatttttatagatttgtattgcaatttactagagatgttatttttccagtaactactgaaagtctgaaactacttcatattttctttaaggcaaaatatgcttcaagacatcgcatggagtgaattttaggggaaaccactttataaatatggtaatttgcatgcagacaccgtgccaattattttagtgtattcgtgctgacgtcgtgcacttttttaccagtgtgaacaaaatgcccctatcacgttgtgtcctcaagttgcgatgaggtcatcaccaggggggatgggaagccgacggatggattgtggaagccggcggtggcaagggggggagggaaagccgatgaagggcttgctcgctgccaccgagttctccacatgccgtcggggtcgccgagggacgtgtgctttgctacatccctccacgcaccgctacagtccacgtgcagttggggttgtcgaggccacacaccgtcgtagctcccatgttagccccgggtttcgattcatctttccaaccaaaccagagccaacacagtcttaaggttcgtgcaattttttccaagttcaagattccaagacccccataatcctttggcttgcaaacatagttccaatttagaaggcagcttcccgcacagacgttgtccgagtcatcttctttctagaggaaagctcgtctaaaatgatcaatccgcttataaagccattcattctatggtagaactgtaaggtggtagataggtgttgccgacaaggtcgatttgacgaggacctccgggctagccgatgtgaaaaatctgcccttccaactcggtattctcaatcttatcttatccactaacggttgtagatcaactttcatcattttatggtgtgaagcagcaaactgagatatttgcgagggaatgactttttatttactggaaagaacagcaggatgccatcgaggtctaaaatatctcccgatcttcgttttgtccatgcttgtctgcagaacattagaccactgattgggctagccaagtagggtcgtgggggagatgggccgaaaggggtacgaatcgattcggtaaggaataagttcaccggaggtccctcaacttaatagcgagatttttttacgtcccttaactacaaaatcagaaatcttcacccctaaataataaaaaaccatccaatttagatcctatggcagtatacatgtctgtcagtaaaataaaaaaaatatatggatcccacatgtaaatgaaaatagatagaaaatgtggggaccacttctcttcttctctcttttctctttttttcttctcttcagctcctctccagggaggctgccgccggcggcagatgggggcgaggcgagcctggccgagctctgccgccgccgccgcactgacgcacacgtgctcgtccgctgtcgcttcctctgcccccttcgcccccgctcccgacggcgaagaggtcccctgccccctgtgaccccgctcccgacggcgaagaggccttggtggctacggcttcactagccgccatccccatccccatccccatccccatcgtccaggaaccacgcgctgcagaagacggacacgacgagaaagctgtgcgcgagtgcgacgcggagcttgcggccgtcgacgggatcctccggggcggcgggcagcgaagggcggatggggcaggagtgggcgcaggtggaggtgtgccgggtcgaggacggcggctggagatggtgatgggcggcggcatcggcttgcccttggcgggcctataggaaccgaacggcctcggggtcgggaagaggacggcggaggtggtgaggcgcgggagcttcgcgtcggcttcaacttccacaagtcctcgtcgtctctcgccgccctcctcgccggcggaagctcgccaaccacgcgctcgtcctcagtgccaccttcctctcaagcttcaccgccgtgatgaggtgctcctccgctccgacgacaacggggagctcgcccacgccatgggcgtcgagctcaacgtttgctcccgccgctgccgccgcctcgtcgccgactgacctcctcgtcgcctgcctcgccgccgccgccgcctcctccccatccgccggccgctctacagaacaaaagtgagagagagaagggagaggatgcacaagacagatgacgtggggctgatacgtggcccctttttttttttctgactaggatgccacgacagtaaaaccgggcatctatactgtcatgagacctaaattagacggtttggtatagtttaggggtgaagatttctgattttacggttaagggacgtcaaaaaatctcgctgttaagttgagggacctcgggtgaacttattccattcggtaaatagttaaatatctcacaattggtatgggagatgaaaaattactttttttttcttcacgggaaaatcaattgttcttctttctcagggcgtagacgtgattggatatttccaagcctaatcggactcaaaagtctgaattggactctttttattattgttttgaatttcttttatatagtactttcttgtggccagtgcacgttttgcgtggcccaaattaaggcttacggctgactgtgtgtcgattgaatctccaatcccgtcgccactcgcccccacctccttcgccgccgccccgccgccgccgaaccgcaacgcggcgaatctgctcccctccatcttcggcggaagtcccagtagatcgaggtatgatcctcctccgtcccctaccatgttcgttatggcgtccgactcgctgatacgcgtcgattcctcgccggaggaggcggctgctgtttagggttagggttccggcaggctctaggggcggaggagccggtgcaacgcccacctgctaggccgccagaaaagataatactaataatttcggccatgctctgttagtttatgaatccatacagctaggtctcctgccattgccaatcttgctgggctgaagctttgaaatttacatgtggtataatagtattctgttgggtagtataatttaataaaagtgtcatccaccatgactgaacgctactccatgtttcaacctcttgttatgtttacagtgcaggttcctctgtttagttttatgttcatggttaaaccagtatcagcactttatttttaccaaatattattctgatagtgttgtatacttgtattcatgattaaacaagtgtcaggcttttctttttaccaaaacacatggaatacaagttgatgtgttgtgttcatggttgaacaagtgttagtactttccttctaccaaaacatatgacatgcgagttgttctgcaagcagaataacgatagtcaagtacaaagtacctgagcagtacaactgaactaaaaaaatacatatttttgttcaatctctatgcacaaggttggagcctgtcagatcgctgtcaattgcatacagttttaggcttttattggagctatgcaggttctttgagtgcagagtagtaaaattatttcttcttctgaaaaccgttagttaattgttatagcatgcttcgtgttcatctggcattttaaattctgaacacatgtgatgcttttaggaagaggtcagtagagcgtgagcaaatattgtgtacagcggttggttcatataacttaatttcatgcacgtacagtattcttctatggatagaactgatgccataccatagatactccttttctttttgcaggatctatcataacacacttgcagacatgccttggctgtgaagatcatacactaagatgcttgcagacagaggctataccctagaccctctacagctgctgtaccagatcagcagtgctagtgctaccaacgatcagactagaagcgcgacgcagttggtgcctcctgcactgacggttggaaaagcaaactccaagtctcgcacatcccgttcggtgatgtgggtactggcgatctacttaccctccatgtcatcgccggttccacgtacttggcatatgacctctacatccgccctttcgatggtgctagctacccatggtgtctgttggctgtcatgtgttggctgtcatgttatggggagtctacatggcgctggtcgctgtggtaagacaatacatggacctgttcttgccaagtgctcccgctgccgtgcggcacacactcgtcgacgttggctggctttgggtcggcgtacctgtgtttttcgtagactatattctgatgaactactg

SEQ ID NO: 23070 - DNA, 1863 bp, Oryza sativa
  unsure (1)..(1863): unsure at all n locations
actatgaaatataaaaatgctgggaaatataaaggcactttcttcaaaatagacatgcttttgtttaacaaatggcacttgtggtctacttggttttaaagtgcacatctcaagctgtcttttttctccatatgcagatgattgttctgattcaattgatgccgttagagaagaggcctcagttttagttagggaagaggtggaacagagactactatccattgttcgagattcccttgcatctgcattctctgtcaaaggggtatgttatattacagccctagcgctaattttatgaaaatgtggccattgcatgtcaatgtaccaaattatcattcttgtattattcagtcacgacaacttttatggttcactgtccatctttaaatttcaattcctgcttcctagttggctgtattgcctccacatgtgtatgcccttcctaaagaagtaacttgatatgatgattgattcaacttcagtactctgtcttaatttctaatatattaggaaatgaatgtcgtctacagcctgagattctaggtggtacattgcgatatgtatatgctttattttacatgatgaaatgaatttttgaagggagttgactaaagtaatcacttgattagaaagaaatagatattctgcagaagaacataatcttgtaggaaaggaataaaacaattaatgaaggaattgttatacacaagcgaaatctcattttatttttctctgctctattagagaatggactaattttgcttctctactgaacccctgataggtaaagcttagaccagctcaaaacggtcccaaaacaacaaaaactttttataaaataagcataatcattgctagctactaaagaaaagcgggctatgcctaggttaaatgggtcctaaggatatataatgaaaaactaggttgggatggttactgaggaaagcccatgtgcttgccttaagtctgctgattttattcgtaatagaacatagatgacaaataagtatgttgtactcagtcaagcttttgaaccttccatttgctgcaaaacaaatttatgttcatggtaattctgtagggcagagcaaaactagtgtgtcattttccctagaatcaacttgaactgcactgcgcatattttagcatcttgttaaatattgatttacaagatgaatgcatttcctgtaaactgtagcagttcattgatagtattaaccgtgccctagctacctgcttgtntcaaatatgtttatgagcaataaatctgcttgaaggtcataatgttgagtacacagacaagtacatgcaattgccttatactctttttggcgttgccgttgtggttttgtgtcctctgcacacactgatatactcatcattttgcagggagctgaattgacgatttcttggctggaagaaacactgattgaaattaacctgatttttgacatcttgtttctttttttctatgataacctttcaaggtgtaatggtggactgtggataatgttgcgttccatttttaaggtacatccttttggtgtctattcattctgtgggaatctgagatctcttcacttgatatttcaatatttatttcttgagcacttatccttttaggacatgctatctggttcttatgatgttggaaaatttgctgtatctgttgaagcaaaaaattcgtttcattatgctaaagctcagctgctgtttattctcattcaaaccttggactttgaaagtctactccggatggttcgtgatgaagttccttttaggtatttatgactaacttggctttttcatttatgtatgggagcatgccatattagtatcttattaatatgtcagtgtaacttc

SEQ ID NO: 23071 - DNA, 3020 bp, Oryza sativa
  unsure (1)..(3020): unsure at all n locations
aagtgtcttccaaaaatttgaagtaaattgactacctcgatcagacactatcttcttaggaacgccatgcaaacacacaatccttgccatatacaattccgctaagcgacttccggaataagttgtctttaccggaatgaagtgtgccactttagtaagtctatcgactatcacccaaatagagtcctggcctaatgacgttttgggcaaaccagtgataaaatccataccgatttcttcccatttccattcaggaatctttgaaggctgcaacaaaccggcgggtttctgatgttctgccttgactcgctgacaaacatcacatactgctacgtattctgcgatttcacgcttcatacttgcccaccaaaacctttccttgagatcctagtacatcttagtactaccagggtgtatggagtataaagtatcatgagcttctttcagaattgcatcttttaaatctttgttgtcggggacacagattctttcacccaaccatacagttccgtgctcatcctccaagaaaccaatagcttttcctcttctcatattcttcttaatttcttggatatcaggatcattagtttgagcttctctaacttgatcaattagagtgggcttcgcttctaaggctgcaacgaaacctatactgacaattcccaaattcaatctttcaaattccttgcataattccaatggcaactgtcgtccttccgtagcattgcaatagcctttcctgctaagagcgtctgctactacattagcctttcccgggtgataatgaattcccatgtcataatccttaattaattccaaccatctcctttgtctcatgttcagatccgactgagtaaagatatactttaagctcttgtgatcgatatatacctctgtacgagtaccgaaaagataatgacgccaaatcttcaacgcatgaactactgcagctaactcaagatcatgagtagggtagtttttctcatgcggacgtaactgacgagatgcataggcaaccaccttcccatcttgcatcagaacacaactaacccaagtttggatgcatcgcaatacacctggaaacccttctttggatcaggcaaaatcaaaataggagctgatatcaagcgacttttcaactcttgaaaactctgctcacattcttctgaccacttgtacttcacatctttctgaagcagtcgtgtcatgggcttagcaatcttggaaaaattctctataaacctccgataatatcctgcgaggcctaggaaactgcggatctctgaaactgtctttggttgtttccagttggttacggattccacattactaggatcaacggcaactcctcctgctgagatgacgtgaccaaggaacttcacttcagacaaccaaaattcacacttgctaaacttagcatacagttgatgttctcataacttttccaatgcaaggcgaagatgttcttcatgctcttctttggtcttagagtagataagaatgtcatcaataaagaccaccacaaacttgtctaggtattccataaacactttattcatcaagttcatgaagaaagcgggggcattggtaagtccaaaagacataacagtacattcgaacaacctgtacctagtggtaaaagctgtcttaggtatatcttcctctttgatcctcaactggtgataccctgatcgaagatctatcttggagaaaacggtggcacctttaagctgatcaaacaaatcatcaattctgggtagcgggtacttattcttaatagtcacatcatttaatgcacgatagtccacacacatcctctgggtatgatctttcttttccacaaaaaataaccggagctccccatggagatgaactcggtctgatgtatcctttctgaagcaaatcatctacttgcctcttgacttctgccaactcattggctaccattctataaggtctcttatggatcggagttgttccaggtaccaaatctattctgaactctatatcccttttaggcggcataccaggtaaatcatctgggaacacatcaggatactcccggactataggaatctcttccaaagttatctggttcagtcttgaccttaaaaactcagaagacaatgcatgaacagttacaactcgaccatcattgctggtgagagttacttttctgttagcacagtctatcacacctttatgtctagctaaccagtccatccctagaatgacatcaaggtctttggattctaacaatataagattggccagaaatggtaccccttgaatttctattctgacataggggctacgttgcaaagagagtgcttgattgcttggggtactaaccatcaaaggacgtctaagatcttctacttccatcccatgatttcccgcaaaactcatagatagaaatgaatgtgtagcaccagaatcgaaaagtactgttgcaggaactgagttaacaaggaacgtacccaaaatcacatctggagcatcttgagcttctgcagctgcaacatgattgacacgggcctttgatgctggtacagcagagttgctctgggcagggacaaccttcacgcgtcggggcttcggacacttgtcagcataatgtcctgggtctccacagttgaagcataccataggcttgctgccttgctccctcttggcaggttgttgctgtgtcgaagctgcaacaggacgtggagcttgattgcggatgttattgccagcattgttgttgaagaactaacgctgcggacgaacaacagacgaagaacctccttgtggcatggactggggtcctaaannnnnnnnnnnnnnnnnnnnactcccctgttgtgccttgaagtgagcaatccggcgtttcttctgctccatgcggttatacttgtcctcctgacgaatagccttatccactaacttctggaaatcatgataatctccagtcatgagtgggtaagaaagctcatcattaagtccttcccaagaacttctcttgacgctcttcatca

SEQ ID NO: 23072 - DNA, 2131 bp, Oryza sativa
tttgtttgtagatggccggcagcatcactgtcacgaccggaaataacccaacgggcgttcctgacgtgcgtgcattaatccttgtcccaggaggtaaggtacaccaaaagttgatacaattcagagttcaacaagcggaagcgtaaatagttaacttattacatgggcagcgaaggcccagcacacacaaagacaaacgagaaacagcgaaagactagggcgacgaccacaggcgcttgacggcaggcacgagctagacaccaaagccttcatctccaaggaactcctcttctggggttgggaaaaattgagcaagactgagtacaaccaccgtactcaacaagacaaacccgcaagtgcagaataaatgcaagggagtacaagggaattatactataaagggttagggttgcagtaaacagcatttaaagacatttagttgctcaaagctatttggtaaacatgattctagagctataccatattattaaacaaggccgtgaacccacacgaacctgccttaacccaaggcctatgatgattcagaccgaactggcaacccgacccagggtcccagctcgtcccaagccaacccaggccaaccattccaccttttagttgttaagaaggttttaagaattaaaacactaacttggatacattgctcggcttgcccataaccgagggcgcggctattcgaatagattatactctgatcagaggtgtacatgtttacccacaagacacatcttcctcacgtgcaaccacgtgccacataccaccacggtatacaaacggaagacgtgacatagtttccaacccatcctagccatagacaagagtaccgacccaatcccacctacggccggaacccccgggacaggcaggtaggactgagcccctagcagcaggacaccggccctgtgccatgacatctcgactaccgggccgcagctcgtgtagccttcatttgccctggagatgtccatcgacccccgacttcttccatctccatccgtgtacttttgtttataaccagactgactcacaaactaagccttacccactagacatgtggaagtacggtagtgctttgcaacagaggcccgaagaccggtccttatatggccgaggtgctactatcaaaaccatgcaccccgagcccagcccaaaaccattttggggattttgaatagaaggagcggtgtgaatccaattccacaatatccagaccattccaaggtatccaggtgatatgaatatttcccaaagtctaaagttgaaaaaccacctaatgttacctaattaagttgcgaagcatctacctaaaattaaactagtggtgccatgagtaggggtccactagttgaggttttgtttattctagggtgaacaaggtaataataacaataacaataataataaggtcgtaacaaaggtaaataggcatggctaaataaaacagtgttaacgcgggaatttaaataaagcgataatgcaataatttaaatcaacataattttacaaactgggattcaatatgttcaaagatgatgtgacttgccttgctcgctttcccaaacgtcggcttcaacttccacgaagagcggatcttccgaagctgcagcgtctacacgaccaacggaaaagaaaaaggcttttactctaaagaactccatataacagtagaaacaaagcacaaaaatgggttcttgacttcttaaggaaaaattagagacttgaacggtccaattccgagttcaaatggacaagttatggccatttgaagtttatatgctctttaaatggatatttgggaaaagtttatatgcccttttagccatgccttgtttataagggggtgattatgatccaggaaggtgcgctgcagtggattgtgttgtataaggggtattgtcacaactcctttccgagataccgtggttgtattgaggcacatggtgacatgatgtggggttgtgtcttgtgggtacagtggtacacctctgatcagagtaaaactattcgaatagccgtgcccgcggttatgagcgggtctaacaatgtctttcgtgattagtttcacacttgtcaccatagtaaatgatgctataattggtaataatttgat

SEQ ID NO: 23073 - DNA, 3630 bp, Oryza sativa
aaagttaacggctactccatccatctcctgaccaagttggagtcggagtgcactcggccaccgtccgatgtggcccatttccaagtcggagaccgccttccagccgtccgatcgaccgaagccctataaatcgagtcatccagcgaggcctcctcttccgccgccatccacgctccctttccgaatcttcccacccaaatcctcttctcccatctgctctcctctgcttctccccatcatgccggctccacccatggcgcccgcggtggcgagccgcaagcgcgttgcggccgacgatccggagccccgctcctgctgcggatcctcccaggcgagcgggccgaagcggcggcggtacaacttcgggagcgccgacgactacgagcgcctcgacgtggtcggccagggcgcgttcggcgtggtggtcagggcgcgggatcgccgcaccggcaaggtcgtcgcgctcaagcggctcatcggggcggacgagggcggccgcttcgcccccaacttcgacgcgctcagggtggaggccgcctgtcagcacgcctgccgcggccaccccaacatcgtccagatcaaggacgtcgtcgccgacgccaagacaggtgacctcttcctcgtcctcgagttcgtcggaggcagcctccgggatgagttccccagggcccgcccggaggacatcgtccgcgccatgatgcggccgctcgtcgacgccgccaagaagatgcatgcctcgcgcgtcatccatcgagacatcaagccggagaacatccttgtcagcttctccggggagctcaagatctgtgacttcggggccgccacgctgatgaagcccgccgggaagccgtacgacctgtgccgccccggcacgctgccgtacacctcgccagagcagctcgccggcaaccgatgctacggccccgcggtggacatgtgggcgttggggtgcatcatgggcgagctcctcaccggcgcgccactgttcggaggcgacatgacggagaaagagctgctcgccgacctgtccgccaacctgggtgaccagctcaacgagctcttctatgacgtcctgccagagctgtcgccggcggcgcgcgaggtcctgtccgggctgctggcgttcgacccagagaagaggatgacggcggtggaggcgctggagcaccggtggttcgccgatgagcccaagaaagcagagttccctggcttcgtgcctctcttcggttagtctgtcagtgcagagtgttagtttcagattgtcagtctgcatgtaacttagaactgttagtctgcagtcttgtctttaaattagaactgatgattaggactgatgattgcattagcaaattggcattgcaatcagtgtaatcttattattccgattattcatctgtaagcataattatgtaaatcctattcaatttgtagaaagcaattcttatgtaaatcctattcaatttgtacaaagcaattcaaggccctatttgttcaataaaattatcagacatttttcagcttgatgagtcctgcttcatgagtgcttgtttgttaatcatcaggaaaagggaatagttttgtagtatgtgttgtatcttcagtacataccaggaataacaaaaacagagtcatctgtacaccttattgtcagtctgtaacttagcaatactggtagtattgtcttaggactgataatttcattagggcaatagcgcattggcaccggaatcagtgtaatcttctttttattattattcattgtaactttgtaagcataattgtgtaatcatattcatgttcagaaaacaaattgcagatagcaattcaaggccatctttgtttcagaaatcatcagctaattgagccctgcaacatgattgcttgtttgttaatttgtggattctgtgcttgactgaaagcatataccaggaaaaagaaaaacagagtgatctcaaaaaagaaaaaggaaaagtaaaaatagaagagagaggcgattaaggagagaggagattaatgttttctgacatataagcatccagagagagagctttgcaaagcgcacacaccgtgtcatctatgccaaaggagtatttaggttgtttcataaatagattcatttgctggaatcatttatgccaaaggagtatttaggttatttcagacaatagattcatttgtcggaatctgaatttttgtctgaaaaaattgagtaaagaggctctgtacactttcattcatcatacctggagcttttgtttaacaaaaaagaggggaaaagttatagtttttggtttggactcactctcagtaagtgacaacttggatttcctcaactatcggttcttgctggggtgcagtagtatattcctaaatgattcatgccttattttgcaatacctagaatcatatcaggacaacttttttttgtaggactgaacaccatcaacttcttcagatgacatggactgatgcattatgaaaaggaataggaacttccatcttgaatataacaagtgtagttcaaccaattatatttttagtttttgcctacagatacaccttagtatattggtctggcagcttggtatgcatggccactgcccacaggatcctgcacaccacctggtctgtctgtcaatttttaatttatcaatattgcattaagccattagcacattggcactgcaaccactgtaatcttattcttcagattattcattgtaagcatatttatataatcttattcatgttcaggaaattttggtgaagcaattcaagtccatcttttttttctcttcatacttccttatataattcctacatatataactgcagaaagaacagagtaatgtctggtgctgattttaaataaaaaaaaagcttgtcgaagaaacatctctatacccagtttgatatttctgataaaccaatcagtcgcaatgatcactgaagtttttgaaatttgtgaccaacctgatcatcgcttatgtgaacattgcagtgcagtcatttcagtataagccaaacacatgcagtgactaataaaacaaatacatatagcctgtcgatttatcataatctcacgcaaccctgcagtgcttaataaaaatggggatctttctaaatatttttgtggtctggcaatatgttgcaaaataatatcccgaaaaacataatgctgtaaaaaacagaaaatctgaaggaaaaaaaaaatctagcgtccactcccacgccgattctgaaggtggtgaggtgtactgtggaagcagcaaccacttctttctgaagaataagaataacaatttggatttttttttgacgcaaatggtagagagactctaccttataaccattgtattaatagcagtcaaagactgacaaagccaagaaatggcaaagaagagtacattcaggaaaggagaatcaagataaaagaaggaaaaagaaggggcaagaattgccaaaggtgaaaagagcaggaattaaaacaagaaatttaaaacatgaaaatcttaaaaaaaaaacttagaacaaaagaggagctgaggagctgaatagtaaacggaagtgaaaacacttcagagtatcttagctaagcttgtctgcccaagcgttgatatgcacgcgaag

SEQ ID NO: 23074 - DNA, 17339 bp, Oryza sativa
gacgagatgcataggcaaccaccttcccatcttgcatcaaaacacaacctaacccaagtttggatgcatcgcaatacacctggaaacccttctttggatcaggcaaaatcaaaataggagctgatatcaagcgattcttcaactcttgaaaactctgctcacattcttctgaccacttgtacttcacatctttctgaaacagtcgtgtcatgggcttagcaatcttggaaaaattctctataaacttccgataatatcctgcgaggcctaggaaactgcggatctctgaaactgtctttggttgtttccagttggttacggattccacattactaggatcgacggcaactcctcctgctgagatgacgtgaccaaggaactttacttcagacaaccagaattcacacttgctgaacttggcatacaattgatgttctcgtagcttctccaatgcaaggcgaagatgttcttcatgctcttctttggtcttagagtagataagaatgtcatcaataaagaccaccacgaacttgtctagatattccataaacaccttattcatcaagttcatgaagaaagcgggggcattggtaagtccaaaagacataacagtacattcgaacaacccgtacctagtggtaaaagctgtcttaggtatatcttcctctttgattctcaactggtgataccctgatcgaagatctatcttggagaaaacggtggcacctttaagctgatcaaacaaatcatcaattctgggtagcgggtacttattcttgatagtcacatcatttaatgcacgatagtccacacacatcctctgggtatggtctttcttttccacaaaaataaccggagctccccatggtgatgaactcggtctgatgtatcctttctgaagcaaatcatctacttgcctcttaacttctgccaactcattggctgccattctataaggtctcttatggatcggagttgttccaggtaccaaatcttttctgaactctatatcccttttaggtggcataccaggtaaatcatctgggaacacatcaggatacccccggactataggaatctcttccaaagttatctggttcagtcttgaccttaaaaactcagaagacaatgcatgaacagtcacaactcgaccatcattgctggtgagagttacttttctgttagcacagtctatcacacctttatgtctggctaaccagtccatccctagaatgacgtcaaggtctttggattctaacaatataagattggccagaaatggtaccccttgaatttctattctgacagaggggctacgttgcaaagagagtgcttgattacttggggtactaaccatcaaaggacatctaagatcttctacttccatcccatgatttcccgcaaaactcatagataagaatgaatgtgtagcaccagaatcgaaaagcactgttgcaggaactgagttaacaaggaacgtacccaaaatcacatctggagcatcttgagcttctgcagctgcaacatgattgacacgggcctttgatgctggtacagcagagttgctctgggcagggacaaccttcacgtgtcggggctttggacacttgtcagcataatgtcctgggtctccacagttgaaacataccacaggcttgctgccttgctccctcttggcaggttgttgctgtgtcgaagctgcaacaggacgtggagcttgattacggatgttgttgccagcattgttgttgaagaactgatgctgcggacgaacaacagacgaagaacctccatgtggcatagactggggtcctaaagtaagacgcggcttctgattattcccctgttgtgccttgaagtgagcaatccggcgtttcttctgctccatgcgattgtacttgtcctcctgatgaatagccttatccactaatttctggaaatcagaataatcttcagtcatgagtgggtaagaaagctcatcattaagtccttccaagaacttctcctgacgctcttcatcattgcgtacatcttccggagcataacgggcaagacgattgaattcgtgcaaatactccgtaacagagcgagatccttgagtgagtgacctgaattccttcttcttgagagacaccactcccgatggtatatgcgtcttccggaaagcagcggtgaattcaagccaagtgataggttcagcagtagtcctattcaggcggaagtgatcccaccattcagaggcagggccatgcaactggtgtgatgcaaatgagaccttctcctgatcagtgcactgaagcaaatccaacttcttctctatggcatgcaaccaatcaccagcttcaacaggattagtggtactagagaaaacaggcggccttacacgaagaaattctgctaacttattctgagggggtgcatggttatttccttggttctgctggttctgaagttgctgcatcatcatgttcataagctgagtctgttgagcaagaacttgagcaagggttggattctctccattgttattgttattggggttgttgagattgggaccattcctgttgctgcgagtgttcaccatctggcatggatagggcacaagaagagaaaccgggggaaaactacttaggacagagaattactttaacttttattgatcttaactgagtttcattattacaaactgaagactctcacaccactaaactcaccaacttcctaacactcaaaaagcaaacaaacgcatgtacttatatcccaccactgatgtaaatcacatgcaagacccacacacacacaagcaagcttaaaagaagcaaactaacacaacgatctaagacaacgacttaacaagttactcttgttcttccgagcatcgaaggtcgattgaaggctcgttcggctcgtcttcatcatcttgagttgctacccactcaatcttggaatggttgcgcttggattcttcttcttcatcactacttatgatgatgatcggaggatctgctggggcaacttctttctccaccacacggacctttggcgccaattgatagcgagggacaaatagagctctcttccttgcggtaagacgaatcctggccttctgcggtggtgcttctcccttcaatgcggctaattccttctccaaacgatccaccttgtcttctaacttgcaaatcttaccacgattccgatcttcacgatcttgagctgctaacacagtctctgcacgactttcatccatggcccacagcatctcaaccaaatgccttgtggtagcatcattctcaattccttcagtctccacggtcacttccctggggttggcgaggatggtagcgatactcagtgtcggccaactgatcactgtagcgatcacggagctctcctatggcgatccttgccacctcctgacatgcatggatgtagtttcttcctccagcttcgaacatcactgagggaatatcttcactattactgttcaaggtgactttgactcggcacttctcttcatgacgatcatgacgaatctgggcataaaaagggacagtcccaaatccaatgacaaaggacatcgtacgcaactcctggacaaaaccctcaacaccaaaaagatactcaggcttgtagcgcggcatctaaagacaagtgaaaggagggagttaagacatttatccaattaatagcacaagcttttggattaatttgaataaagtttagaaaatcaaagtaaaaggtaagtaaaataaagtaaaccaagcttgcaagataagttgaaacagttgaaaacgaggtcacaagttttgtatttttgaataacaggtttcaaaagaaatgaaatcaagttataaaatcaacttgctaaatttattttattgcagcaagattaaataaaacaacattgtaaaacttttgctagtaaaatgagccattagtacagtaatagatgtacagtactaataacactggaataaattttgaatgagaaccattaaaagagattatgaagtgcatgtgccattagtttggtttaattaaaagagaaagggaggagaacagttctacttttccagtatttttagagggcttctatgggtaaccatttggcataacctagggtcaagggggctctgataccaacttgtcacgcccggaatttctatccaaaattccaaacgcttacatgtgtgtaaaccctcgtccaggaatcagccgaggcacacaataacaaattgataatagagtacaattattactctaattaataagcgaataaaatgttattacagaggtagatagttcctctcaatcaataaaaatctaagcagcggaaaataaaaacggcgcggacgactccactccacaggcagcttgaccaaggctacacctaatcctccactccatcagcctcatagtagaactcttcctctgatgaatgattgcaaggtgagtatatgacatactcagcaagccacgcagcaaatatgcaaatgcacaggataacaaaggatggcataatagggctccatttgcaaaagcagcatttagcaaacatttggaaatttaaaacagttaagtattaattaagcaatattaatccaacgctatacaacataccctgttgtataagcccaaccattctggacaaccatcccggctgtacagttctatctccaaaccaggaatataccattccaaaccaggagctaatcaaattattaccaattataacatcattactatggtgagaagtgtgtaactaatcacgaaagacattgttcgacccgcccataaccgcgggcacggctattcgaatagttttactctgatcagaggtgtaccactgtacccacaagacacaaccccacatcatgtcaccatgtgcctcaataccaccgcggtacctcggaaaggagttgtgacaatacccctcgcataacacaatccactacagcgcacctttcctggatcataatcacccccttataaacaaggcatggactccccagcgacccccgtgggcttatcttcgccacttctcagtctggtgccccgcaatgaaccatgctatacaaaagataaagccgttgcccatgctggcttatggttggcacgataaatgtttcacaaccgaaactcgtgaaccggtccttaattgtcatgagcacgaccatcaaaaccatgtgctcacaacccaccattaccaggttttagttggcacattaattaatcaactaatcacaattaaccatcgtgaattatcattaagccatcattaaataacagtgaatcataagttatcccaatagtgagctaatgtttctaagcagggctaagcaattatacctaatatctagttgaaccaatataaataaagttcaaccagtcaaattattataacccaaggtatcaaggaataaagtaatcaagaacaagagggccataacaaagaataggttaattccacccaatgacattcgaaaataaatgcaatagttgaaaggaaacaatagctttaaataggatcaacatgctcaaagggttgtttgggatctgtgtgacttgccttgctggccttggaactcttcaaactcttctccggcgaaaacggactctccggaaacgacggaatctaagcagaaagaagcaaaatcaccaaaacagcacataaacaagcatgaacagtacatgtggatatttttaatgtgtagatctcaattttagaaaaatttagagacttgaaccaactaaattggagctaagatgaattagttatgaatttttaaagattaaatcggattaaaacacttaaatcggtttaaattgaattatgacgcaataatgaattatttttgaaaaggaaaagatggtttattgcgtcagcggctagggtttcggtggaccgggcgcacgggcgacggttcacgcgaacggacggccgagatcaaaccaatccaagatggacggccgagatcgatcgggtccacggcggctcacggaggacgaacttgatggcgtcagcgatgacgtcaccccggcggcggcggctcgggcggctgggccggctcgggcggcgcacgctcgccggcgaacgacggcgcgaggacgcaaacggaaggcaccaggacgaagcgggcggcacggcgaactcaccggcgaccaaaacgacggcggaagatcaacggatggcgacggcgacgaggaggaagcggcgaagctcttcgggtcgacggcggcgatgacgctccggcggtcttcggcgacggcgaaggggcggacgaggacggcgacgcgacggcgaacacgacggcggccttcccgagcgatggcgacggctggaacgacggcggcgcacggctggagcggcggcgaagctagggcacacggcgctagggcgactccggcgacgagaggcgaaggcgagggtggcggcgggtagaggagaccacggggaaccttttaaaggggctcggaggcgaaggcgaaggcccacggcgaccggcgacgaggaaggaaggttcgggaaagacgaatccgagacgaactcgaatccctcgatttccaaaccgatttagccaaagattccaaaggagaaaaggtagaggagatcccgaggatcatttcctctctattgatttggccggagaaggaaaggggcggccagattggaaggaaacagcggcggtggctcggcggcggcgcgctagggtttcggcccgaggaagacgacgggcctgacaggtgggacccacctgtcagcgaccgaacgcgcgcgcgcgggcggctgcgaactgggccgacttgggccggggagagagagagaaggttttgggccaactttcggcccaaagcccaaaagagaactttttaaaactttttcaatttaaattatttcttaaatgcaattctatttattaaaaatacttccttagctcaaataaatcccagaaaaatctaggaattatagaattaagcaaagtatttaatgaaattttatctggccccattttatattggaatttattattaaacttagattttcttttcaagacttttaaaataaattctagaaattccatttaaacaacaatttatattttttttgaatttttagggtgtgacacccgtccaccggtgccaccgacggcgacagtcggactcggcagctcttcgccgaatccacggggaggatagctgggtcggcctcctcgactcgctcgattacgacctccgccgcaagatcctcgaccaccgcgactttgagcaggatgttgctgcggcggcggatggacggacggcgtggctgacacgaccggcgacaccggtggatggacgggaacgcggacggatggacgacgcgactgacacgaccggtggcggattgacggggacgcggtggtggcgccaacggatggacggggacacgagcggcggcgtcggcggatagacggggcggcagacggacagacgaggacgaggagtgacgtcagtggacggagtggtacataacgaagaaaattcgcatcccagtggcatattctgaaaatagtacgaattggatggcatatcctgaagtggcaaattctgaaaaatctcgatccaaacccccctaatccatccatcgaatctcgttgctcgccggtcgccgccccgtctcctcgcttgccggttacaaggacgacctcgtcggggcggcggaaccctccagcctccgggctcgccgccgccgccaagctcgcatcccgcgccggccgccgagctcgccgcccaaccccaaccccaaatcaatcagatcaattcaactatccaagcctaagttgttggatctagaatccatggcgatcgtttacgcggtggtggcgcgtggcaccgtggttctcgccgagttctctgccgtctccgggaacgccggcgccgtcgcccgccgcatcctcgagaagcttccgcccgacgccgagtcgcgcctctgcttcgcgcaggaccgctacatcttccacgtcctccgctcccctccccccgccgccgccgatggcctcaccttcctctgcatggccaacgacaccttcggaagtacaaactctcttatacttactagtattactctactaatctatatgatctatggataggataagatggattcgttcattcatcttcttagtatgttcttcattcattcaagatggtaaactgtattgcttcattagctaatttaggcatttttgcatgtacttattcatttatgttcctttcatacaactattttactgttactactctattagtagcgagccagcgaaatccagacatactagtatgatagagcatcacttgttgtataattaattacaggacgaattccctttctttacctcgaggacatccaaatgaggttcatcaagaactatggcagaatcgcccataatgcgctcgcctatgccatgaacgatgagttctctagggtcctccatcagcaaatggagtacttctccagcaaccccagcgccgacacactcaaccgtctccgtggggaagtcagtgaggcaagtatcctatttatttattgccttccacacaatttcctttcatttttgctctacaatcaaatgctcattcttccaacttgcattgtgcagatacatactgtcatggttgacaacattgagaagattctcgacagaggtgagcgcatctcgctactcgtcgacaagacctccaccatgcaagacagtgctttccacttccgcaagcaatccaggaggctcaggagagctctttggatgaaaaatgccaagcttctgtaagtcaccctttctttctttctttcttgcttactactgtactatctatctcttctcttctttaccactcactgacagtacccattaactagtggtcagtcctgcactcaagttcatttgttacaagttactccctaatgacaagtcctgattgatgttataaggcccttcgagattggtacttagccatggacatttgttattccctttttttcctgccagttatagtttaccaaatcctgaattcagcctgaatgaatgtataatcacaaaagtttagagccaacaaagctgcaatttccttttctgaggccaagtctaaagagctttattcatcagtggaaataccattttgcgcgatagtatctcctaagaattcaggagtgcatgtttaaatgagcacactctgcacaatgatgaagctgcaatttctttgctagtccaaaattatgtaatcatgtgccttcggttggtcattattgttgaatagacatgttggataagtgtataactatatatcactcagtgacccttgttgaatggaataagctggtgtatcattgagtttgagaacaatgggctattgctattctgtttttgctggggtttgaaagaattggtgattaatagcaggcataacgaaatactactagtttttttttaaggatctagaaaactgtgtgtttggttgctgattgccatacattatatgtataagatccaaccctttatttattatgatgactctaagatctacagtactaataacatttttgacagcatctgacatattttgtcctgcgttgttgcagtgctgtgttgacagctgtcatagtacttctactttacttgatcatcgctgctttctgtggaggcctttctcttccatcgtgtagatcatgatccgctctacagatttacctcaattaaagcatcacaccatgtaacaacaatgcaagcctatcaatgccatgtgtcgtatctgttcagcacccaaagttacaagtgatgttttgagaaaatgatttggtgctgagttttcgttatcgggagggttgtgctccttcaagttaatatggaacggtttgtacaaaatgggatctatatgtacagtagtatgtcgtttgttgtttgtgttggctaagacttttctgtaccgttgtgcttgcacatgaattggatgttttgcctgatgatatgagtgctgtggtatgccctttccttaactaaagcgaatggcatgtaatattctcaagagaatatatgaatatggtttatgagtaatgttatcctgataaataaattttggaagaagggaaattctgcccaaaattaagtgttgattactacatggagtgtgatgaaatgatttgtagctccccgggatcagctggcgtgatgaatgttcaggtagtgggttggaatggcgtctctgaatctctgaaactttcagaatgctgaagtaatacaatacagagctgaaatttgggaggacatttagggtaacgacggaggagtctataattagtgcagggagttggtaatacattacattgatcgatcaggtagaaagcaaaatgaaaatggtgcagcatggtggattgcagatggcagagcgagcgagcagttagaaagaacgtcttttcttcacacacatatatacaagtatggattggaactcatcatttagtccttacatatacacccagcaacggtctcaggtcaatgataagagttgattattaaacagttagtggtatgatttgatgacccaaacaactacaactcctctgcaaatagagtaatatgtatatatacctacatagatagagggatagattgccaacaagatagatatagatcgatcgatcaatagtagcagcagtaggtaaattaaggaagcagcagaagagattgttaattaattaattaattaattaagcagaggcagcatgagcgggatttgtctctcggatcaatcttaaatatctgaagaagctaatgatgttggccttgagcaatacttatacaaatttgtctgaacatgaataagatttcgtatatatgcttcttatgaataatcagaagaacagaattacattgattgcaatgccgatgttctaatgcaatcatcaatcttaagacaagagtaccaatattacaaagttacagacagatcatatactagtaaatctgctaatgccgcggtggatgactctgattctattgcgttcttataacatcatcctgaaactactgcttttctgtttgcagcatcctgatacgtaaaagtgcagcaacaattgagaaacaaatatatgagttagaagtaagggtggtttctttgtaattagttttagcttggacaaatagatcatgacaggcgataaagtcataaaagatcactccctaatccctactgctcatcttgcctttgtagaacatcttgttttcttggttgggtattagacagaagtatttcattatcgaaaaagacagaagtatttaggagtactactgtactcaaagcaagagctggcagttgaggaaaaccaacttgtcagttactaaaggggcgtccaaagtccaaacaaaaaaaactaatattctcgctcgcgctctctctctctctctctcttttgtaaacgaaaatctgcacataggataaatggaagtctagaagccttttactctatttttttagacgaaaacttagattccagaaaatgtgtctatttcttaagtaacctaaatattccattggcatagattctgttttttttcctattcctttttcttttttcacatcatcgctctgttttaccttttacaggtatatgcttagaattcacaaactactagccaagtctctttttctgaaaattaacaaacaagcaatcatgctgcagcactcaattagctgataatttctgaaacaaagatggacttgaatggctttctacaaaattttctgaacatgaattggattatataaatatgcttgcgatggataatctgaagtataagatattaagattacactgactgcagttccaatgtgctaatggcctaatgcaatcatcactcctaagaagagtttagttcacaccaaaattggaagtttggttgaaattggaacgatgtgacagaaaagttggaagtttgtatgtgtaggaaagttttgatgtgatggaaaagttggaagtttgaagaaaaactttggaactaaacacggcgtaagttacagactgacagacagaataggtggtgtgcaggatcctgtgggttgtgagcctgtgaccatgtattccaagctgccagatcatggtactaattggatgaactacagtttttacattcaagaatcaagatggaagttcctgttcctgaccaaaatgcatcgctccatgtcgtctgaagaagctgatgatgttcagtgttatagccacttgttttatgcttcagttcactaaaagaatactgacctccaaactaactatgatcttaaggggcataacactttccagttaactatccttacaaaagaagtcctgatatgattctgaatattgcaaaacaggacacgaagtatttaaggatactactgtactccagaagaactgagagttgatgaaaactaaattgccacttactgaggagtccaaacaaacaaacaaaaaagaactaacacttctctctttttcgttaaacaaaggctccatatatgataaatgaaagtgtataaagtctgttactctattttcagacaaaaactcagattctgacaaatgagtctattgtctgaaacaacctaaactcagattctcccttctgtttttcctttttgagatcactctgtatttcattttcttggtatatgcttagaatcaaggtaagaatcctcaaatcgcaaaactatacccttttcctgaagattaacaaacaagcactcatgaagcaggactcaccaagctgaaaaaagtctgataattttattgaataaatagggccttgaattgctttgtacaaattgaataggatttacataagaattgctttatacaaattgaataagattacataaatatgcatactatgaataaatcggaataaaaagattacactgattgcaatgccaatttgctaatgcaatcatcagtcctaaacaagactaccaatcatcagtgctaatttaaagacaagactgcagactaacagttctagtaagttacatgcagactgacaatctgaaaccaacactctacactgacagactaaccgaagagaggcacgaagccagggaactgtcacgccctaaaaatcgactaaaattaaaaatgcatattttaaatcatttttagaaattaaattaaaagcctacaagctaaaccctaattttctaggaaaattttcaacataaaaatgagctagataaaattttattaaatactatgcttgctcctctattttctagaattttctgggaattatttgagcaagggaagtatttttaataattgaaacaacatttcacaaattgttttttttgaaaaagttcaaaaaaccccttctttggtcattgggccgaattcggcccaatactccctctctctccgcgcggccgaaccggcccatgccggcccaagccaagccgcccgccccctcctcctccagccgctgacatgtggggcccacatgtcagggccatcttcaacctccggccgccgccgccaagctgagcccgagccgccgtcttccacctccgatcctcctcaatccgagcccgaatcctccgggtttttgaggggttttgttcctctcgttctcctctttcttttcccccaagaatcgaagcgaatcgttgaggatttgatccgaatcgagttcgttttgattttatccctaaaaaccgagtttgatttcttcccgagtcgattcctctcgtttggagttcgatctcttcaatccgatgctatatatagcatcctctcgtcgtcctcttccgtttgccccctctctcgtcctctcccgtgcatcgtagcgccgtcgccacgtgcgccaagtccgccgccgccgccggccgtcttcggtcgcgtcgcgccgccgtctccgccgtcgccgccgcttgccgtcgccaccgttaggtgcacacggaggtgaggaacctcggccgccccttctccatcgccgccgaccaccggagctcgttcgccgccgtcgacccgagccgccgcgccgcctcttctcgtcgccggccgccgtcgtgcaccgtttgttgtcgtggtgagtaccatcgggttcatctcgatgtcctctacgcgtagatgccctccgattccgcggccgaccgtcctagctccggcgagctctccaacccgagccggccgccattgccgacgtcagcatgacgtcatcagggctgacgtcagcatgacgtcatcgtctctttttctttttcttttttccgattttctaatagattaaaactttggaaaatcataactaaataaccgtagatccgttttaggtggttcaagtttctaaatttttctaaaatcaagatctacatgttaaaagtatccacatgtactgtttatgcttgtttttgtactgttttgttgattttgtttatttgctttagtttccgacgttccggaggagagcgtttccgttgaggaaggttccgaagcgtttgcggaagcccaaggcaagtcacacagatcccaaacaaccctttgagcatgttgaacccgtttaaagctattattttatttcaactgtgcattgttttcaaatgtcatcgggtggtgaacctttcccagttaattaatggccgaagctgacttgattttcctatgggttataatttgattagcatgaaccttatatattggattggttcagctaaatgctatatataggtttgcttagccatgcttagaaacattagctaactaaaaggggttaaatataaactatattacataattattattaattaaggttatattcaatggtagctcacgatggtaaatcgtgtgatgttaattaattgataattaaaacctggttaaggtgggttgtgagcatatggttttgatggttgtgctcatgacaattaaggaccggttcgcgagctactgttgtgaaacatttatcgtgccaaccacaagccagcgtgggcaacggctttatcttttgtatagcgtgattcattatagtgcgccagactgtgaaacggcgagaagtccgtgggggtcgctggggagtccatgccttgtttataagggggtgattatgatccaggaaaggtgcgctgtaatgggttatgttgtgcaaggggtattgtcacgactcctttccgaggtaccgtggtggtattgaggcacatggtgacatgatgtggggttgtgtcttgtgggtacagtggtacacctctgatcagagtttaatctattcgaatagccgtacctgcggttatgggtgagttgagcaatgtttttcgtgattagtctcacactactcatcaatggtaatgatatgataattaatttaattcctggtttggaatggttaattcctgatttggaggtttcatttgttcaactggggttggttgttcaaatgtggttgggcctatgcaacacgggtgtgttgtatggtgtttatttaatattggttaattattcaactgttttactattctcttaaatatttgttaaatgctgttttctgcaaatgagctgttttatgccatcctttgttatcctgtgcacttgcatatttgctgtgtggcttgttgagtatgttatatgctcattcttgcaatattcattcatcagaagaggagtatttcagtgaaggtgaagatcaggaggattaggcttgttctcggttaagatgcctgtggagtggagtcgccatagctgttccgtagtttgttatagttttgttttccgctgcgtagaatgttatttgttttgagaggaactatctacctctgtaataattttaatttttcgaatattcgatagttaattatttgtactctattatcaatattgtcattgtgtgcctcggttgattcctggacgagggtttaacacacatgtaagcgtttggaattttggatagaaattccgggcgtgacaagttggtatcagagccaccttgaccttaggataagccaatggtaaaccttaagtagccttcaaaatattttgaaaaatatagaactgctcttctctattcttttataaattatttaagttggcagcacatgcaaggttatgcacaaaatttatttaattcaatttcttttcttttaaaaacaaaaagttgttcttttcaaaatgtttcttttctctttaccaaatcctattgattagtcggcactgtacatttattagggtatcgatttaatcatgttagcactagtactactcatctttcctatggtgatactgtaccgggcttataatagatcataattattatagttttattttaattatttgtcaaaaatatatttgtctctgtccaaaaagtaaaattctaaaaacatatttatataatagcttggtatgcgtcttatcttttattttcttcctttttggtcaaaatcagttaagtctagttggtgcagctaacttaaaatatgctttaattcctcttctatgtctctttagatgcctccccattcaccgagaaatttgatcgaggtgttaggattcgtcagggagctgaggttgatggcttttgaagtaggctatgaagttgctcctgagtatcgccagatttcccatgaccccgacgaagagaagtgtcgtgttcgtgtgacgttggctagtgatagcgaagaccttccgtcttttaagttcgaagctgggggaagatcgtactgccatgcttgtcaagaagcagctttggtggccattggagagttgcgtcaacgctttgaagaagagttggattcatcagctttccagtatcatcctcacaaacctcatggtcaagactatggaacctatatctgtcctgatggcgaagagagtgccactctgatgcatgcggtgcatatgcttagtgctatggatgcagtaagtgtggagcgagacaaagcagctcatgatagggaaaactggaatcaaggtaagatttgcaagttgaagagcaaggtgtaccgtctacagaaggaattagctgaacttaaaggagaaacgccgccgccaacacccaagcttcgcctcaccgcaagaaagagaacctgtccgccacctcgtctccagttagcttcgaagattcgcgtgatgggcgaagctgtgcccgatcatgctgaacctgtcatcgacatcataagtgatgaggaagaagaggaagaccctgaagaaagagagccagctactccagaggaagaagatccatcgcttcgttccgacgcaaggcggaagtagtcgctcagttagatcgttgccgtagttcgttgtgatagattgcttgtttaagtttgcttgtgagtgtgtgggttttagttgt

SEQ ID NO: 23075 - DNA, 4599 bp, Oryza sativa
cgtggcaggagttcacggctgcttttaagaagacgcatataccgtcaggtgttgtagctctaaagaagagagaatttagagcactcaaccagggatctcgttcggttactgagtatctccatgatttcaaccgtttagctcgctatgctccagaagatgttcgcactgatgaagaacgtcaggagaagtttttggagggactgaatgatgagttgtcttatgctttgatgtctacggatttccgggatttccagcagttggtggacaaagcgattcgtcaggaagacaagtataaccgcatggagcagaagaagcgcagggctgcccaatttaaggcacaacagggcagtaaccagaggccgcgtctcgttactggacctcaagctccatcgtaccctcaaggaggatcttcatcagttgtccgtccccaacgccagttctacaacaacaatactggtaatcgtggcaatgacaaccgcaacgtggttgctcgtcctgcagcaactccagctcagaaccagcccgtcaggaaggaacagggaagcaagccagtggtgtgctttaattgtggtgatccaggacattatgctgataagtgtcctaagcctcggcgcgtgaagaacgctccagccccgaacaactccaatgttccagcaccgaaggcacgtgtaaatcatgttgcagcagcagaagctcagaatgcgccagatgttgttttgggtacgtttcctgttaactctatacccgcaactgtgctttttgattccggtgctacacattcctttttgtctaaaagttttgcaagcaatcatgggatggaagttgttagtcttgggagacctttactagttaataccccaggcaatcaagtattttcgacacagtattgtccttctgttactatagaaatagaagaagttcctttcccatcctcgcttatcttgctagaatccaaagatctagatgttatcttagggatggactggttatctcgtcacagaggagttatagattgtgccaaccgtaaggtgaccttaaccagtagcaatggggaaaccgtttctttctttgtgtcctctcctaaatctcatggtgtgatcttaaaccaagttgctctacaagagatacccatagtacaagactacccagacgtgtttcccgaggatttgccaggtatgccacctaagagagacatagagtttcggatagacttggtacctggaaccaaccctatccataagagaccatacagaatggcagctaatgagttagctgaagtgaagaaacaggtggatgatttgcttcagaaaggatatattcgacccagtacttcgccatggggagcaccagtcatctttgtggagaagaaagatcatactcagagaatgtgcgtggattatcgagcgttgattgaggttactatcaagaataagtatccgctacccagaattgatgacctgtttgatcaactggaaggtgctacagttttctccaagatagatctccgttctggatatcatcaacttcgaatccgtgaggaagatataccaaagaccgccttcacaattcggtatggtttgtttgagtgtaccgttatgtcatttggactcactaatgccccagcctttttcatgaatctgatgaacaaggtgtttatggaatatctggataagtttgtcgtggtgtttattgatgacattcttatttactccaagacgaaggaagaacatgaagaacatcttcgtctagctttagagaaactacgtgagcatcagctttatgccaagttcagtaaatgtgaattttggttgtctgaagtgaagtttcttggtcatgtcatctcgtctggaggtgtggcagtagatccaagcaatgtggagttagtgttaagttggaagccacccaagacgggttcagaaattcgtagtttccttggacttgctgggtattaccgcaaggttattgagaactctttaaagatagccacaaccagagacttgtgtgttacagagagaagtgattccagtgaacggaggattgtgaacaaagtttccaagaactgaagaaaaggctagtgactgcacctgtattaattttgcctgattcgagaaaaggtttccaagtgtattgtgatgcatcccgactcggtttgggttgtgtgttgatgcaagaaggaaaggtggttgcttatgcatctaggcaattacgacctcatgagaataactacccaacgcatgacctagagttggcagctgtggtgcatgcattgaagatttggcgtcattatcttttcggtaatcgtacagagatatatacggatcataaaagtttgaagtacattttcactcaacctgatttgaacatgcgtcagcgaagatggttagagttgattaaagactacgatatggaaatccactatcacccgggaaaagcaaatgttgtagccgatgctcttagcaggaaaagctactgtaatatgtcagaaggtcgacgtttaccttgggagttatgccaagaatttgaaaagttgaacttgggaatagtcagcaaaggttttgtggccgcattagaagctaaacctactctgtttgatcaagtcagagaagctcaagtgaatgatcctgacatacaagaaattaaaaagaacatgcgaagaggtaaagccatcggttttgtagaagatgagcaaggtactgtgtggttaggagaaagaatttgcgtcccagaaaataaggagttgaaggatactatcatgaaagaagctcatgaaactttgtattccattcaccctggaagcactaagatgtatcaagacttaaagcaacaattctggtgggccagtatgcgacatgagatagcagaatatgtggctctatgtgatgtatgtcagcgggtcaaagcagaacatcagaagccagccggtctgttacaaccgttgaagattccagagtggaagtgggaagaaataggaatggattttataaccggtctacccagaacgtcggcaggacatgattctatttgggtagtggttgataggttgacaaaagtcgcccacttcataccggtcaaaacaacctacacggggaataagcttgcagagttatacatggccagagtggtatgtttgcatggtgttcctaagaagatagtgtcagatagaggtagccagtttacttcgaagttttggcagaaattacaattagaattgggtacccgtttgaatttcagtactgcttatcaccctcaaatagatggtcagacggaaagagtaaaccaaattttagaagatatgttgagagcctgtgttctagactttggtggaagttgggataataatttgccgtatgcggaattctcatataacaatagttatcaagctagtttgcaaatgtctccgaatgaagcattatatgatcgaaagtgccgtacgccgctcctttgggatcaaaccggtgaacgtcaagtttttgggacagacatattgcgagaggcagaagaaaaagtaaagattgtccaagaaaggttgcgcattgctcagtcgcgtcaaaagagctatgctgacaatcgttgcagagatttagcttttgaagaaggagattgtgtatatctacgggttacgccgttacgaggagttcatcgtttccaaaccaaagggaaattggcaccgcgttttgtgggaccttttaagatagtgagtcgaagaggtgaagtagcttatcagttagagttgcctccgtcaatggcgggaatacacgacgtgttccatgtgtctcaattgaagaaatgtttacgtgtacctacggaggagacagatcctgatcgtatagagcttcaggaagatttaacttatgttgagaagccagtcagaatcttggaagtaagcgagaggaaaaccaggaatcgcgttatacggttctgtaaggttcagtggagtaatcattcagaagaagaagccacttgggagcgagaagatgaattgaagtcagctcatcctcatctgttcgccagttcttctgaatctcgaggacgagattccgtttaaggggggtaggtttgtcacgccctaaaaatcgactaaaattaaaaatgcatattttaaatcatttttagaaattaaattaaaagcctacaagctaaaccctaattttctaggaaaattttcaacataaaaatgagctagataaaattttattaaatactatgcttgctcctctattttctagaattttctgggaattatttgagcaagggaagtatttttaataattgaaacaacatttcacaaattgttttttttgaaaaagttcaaaaaaccccttctttggtcattgggccgaattcggcccaatactccctctctctccgcgcggccgaaccggcccatgccggcccaagccaagccgcccgccccctcctcctccagccgctgacatgtggggcccacatgtcagggccatcttcaacctccggccgccgccgccaagctgagcccgagccgccgtcttccacctccgatcctcctcaatccgagcccgaatcctccgggtttttgaggggttttgttcctctcgttctcctctttcttttcccccaaga

SEQ ID NO: 23076 - DNA, 702 bp, Oryza sativa
ctgcggagcggcggccgagagaggggagggaaggggaaaggaggcgacggtccacggctcaccccggggcgacggcggcgacggaggaggcggccggagcggaggtaggcggtggcgcggctcgggtcgacggggacggcggcgctccggctatcggcgaccgaaacagagaggtgaacgaggtcggcgaggatgcggtgaagccgaaggaggcggcgccgaggtgggaggcggtccggggcgacgacggtggtggaccggagctcggcggcgacggcggagagagagcgacgtcgcgagctcgaatccggcgaggaggaagggcggcgagaggtggaaccggacggaggaggtgcggggagggtttaaatagggttggaagggggagagagcggccagggaggaaggaaaccggcgtgggaggtcggccgccgtcaatggcgccagcgagatttgcgggggcaaatccacccgtttgaacacgagagagagaggaaaaatggggggaaagggagaggggatcacggggagtatttccccccactttattgcacgcggggatggcgggattcggcggatttggcggcggcggcggcgcgcggggtgggaggccgaatgggccgcgggggagaggagagagagaggggggacagagatgggccgggccggcccaagtgagggaaggggtacttttggggtttt

SEQ ID NO: 23077 - DNA, 1542 bp, Oryza sativa
gtatgtgcacttggtatttcagctatgaattcatttgtactagactacttgatctagggaaatggtactgtttacacgattgattcctgttataaaaataggggtccacagagctggtatcagagccatacgactgtaggaaaagaccaaaaggcgccccaccccttttctaagttggccaaggaaaaattcccatttagtaatactttcaaaaataaaaacgctatgtttacaaaactctatacgattttcatcttactcttaactattttcttcacaaaacgagttttactcttagctgaccttgggtttttcttaaaattcgatggcagatcaggattcacccgctacctgggagatgggcgtaccccgctcagagggatacgtcattgagctacaccggttgatgaggtgtctgcgataccctagatttccgatctaccgagtgagatagagtggctttgtttgggaggctcaggtcgaggttcacacacgagttccttcagagtcagactacagcttcctgacatgccaccgtcgtgacttaccgaagaccgcgatgcaggatgcagcccgggaggccttcctccgacttagctctatccaccgagctgagttggcgagtactgagtttgctcaccacccgtttcgagaggagagcaactccgtctgcacggctcaggacacaccttgctgctacaacccgatagtgactcgactgtcacgatgggctgaggcagtagacgacttttacgaggaggctctgttagagatcaacgaccagcagaggcgtgtgggagagttagagaccgaggtgactgacctcacagtgcagcagcttcagctagaggaggagcaccaggcttggggtagtaagatagactcaatgaaggcatagctccaggtccacggcgaccggttccagcagttatctaaccagtacaatgatcgccgcgggatgatggatacacttgaggagcaggtgagagagagtcaggagcacgtcagccagctggaggagcagcttcgagcagccacggtcagcaccacaggagcttctacttccacagcagtagggtatgaccgctactccttcctcaccacaccgtacccaccagcgttccacactcttttgggagaggttggtatgctggctactgagtcagcaccttacttggtggacccgacagtgacacagccacctgccccggagattgtgcacactccactgatccctacaccttctccgcagctaggttcgagtttggagactccgatccaggtcgactccgagacagaggggaccgacaccgagcagagatcgagccagacatcactgatccttcagaggatgagacccctgttccccgcatcaccttcctcggacgccctcacaccctcagcactgcccgcaagagcacacgacccccgggcaagaagcccaagccagatccagaggccactacttctgagccgtggggactcaggtttgcctgtgccagcgaccaccctctacctgccccaggatcctgcggatggttg

SEQ ID NO: 23078 - DNA, 1252 bp, Oryza sativa
actatcaagaacaagtatccactaccatggattgatgatctttttgatcaactcaaaggagctaaggtgttctctaagattgaccttcgatcaggataccaccaattgaaaattaggaccggggatatacccaagaccgcgttttcaacacgctatggattgtatgagttcacagtaatgtcgtttgggttaaccaacgccccggcatactttatgaatcttatgaacaaagtgttcatggattacttggacaaatttgtggtagtattcattgatgatattctaatctactccaaagatgaggacgaacatgcggaacacttgcgattggtactcgagaaacttcggaagcataaattatatgcaaagtttagtaaatgtgagttctggttaaaagaagtcgcttttctaggccacgtaatctcagccggtggagtagcaatggatcctgctaaagttgaggccgttacggaatggaaagcacccaaatttgtgactgaaattcggagttttataggcttagccggatactaccgaaggtttattgaaggattctctaagatagcccgaccaatgacacaactactcaagaaggaaaagaagtttgtgtggttagaacagtgtcaggaaagctttgagcagctcaaagaaaagctgacctcgtcgcctattttagttcttccggacatctggaaagactttgttatatattgtgatgcatcaaggcagggactaggaggagtactgatgcaggacggaaaggttgtggcctatgcatcacgacaattgcgaccacatgaggaaaactaccctacccatgacctagaactcgcagctgtggttcatgcgctaaatatttggagacactatttgattggaaaccattgcgatatctacactgaccacaagagtctgaagtatattttcacccagtcagatctcaacttgaggcaaaggcgatggctggaattaatcaaggactatgatctagaggttcactatcaccccggcaaggccaacgttgtggccgacgctttgagtcggaagagccattgcaatcatctgaggacggaagggatggctcctgagcttaaggaggaaatagcccaactaaacctacatatggtacctcatggacagataaacaacctggacattcaacctcttttgagaacccaaatagaagaggcccagaaggacaacgaggaaatccgagaggtgaaggaacgtctagttgcaggatttgcaaagg

SEQ ID NO: 23079 - DNA, 1193 bp, Oryza sativa
cagggtacgattccatctgggtgattgtggatcgactcaccaagacggcaagattcatccccgtcaagacaaactataacagtgctaaactcaccgagttgtacatgaccaggatagtgtgtcttcatggtgtacctaagaggattatatctgatcgaggcacacagtttacctcgtatttctgggagaaagtacatgaagccctaggaagttaccttgcgtttagcacagcttatcatccacagacagatggccagacggagagaaccaaccaggttttggaggacatgctgagagtttgtgcaatggattttagcaaagactgggagagatgtttgccctacgccgaattctcctacaacaacagtttccaagcgagcctaaagatgtcgccaaatgaggcattatttggtcgacgatgtcgtaccccactaatgtggaccgagacaggtgaacgggcgatatttggacttgacattatcaaagaagccgaagaaaaggttcgcctgattcgagaccatctaaaagtggcacaatcacgacagaagagttacgccgacacccgaagaagaaacctggaattgaaggaaggagactacgtttatctaaaggtttctccgatgaggggaacgaaaaggtttaaggtcaaaggaaaactagcgccaagatatgtgagaccttttcaaatcacggctagacgaggagaagttgcataccagttacagctaccagaaaatatcgccgatgtgcacccagtctttcatgtgtctcagttaaagaagtgcttgcgagtgccggaagaacaagctacgttggaagaaattcatatcagcaatgatctcacgtatccagaacacctagtccggatattggatgaagctaaaaagaagactagaaccaaagtgtggcgtatgtacaaagtacaatggagtaatcacactgaggatgaagccacttgggaaagcgaagaattcttgaagacagaatacccccacctattcgaaaacctgtaagaaatctcgggacgagatttatttaagggggtaggtttgtaacaccctgaaaatttgaccaataaaaacaaaactctaaaaatacgggccttcgaaaacttttaaattaattgcatcatgccgatcttattcgcctattttatttggatttgatttcgaagttcattaatcgtgagtaaa

SEQ ID NO: 23080 - DNA, 3084 bp, Oryza sativa
tacgcttccgtttgttaaactctgaattgtatcaacttttggtgtaccttgcctcctgggacaaggaacaatacacgcacgtcaggaacgcctgttgggtgatttccggtcgtgacaagttggtatcagagcctcccttgaccctaggacgagccgtagatcccaagccttagcaatatttttgaaaattaaaaatcttttgttatttgtgaaaacccgctattctctctctgtcttgctgcttcatttatcgccaaaatctgatctctaaaatgctgtttttcttttgtttttgtttgtagatggccggcagcgtcacccgtcgtggtttggacatgactggcttcgtcctggagctgcggggcatgtgcgtggtcttggggtatccacatggagtggattaccaggccaggccgctcccggagcaggagggtgaggatgcagagcctcacgctgggtgggaggtcactgcagtgatcctctctggctctcccgagcggacttcgctggcagtcaccgcgggtggggattcttctcccgccgcttgccagaacgccgctctcctcgccatcggcaccctccaccagcgctacccggacgagttgcagcactcgccctatcgctaccaccctcgtcgcggaggagcccgcgacttcgccaccttccgagatgctagcttggaggatgacgctaccgtcgtgcatctggcacgcatggtggaggcatacgacgcggctcgtatcgacttccatcagatggtgcgtcgcgggatggttgagaacaacctgaagatcctggagctgcgtcaggagaacctgcagctcaagaaggacctcgacgcattggaggcgcagctgcaccagctcaagatcgcccagggagaggacagccgccccaagcgtcgccgcgtctgccgcagccagaagatcaccgcccggaagagcacctccaggcccgagcttgttcgtcagtccctggcgtggacttgcttcgtcgagacccctcgtgccgagcctgcgcccgtggttccccaggagggggaagcctccggcgttggtagcacggaggatgcgctgttgctcaccttccgccctggcccgtcgcagcggtagacgagcagttagtaggcttgcgcgtgtgtttttcctcgtttgtcttcttgggttgtgtggggcatggttatgccagtgtgtggcataactatgtcggagcctgtcttgttttatttgtttaagcaacttgaactctaatgaaccaattcaatatcagtaataaattcaagatttatagtagtcgtgggtggttagttttaatcgttagctctctctgtttgctggtgctgtgtggggttttcagatggtgacgaccaggagaaatgttagcaccggtgaaggcaaccaacccgaaggcagcaaccccaacccccaaggcaatccacctccaccaccaccaccagacaccaacgccattctcacccaaatcctcgcccagcaagccaacatgatgaccgctttcctccaccacctccaaaatccgccacaacagaatgctccaccaccacctccacaacactctaagctcgccgagttcctccgcatccgcccacccaccttctctagctccaacaatcccgtggatgcgttggattggttgcatgccgtggggaagaagctggacactgtgcagtgcagtgatgaagagaaagtcatcttcgccgcccatcagctgcaggggcccgcatctctatggtgggaccatttccaggctacgcagccagaggggcaaccgattacttgggcccgcttcaccgccgctttccggagaacccatgtgcccgccggagtcgtggctcttaagaagagggagttccgggagttgaagcaaggcaaccgctccgtgatggagtatttgcacgagttcaacagtctggcccggtacgctccggaggatgtgcgggaagatgaggagaagcaagagaagttcttggcgggaatggaccctgagctgtccgttcgcctagtctctggggactatccggacttccaacgtctggtggacaagagcatccgcttggaggccaagcacaaggagctggagacgcacaagcgccgcttggcgaacttccgcaatcagcagggcgctaaccagagggtccgctacaccaatccctatccagggggatcctcctcgcagcagcaacaacagcagcagcaacctcgctccgcgcctcgacctcaattcgtggtgcgcgtcccacagccgcagcagcagcagagtcagcaagggactcgtgtagcccgtcctcctacgccagttgtgcagcccgttcaaggccgcagggacgctcaaggtcagcagcgtttgtgcttcaactgcttcgagcccgggcactttgcggataaatgcccaaagccaaggcgtcagcaaggccaagcgcctccccgctccaacaacggtggcaaggacgtcattcggggtcgtgtgaaccacgtgacggccgaggacgtgctgacaactccagacgtcatcgttggtacgttcctcgttcattccatcccagctactattttgttcgactctggagcttcccactcgtttatatctgtgccattcgtggggaaaaatcagttgggggtagaaaggcttaggaaccctctactcatcaccacccctggaggggttatgacagcaaagtactatagccctgccgttcctatagaaattcaagggattccttttccctcggatctgattctgctagacaccaagaatttggatgtgattcttgggatgaattggttggctcaattccagggagtagtggattgcgcgagacgcactgtcactctgtaccgaggaccggaacaaccggttgttttctttgcacccccaacctctgtcagaagttcaaaactgcatcaaatagaactatcagaaatccccattgtcagagagttcggagatgtgtttccggaagaactacctggtatgccgcctaagcgagagattgagttccggatagatcttgctcctggaaccactcctctgcacaagcgaccctaccgtatggcagcaaatgaactg

SEQ ID NO: 23081 - DNA, 2279 bp, Oryza sativa
tggttgtccgaagtaaaattcttggggcacgtgatatctgctaaaggagttgccgtggaccccgaaacagtgaccgccgtcactgaatggaagcaacccaagacagtcactcaaattcgcagtttcctgggtttggcaggatattaccggagattcatcgagaacttctccaaaatcgctcgacccatgacacagttgttgaagaaagaagagaaatttgtgtggagcccgcaatgcgagaaggcattccaaactctcaaagaaaagctggtctcctcgccagtgttaatcctgccagatactcgcaaggatttcatggtgtactgtgatgcttcgcgccaaggattggggtgcgtactcatgcaggacggtcatgtggtagcctatgcctcacgccagctacgacctcatgaaggcaactaccctacacatgacttggaattagcagcggtggttcatgctctaaaaatctggcggcactatctcattgggaatcgctgtgaaatatatacagatcataagagtctgaaatacatcttcacccagtcggatctgaaccttcggcaaaggagatggttagaactcatcaaggattacgatgtgggaattcactatcatcctggtaaggccaacgtggtcgccgacgctctaagtcgaaaaagccattgcaacactctcaacgtccgtggcattccacccgagcttaaccaacagatggaagccctgaacctaagcatagttggtcgtgggttcttggccgcgttggaagccaagcctaccttgctcgaccaaatccgcgaggctcagaagaatgatccggacatgcatggactcctcaagaatatgagacagggtaaagccgctggtttcacggaggatgaacacggaaccctatggaacggaaagcgggtatgcgttccagatagcagagaacttaaacagttgatacttcaggaagctcacgaaagtccttattccattcacccgggcagtacgaagatgtacctagacttgaaggagaaatactggtgggttagcatgaagcgggaaattgcagagttcgtggctctatgtgatgtgtgccagcgtgtcaaggcagaacaccaacgaccggccggacttctccaacctctccaagtaccagaatggaaatgggatgaaattgggatggatttcatcaccggacttccaaaaacccaaggtggatatgattctatatgggtaattgtggatcgactaacaaaggtagctcgatttattcctgtgaagaccacctatggagggaacaaactagcggaactctacttcgctaggatcgtgagtctccatggtatccccaagaaaatcgtatctgataggggaagccaattcacctctcacttttggaagaagctccaagaagagctgggtacccgtttaaatttcagcaccgcctatcacccgcagacagatggacagaccgagcgtctaaatcagatcctagaagatatgcttcgcgcgtgtgtcctagattttgggaagacttgggataagagtctcccctatgccgagttctcctacaacaacagctatcaagccagcatacaaatggcaccttatgaagcgttgtacgggcgcaaatgccggacaccgctattgtgggaccaagtcggagaaagccaagtgttcggaactgatatcctgagggaagctgaagctaaagtcagaatcattcgggataatctaaaggtggcacagtcccggcagaaaagttatgcagataaccgacgccgtgacctggaattcgcagtggacgattttgtgtaccttcgggtcacgccattgcgaggggtacacaggtttcagacaaaagggaagctcgcacctcggtatgtgggtcccttccgtatcatcgctcgacgcggagaagtcgcttatcagctagagttgcccgcctccttgggtaacgtgcacgatgtgttccatgtgtcgcaactcaagagatgtcttcgagtgccatccgagcaggccgactcagagcaaattgaagttcgcgaagatttgacctacgtggagaggccagtgaaaatcctggacaccagggagcgcaggaccaggaaccgggtaatccgtttttgcaaggtccagtggagcaaccatgccgaagaagaagctacttgggagcgtgaagacgagctgaaggcagcccatcccgacctcttcgccagttcttccgaatctcggggtcgagattccgtttaaggggggtagggttgtcgcgtcccaaaacgaccctaaaa

SEQ ID NO: 23082 - DNA, 12346 bp, Oryza sativa
tgatggattccatccaacgcagctcgtaataaaaatggaagaggtcaaggaaaggcactaccccaatttaggcctcgcaaagatgagagaagatgctcaaaaaggcgatggagttggggttaaactgaagcaaagaaaggccgtagaaattcaagacaagaagaagaaactcggaaggcggaggaagaaaaccacaagaaacataatgttcaattacaaccatgcggtgaaagatgggtttaggttctgtacctctagcctccctctgcatggtcccgcgaccggggagggcaccgtcgtcctgtagcttcttcatggatgcggtgttcgaggaagatttctcaaggtccattgctgccggaggatcgccggagaataggatgaaggaagtgagctagggtttttttttgtggggagcggagaagacgaagagtgctagaaggcaggagagttttcttgcaaacggacttcaaatggatccccaaaatccctttaagtaaacgtgcttccgatggtgcgtattccaaggaaaggagagagattgctgccggaaaattctgggtccgttgcgtggggtagtttttcagacttcaatttaaattcactcatggccgttgaacttcatgcggtgttgtcgatggctctttgtctctacagttttcacaccgagatcgaccagatgagagcgacaacaattccgacatcagaagttgcgatcgataacatgagctcatttaagcagaagtcgggggctactgtcaaggttacggataaggtataccctctatccttggctgtacgttatatactaatacggtatacccacgcgtatatggatagtttccgtattgtcgcgtcccaaaacgaccctaaatttcatcctcaaaattgtgctgagaataattaaaatcaatgtgaaagccttcaacaattaaaatgtgcacagataaaagtcaaatgaggcttggaggatttttgtatatttcctaaaagcctaaaacgtgtaaataaattttagtggaattttcagagcacaaataataattgaaaagaaataaacatagttaaaaaggtttataaaaagaaaatcttaaaagaagttcttttccccccccccttttctcttcttgggccggctcggcccaatccctccctctctctctctcttcccccacggcccatcggctcctccccgcgcgcgccgctgacgggcgggcccgcccgcctgccctcgctgacgggtggggcccacccgtcgtcttcctcctcccgccgcgcccgccgccgcgcccgtgccctagcgccgccgccgccgccaaatccgctcgctcccgccgtccccgcgcgcattaaagagaggggaatcactccccgtgattccctctcccgtttcccccgcttttccctctctctctccctcggattcgtccgatttccttcccgaaaccctcgccggcgcaatcaatggcggccggatcctccgcgaccgattcctccctctccggccgctctttcccttccccggcgctatttaaaccctccccgtgctccgctcttccgtttccgccgctcaccgctcgctctcgccgtcggattcgtgctcgcgccgtgctccgccctctccgccatcgccgccgagttccgttccgccgccgtcgccactccgggcttcctcccggctcggcgccacctccctcggcatcgccgcatccccgtcgaccccgtccgccgatccgcttcgcccgccgaccgtcggagcgtcgtcgtcatcgtcatcccgacccgctccgccgctttcctccgctccggccgccgttctcgtcgtcgtcgttgtcccggggtgagccgaggaccgccgttcgccttcccccttccctcctctctctcgggcgccgctccgccgcgccgatggtcgccggcggtgaccatcggggcgcgggcgcgccgctcccgtcggccgtgccggcgaggccgccttcgggcgcgccctcgcggctgccaggtgggcccggccgtccgccgcccgcgcccgcgggtgcggctgacgcgcgggacccacggcgccgaccgccgccagccgcgtgcgcccggtccaccgtggaccgtggggctgacgcgtgggccccacttcccgtggacccggcccgcgcgcccgctccctcggctgacgcaataaataggattttttttaattaaaaattaaatgaagaaattcgcaaatatccatttaaagagcatataaacttcaaatggccatatcttggccatttgaactcggaattggaccgttcaagtctctaatttttcctcaagatgtaaagaacccatttttgtgctttgtttctgctgttatatggagttatttagtgtttaagccttttcttttccgttggtcgtgtagacgttgcagcttcggaagatccgctcttcgtggaagtcgaagccgacgtttgggaaggcgagcaaggcaagacacatcatcttgatcatattgaatcccagtttataaaattatgttgatttaaattattgcattatcgctttatttaaattcccgcgttatcactgttttatttagccatgcctacttacctttgttatgaccttattattattgtttttgttattaataccttgttcacctagattaaacaaaactccaactagtggaccctctactcatagtaccactagtataattttaggtagatgcttcgcaatttaattaggtaacattaggtggttttataactttagactttgggaaatattcatatcacctggacactttggaatggttggtttattgtggaattggattcacaccatccccctttattcaaaatccccaaaatggttttaggctgggctcgaggtgcatggttttgatagtagcacctcggccatataaggaccggtcttcgggcctctgttgcaaagcactaccgtacttccacatgtctagtgggtaaggcttagtttgtggctcagtctagtcgtaaacagaagtacacggattggagatggatgaagtcgggggtcgatggacattctccagggcaaatgaaggctacacgagctgcggcccggtagtcgagatgtcgaatggcagagggttggtgccctgctgctaggggctcagtcctgcctgcctgtcccgggggttccggccgtaggcgggattgggtcggtactcttgtctatggctaggatgggttggaaactatgtcacgtctttcgtctgtataccgtggtggtatgtggcacgtggttgcacgtgagacagatgtgtcttgtgggtaaagatgtacacctctgatcagagtataatctattcgaatagccgagccctcggatatgggcaagccgagcaatgtacccaagttagtgttttaattcttaaaacctgcttaacaactaaaatatggaatggttggcctgggttggcttgggacgagctgggacccagggtcgggttgccagttcggtctgaatcataataggccttgggttaaggcaggttcgtgtgggttcacggccttgattaataacattgtatagttctagaatcgtgcttatcaaatagctttgagcaactaaacgtctttaaatgctgtttaccgcaaccctaaccctttatattataattcccttgtactcccttgcatttattttgcatctgcgggtgtgtcttgttgagtacggtggttgtactcagtcttgctcaatttttcccaagcccagatgaggagttcctggaagatgaaggctttggtgtctagctcgtgcctgccatcaagtgcctgtggtcgtcgccctagtcttccgctgtttctcgtttgtctttgtgtgttgggccttcgctgcccgtgtaataattatatttacgcttccgtttgttaaactctgaattgtatcaacttttggtgtaccttgcctcctgggacaaggaacaatacacgcacgtcaggaacgcctgttgggtgatttccggtcgtgacaagtatacattaaggaaatctatcacgtgataaggatggtatctacggatggaaggagttctactcggacaagactgggtctttaccatattgtgaggggtccgatatctccaagtcctactaagagatcaactgacccgcggtatatcagggaccccctgggcaggacctaaggtcatcgaatatcaccaccaacacacccaccacagcctacggagccggagcgtgcaggagccaagtcgtcgggtgtcgaggagatgatcctctctagcgggagatcgtgagatcccccttttgtgagttcggccgggggaaagggctcgcctctcgagattgcgtatccgccttgaatgctcctaaatcgcatgcgaacgccaagattacacaggttcgggccgctatcgagcgtaataccctactcctgtgtgtgggactagtggttgaatgttacaagggatcctaactccggagagcgttcttgctcttcgctttcctagagttcaggtctactgagtgtcgtcccctttctcggtaggcaaggtcctccttttatagttcaaggggataccacatgcaccgcctctactctactcttccatgggagggcgacccactttaccttgaccgggtcatgacccgtgccttcgcctggaggctaagcagcagtccgtccttgagcaggacacagcgccaccccccacctgacacggggaacagccctgtcattccctcataaatgggtgaagacttgtggtggtcgtcctctcacggagggaactccgaatgacactccgatgggacgggacatacctacctccactccgccggatacagaggcgacgtgggggcacggccacccgtccaatcggacgtgaccggcaataggccggtcacagactggtcccgcctgattgacgtgggttagtcaggcggcaccgcacgtctgcccctaccgcattaaacgcggtgagggacagttggggcgtcacgcattgatggctgttcagcctgggtcgcctccccgctcgctccccccaccaaatggcggttgggcgagggcctcggggcgaggcagcgcgagggcccgaggggcatgacgtggcaccccgaggccccccggccgcttctgccactcgcgaggtgcgggagtaaggccaagctgtagagccacgcggctagatgggaaggtaacttcccctcactttgtatacccccgggaccatatctccgacagtagcccccggtaccgcgtcgaacattggcccccaaaggacagtctgacgtggcgcctcacgacttcccgtgctgtggttgtgggcccggcggggaattcagagggttgtcggcgagcggccaggctggcgctttagccagaatggtgatttgaccaccattaaccacgctgatgctgggggtgcctagggcgcgaaaatcggggggtcggctagaccacgtccagaatcgtcacccacgccgcctcgactccctcacctgctaggcacgtgatgggaccgatggtgggcccgcctaaccgcgcccgtgaacatcgcacgccccgcgccgagtgtgccgatgacaggcgcactaaatgcggggcgcgggttcagtggggtggtgtgatgggtggacgcgagagtcgagaaggcaaccgcagacgcgggaatcgagggggcagccgcaagggcgtgaaacgaggaggcgagcgcgggcgaggcggggagctggggataaaagggcagggagggagagagttcgtctccttcctctcgccgactgctcacccgcatactcgctcctcaagccctaacgcttctctcgctccacgctgttccatacaccatactcctcgccgttttcccgccggctaccacgggccaagacgctggtgacgctgtgctcccggctttacgcatcacggcagagaggtaccttagcctcacccgcaagatcatgccggaggacgccgccgtgagggtgggggagtcgcaaccgcggccgcggtacccagagcgatccgtgcacctcctgtccttcgccatggtggggttgataccgccattttccatccacggatcgaggtccttgaccgcaaccagcgcgaacaggatgggcaccgccgggaacaggcgtagcaggcccgggagctagaggagcatgctcgggtgctagaggagcgtacccaggcactggagaagcgggcgtgcatgctagaccagcgtgagaccactttggccgcccacgagagaacggcggctgaggcggagtcctccctccgcctccatgaggaggccgcagccgatcgcaaccggaccaccctcaccgctgttaacgaccaactttggtaatatcagcatcggagatgaagatggatcgaagcggaatcgaagataagggttgttgcggaaacagagtaagaatcggctggagtccggatcggctacgattgggatcggctaagtctgagtcagactaggttaagtgatgtagccgattccaataatacgacttgcgtacgacaacgggttcgaattgatgtgcttcaagatgattgccacgcatggatagagtcctgggaaggcaattgtatctattaattaggatattttatgtaaattccttagagataaatgtgggcaaaagtctgccacaaagacttatggtatcttagagtttgttagggataagagtcgtgtccaatatggacatatcttataattcttgggtataaataggccccgagccctatgtaatggataacacacacgttcaatacaattttggcgcatcaccaccctttttgctttagttttatttcgacaagttcttgctttcgggttgagctgcatgggtttcgatcttcaacaaaaggtaaaacttgttatggcggtttgtgttctcgagattagtgcttccatccttatgatactctagtcttgtttacgtaattcgtcgagttatcatatatcttgcataatccttgacgatatcatcatctaacctacaatcggctaacatctgttaccagaaggcagccgattaggttaaataacgacgttggcttagattatatgagatatccaccactctatgaaacatccagcggcttgattgtctagatattgttcttcttttcatacttaatgctgtatcagttgagtttgatctattaagtcgtgcttagaatttcaatacatgctagatctatttgatcggctatgctatgaatatatatatataatctcattaataatatatatttcgatttaagtgatttatactgtctcggcaaggtgaccgatctatcccaatcacttgattcaagtatatatcgatataaggattatatattattgatgtctacagccgattgagtagatttagttctgatttgtttacttaacacttgccgatcgatttacatatgacatcggctcaaagataaatgatatgttattggcatttagccgatcggctatcatttatggatttaattacggtttctttgtctttgtttcttgttgattgcaggatcaaatcaactggcatgctcacacatctgaaggcgagttttggacctgcactggagttaagtagatctcccaggcctcgtgttttctgtcaacacgcttttggcacgcccagtgggaccgattagaagtcagaaggcagcttccctcatggctgagaaaccttgtcgcgactgagaaaatttcattttcccgaatgctagtgtattaatccccgtcccaggaaaagccggggtacaccatacaaacatgatataaaagacacatctttattatatcgataatatttacattattacaaaggcacttaaggcctgacaatcaaaaataaacagcagcggactagcgggcctacgggtccatcttcacaggcgctcaactggggtataagccaagactccacctaagacttcttctccaaagcttctcttactgaaggggggagaaagatagagcaagaatgagtacaaccacagtactcagcaagccacaccggagatgcataattaatgcaaggggtacaaggggataataatatagaggttaagttttgcagtaaacaacatttaaaagtcacttagttgcccaaagctattttgtaaacacgatcctaaagctacacagtattattaatcaaggtcgtgaacccacatgaacctgccttaacccaaggcctatgatgattcagaccgaactggcaacccgaccctgggtcccagctcgtcccaagccaacccaggccaaccattccacattttagttgttaagaaggttttaagaattaaaacactaacttgggtacattgctcggctagcccataaccgagggcgcggctattcgaatagattatactctgatcagaggtgtacaactttacccacaagacacatcttcctcacgtgcaaccacgtgccacataccaccacggtatacagacggaagacgtgacatagtttccaacccatcctagccatagacaagagtaccgacccaatcccacctatggccggaacctccgggacaggtaggcaggattgagcccctagcagcaggacaccagccctgtgccgtgacatctcgactaccgggccgcagctcgtgtagccttcatttatccttgagatgtccatcgacccccgacttcgtccatctccatccgtgtacttttgtttattaccaggctgagccacaaactaagccttacccactagacatgtggaagtacggtagtgctttgcaacagaggcccgaagaccggtccttatatggccgaggtgctactatcaaaaccatgcaccccgagcccagcctaaaaccatcttggggattttgaatagaaggagcggtgtgaatccaattccacaataatccaacaattccaaagtgtccagatgatatgaagattcccaaagtctagagttggaaaaccacctaatgttacctaattaaatagcgaagcatctacctaaaatcatactagtgataccatgagtagggtgtccactagttggggttttgtttattctagggtgaacaaggaaataataacaataacaatattaaggtcataacaaaggtaaataggcatggctaaataaagcagtgataacgcgggaatttaaataaagtgataatgcaataatttaaatcaacataattttacaaaataggattcaatatgttcaaagatgatgtgacttgccttgctcgctttcccaaacgccggcttcaacttccacgaagagcggatcttccgaagctgcagcgtctacacgaccaacagaaaagaaaaggcttttactctaataaactccaaatgacaagcaggaacaaagcacaaaaatgggttcttgacttcttaaggaaaaattagagatttgaacggtccaattccgagttcaaatggccaagttatggccatttgaagtttatatgctctttaaatgaatatttgcgaatttcttcatttaaattttaatttaaaattggatttattgcgtcagccgaggggaggagcgcgcggaccgggtccacgggagtggggcccatgcggcagcctcacggtccacggtggaccgggtgcacgcggcgtacgccggccggcgccgtggttcccacgcgtcagccgcacccgagggcgcgggcggctgacggccgggccccacatggcagccgcgggacgcgcccgaaggcggccacgccggcacaaccgacaggaggcggcgcacccgcgccccgatggtcgccgccggcgaccaccggcgcggcggagcggcgcccgagagaggggagggaagggggaagcgaaacagcggtccacggctcaccccgggtcgacggcgacgacgggaacagcgatcggagcggaggaaggcggcggcgtggctcgggtcgacggggacggcggcgttccggcggtcggcgggcgaaacggaggggtggacggggtcggcgaggttgcggcgaacccgaagaaggcgacgccgaagcgggagaaggtccggggcgacgacggcggcggaccggaactcggcggtgacggcgaacagagagagcgacggcgcgagctggattccggcggagagagagagcggcgagtggtggaaacggcagagggaggcacggggagtgtttatatagggttgggagggggagagagcggccggatgagggggaatcggccgcggaagatccggccgccattgatgcgccggcgaggtttagggggaaacgttttcgaacgaatccgagggagagagagagggaaaagtggggggaaagagggagggaatcacggggaatatttcccccctcttgattgcacacggggcggacgggagcggcgggattcgcagcggcggcggcgctagggcacaggcgaggcggcgggagcggcgggaggaaggggatgacgggtgggccccacccgtcagcgagggtggcgggcgggcccgtccgtcagcggcacgcgcgcgcggggaggaggccggatgggccgcgggggagaggagagagagggagggaggtgggccgagccagcccaagaggggaaagactttttagggtttttctttttataaaatcattttaactttttttatttcttcttaattattatttgtgctctgaaaattccactaaaatttgagggctccttttagaccaaggagaatttaacaaaaattctccgggccacatttgaatttttcttgtacgtattttagtgtttgccaatttcttttcgaattttaattaattctattattccttttagaaaatgatttttatttcgggatgaatttatcaggacgtgacaaaccaccactgtcaccgtcgtcggccagcctgagtaatgttaaggaaaagatccagaagctcggtttgactgacgtccatgaaggaaacgttgtgcccattgatccagagaagttcactcccgaacagaaggaagacttcaatgcaatgatgcaacaagcacaagatcaatttttaagttcattcatgcagactcgcaagggcacatttgttcagaagtacaaggtgaaggtggttcttgaggatcctgggatcggttcttctaaagagggagaaaagaaacaagttccagacggatcagcccagccgagtgacaaaggcgttacagatgggtcgacccaggagaaccagggtgactacttccatggagtacatggagttcaaggtgacggcactcagggaccacaagggggaaatcttaatcagaatgacaatgcattccaagattttttcaataactttcaagatcgagttgactatgttgtgtatagtgctttgattaatcaatctggagtgttgactaataccttgtcaaatataatgaaatcggtagccgatggttcaatagctgaacatcaggctgcaggcccagtttatttgcaagggggtacttttccaaattattgaactttgatcaccgatgttcatccacttactcagggaattcctcctgttgcatcatcagctcagccgatggcaccagcatcagctccagcacctgcagcgccgtcgtcggctccaggccaattaatcaatcgtcaattattggtaagagagcaatctcagcatcctagaccgaatgtgactcagctaacacaagaccagattgcatctaggtgtttctacctcctcagaatgctgttaattcagctcagcagcagccgattcagcaaacaccgcccaggcaacaggttgtgcagcctattcaacaaacatctccaatccagcaggtcgtgcaaccagttcagcagacgccagcaaggcgactggctttacagccgattcagcagacgccgttgagacagtaggtcgttcagccgattcagcagcaaggctcaatgaatgtgttgcctggatttgcaacacctggtggtcagcctgtgcagtacactacaaatcaggttgtcccggaacacctggttcatcatgtgcaaccagatggttcagtggtacctcaagttattcctgagcatttggcgcgtggtactcagccaaaccttcacaattaccaggggggcaatttgagttatgaatatcagcctccatcacctcaagttcagtaccaacaggcaggatcggttcaacctcaatttgttcatcaatacaatcagtttgagctgtcgcgtcccaaaacgactctaaaatacatcctcaaaattatgcatagaataagtaaaatccatgtgaaagcctccaacaattaaaatgtgcaaagttaaaagtcgaataaggcttggaggatttttgtatatttcctaaaagcctaaaatgcgtaaataaat

SEQ ID NO: 23083 - DNA, 2042 bp, Oryza sativa
tcctgaggaaccacgggcgcgggctcggtacgaggggtctcgacgaagcaagtccatgccagggactgacgaacaagctcgggcctggaggtactcttgcgggcggtgatcttcaggctgcggcagacgcggcagcgcttgggcgacagacctctccctaggcgatcttgagctgacacagctgcgcctcccctgcgtctaggtccttcttcagctgcagattctcctgacgtagctccaggatcttcatgttgttctcgaccaacccacggcgcaccatctgatggaagtcgatacgagccacatcgtacgcctccacgatgcgcgctaggtgcatgatggtagcgtcatcctccgagctagcatccctgaaggtggcgtagtcgcgggctcctccgcgacgagggtggtagcggtagggcgagtgctgcaactgatccgggtagcgctggtgaagagtgccgatggtgaggagagcggcgttctggcaagcggcggggaaagaatctccacccggggtgactgccagcgaagtccgctcgggagagccagagaggatcactgcggtgacctcccaaccagcgtggggctctgcatggtcaccctcctgctccggaagcggcctggcctggtagtccactccatgtggataccccaggacaacgcacatgccccgcagctccaagacaaagccagtcatgtccaaaccacgacgggtgattgtggggtcccaaaaggactctaaaatacatcctcaaaattgtgcatagaataattaaaatccatgtgaaagcctccaacaattaaaatgtgcaaatttaaaagtcgaataaggcttggaggatttttgtatatttcctaaaagcctaaaatgcgtaaataaattttagtggaattttcagagcacaaataataattaagaagaaataaacaaagttaaaatggttttataaaaagaaaaaccctaaaaagtcctttttccccctccccctcttgggccggctcggcccacctccctccctctctctcctctcccccgcggcccaatcggcctcctccccgcgcgcgtgccgctgacgggcaggcccgcccgccaccctcgctgacgggtggggcccacccgtcatcccctaccttccgccgcccccgccgcctcgcccgtgccctagcgccgccgccgccgcgaatcccgccgctcccgtccgtcccgcgcgcaatcaagaggggggaaatattccccgtgattccctccctctttcccccccgtttttccctctctctctccctcggattcgttcgaaatctttccccctaaacctcgccggcgcatcattggcggccggatcttccgcggccgattcccccacatccggccgctctctccccctcccaaccctatataaacactccccgtgcctccctccgccgtttccgccactcgccgctctctctccccgtcggaatcgagttcgcaccgtcattctctctctccgccatcgccgccgagctccggtccaccgctgtcgtcgccccgggaccttctcccgcttcgacgttgccttcttcgggttcgccgcaacctcgccgacctcgtccacccctccgtttcgcccgccgaccgtcggaacgccgccgtccccgtcaacccgtgccgcgccgctgccttcctccgttccggtcgccgttcccgtcgtcgccgtcgacccggggtgagccgtggaccgcccatttcgtttcccccttccctcccctctctcggccgccgctccgccgtgcctatggccgccgccagcgaccataggggcgcgggcgcgccacctcccgtcgactgtgccggcgaggccgctttcgggcgcgccccgcggctgccatgtggggcccggccgtcagccgcccgcgtgtcacaccctaaaaattgaaaaaaatataaattgttgtttaaatggaatttctagaatttattttaaaagtcttgaaaagaaaatctaattttaattaataaattccaatataaaatggggccagataaaatttcattaaat

SEQ ID NO: 23084 - DNA, 661 bp, Oryza sativa
agtacttcatcatctcagaaaacattgcatgaacagtcacaactcggcgatcattgctggtgagagttacttttctgttagcacatcctatcacacctttatgtctggctaaccagtccatccctacaatgacatcacgtctttgcattctaacaatataacattggccataaatggtaccccttgaattcctattctgacagaggggctccgtcgcaaagagagtgcttgattacttggggtactaaccatcaaaggacatctaacatcttctacttccatcccatgatttcccgcaaaactcatagataagaatgaatgtgtagcaccaaaatcgaaaagcactgttgccggaactgatttaacaaggaacgtccccaaaatcacatctggagcatcttgagcttctgctactgcaacatgattgacaacgggcctttgatgctggtacaacacacttgatctgggcagggacaaccttcacgtgtcggcgctttggacacttgtcagcctaatgtcctgggtctccacagttgaaacataccacacgcttgccgccttgctccctcttggcaggatgttgctgtgtccaaactgcaacatgacgtgagattccattaccgatgtcgttgcccaccattggttgttgaaaaactgatgc

SEQ ID NO: 23085 - DNA, 761 bp, Oryza sativa
gaatgatgctaccacaaggcatttggttgagatgctgtgggccatggatgaaagtcgtgcagagactgtgttagcagctcaagatcgtgaagatcggaatcgtggtaagatttgcaagttagaagacaaggtggatcgtttggagaaggaattagccgcattgaagggagaagcaccacctcagaaggccaggattcgtcttaccgcaaggaagagagctttatttgtccctcgctatcaattggcgccaaaggttcgtgtggtggagaaagaagttgccccagcagatcctccggtcatcatcataagtagtgatgaagaagaagaatccaagcgcaactgttccaagattgagtgggtagcaacccaagatgatgaagacgagccgaacgagccttcaatcgacctccgatgctcggaagaactagagtgacttgttaagccgttgtcttagatcgttgtgttagtttgcttgttttaagtttggttgtgtgtgtgtgggtcttgcatgtgatttacatcagtggtgggatgtaagtacatgtgtttgtttgctttttgagtgttaggaagttggtgagtttagtggtgtgtgagttttcagtttgtaataatgaaacttagttaagatcaataaaagttaaagtaattctctgccctaagtagttttcccccggtttctcttcttgtgccctgtgctatgccagatggtgaacactcgcagcaacgggaatggtcccaacctcaacaaccccaataac

SEQ ID NO: 23086 - DNA, 929 bp, Oryza sativa
atctggatgcgtcggattccgacttcgggatggcctgaagtcgcgttacatccccttcagtgccccacttctcgcagcaagtggcaaacgagatggttctacctccagatagagaacttggaccccgtccttgttattcctgaggaccagccagaaaagatcccagagtggactgctaaacccgccttgactccctccctccaatcctttatcgacatcattgatgatctccgaaaacgggggttgtcgggatatgaagtcgctgccgacttcgtaggtcggcggattcaaccgctacaggcccgtgcccatccggccttcgattactctgggccagatgacgtgacccgggtctctcctcggggtatttatcctcgtatttctaaatttgtttcaagtgcatctgtttcctctaacttatcgagttctcgttctcgatttacaggtctggacagtgacactgtggggcgccgcatcggccagataatgatcagctgtcacgcccagaaattcccgaatagaattccaagcagaatgtgcaataaaatccccgtccaggaccagccagggtacacaaacgacaatgttgacatacagatccacgtcttacaaacatcataaagttttacataaatgcagcggaaggaaagaaagacaacaggagctaagccttgactaaactgcagcgggaacaccactccacaggcatcctcgacggcaaggacgaagcctactcctcggagaacccttcatctggtccgaactcaaactctggggttgggaaaagtagagcaagactgagtactacccactgtactcagcaagtcataccggaatagaggtatgatgcagggaatcatcaaagaaaagctaaagtggttcctttgcataaagcgagcatttataaacagagatttcaagatttaaac

SEQ ID NO: 23087 - DNA, 6535 bp, Oryza sativa
ttataccccagttgagctgcctgtgggagtggagccggagcttcgctagattttattttccgctgcagttttcttcttggtgaggactaagtgcctcttaagtaagtatttatcgttttagttaatttgatgaatctgtatattaaattgtcagtttgtgtacctcggctgattcctggacgaggattttatgcacaaataagttcggaaattactagtgaatttccgggcgtgacaccagggctacacctaatcctccacaccatcagcatcattgtagaactcttcctctgatgaatgactgcaaggtgagtatatgacatactcagcaagccacgcagcaaatatgcaagtgcataaggataccaaaggatggcatagtagggtttcatttgcataaacaacatttaataaacatttcagaatttaataaaacagttaagtaataattaaacaatattaatccaacgctatacaacataccctgttatataggcccaaccattctgaacaaccatcccggctgcacagttctatctccaaaccaggaatataccattccaaaccaggagctaatcaaattattaccagttatagcatcttttattgtgatgagaggtgtgagactaatcacgaaagacattgttagacccgcccataaccgcgggcacggctattcgaatagttttactctgaccagaggtgtaccactgtacccacaagacacagccccacatcatgtcaccatgtgcctcaataccaccacggtacctcggaaaggagctgtgacaataccccttgcataacacaatccaccgcagcgcaccattcctggatcataatcacccccttataaacaaggcatggactccccagcgacccccgtgggattatctccgccacttctcagtctggtgctccgcaatgaaccatgctatacaaaaggtaaagccgttgcccacgatggcttgtggttggcacggttaatgtttcacaaccgaaactcgtgaaccggtccttaattgccatgctagctcacaacccaccattatcaagttttagttggcaagtaattaattaaccaatcacgattgaccatcgtgaactagcattaagccatcattaaataatgaatcataagttatcctaatagtgtgctaatgtttctaagcatggctaagcaatcacatctaatatctagtcgaaccaatatatatagcccaactagtcaagttaaaataacccaaggtatcaaggaataaaggaaccaataacaaaaagggctataacaaacaatagtttaattccacccaatgacattcgaaaataaatgcaatagttgaatgaaaacaatagctttaaacgggatcaacatgctcaaagggttgtttgggatctgtgtgacttgccttgctggccttggaactcttcaaattcttctcctgcgaaaacggactctccggaaacgtcagaatctaaacagaaaagagcaaaaacaccaaaacagcacataaacaagcatgaaaagtacatgtggatatttttaacatgtagatctcaattttagaaaaatttagagacttgaaccaactaaatcccgagctaagatgaattagttatgaatttttaaagattaaatcggattaaaacacttatatggattttaattgaattatgacgcaataacgaattatttttgaaaaggaaaaagggtttattgcgtcagcaactagggtttgcggtggaccgggcgcacagcagcggttcacgggaacggacggccgagatcgatcctatccaaaacgaacggccgagatcaagatccacggccgggccatggcagacggccacgatgacgtcagcggcgacgtcatctcctgcggcggctcgggagcacttgctcgccggcgaacgacggcgcgaggacgcgaacggagggcaccagcacatagagaacgtcgcggcgaactcaccgatgaccaaaacgacggcggaagatcaacggacggcggcggcgcgagtaaaaaggcggcggcactcttcggcttgacgacggcgacggtgctccggcggtcttcagcgacggcgaaggggcggacgaggacggcggtgacttggcgaccacgatggcgacctccccgagcgacgacgacgaccggaatggcggcggcgcacggctggagcgtcggcgacgacggcggctcgaggttacacggcgctagggcgcttccgacggcgagagacgaaggcgagggtggcggcgggtagaggagacaccggggatccttttatagcggcaaggaggcggcggcgaaggcccacggcgaccggcgacgcgaaggaaacaacggggtttggaggaaagagaccgatccgattcgaccccgaatccacgaatttccaaatgattttagccggtgattccaaaagagaaaaggtagaggagatctcgggaaacatttcccctcaatcgatttcaccggagaaggaaaggcgcggccgaatttggaaggagacggcggcggcgcggcgctagggtttcgggcggcggccgacgtgaggaagacgacgactccgacaagtgggccccacctgtcagtgaccggacgcgcgcgcgcggcggctgcggactggactgggccgactgggccgagggagagagagagaggtttttgggccgactttcggcccaaagccaatagagacttttaaaaacctttttcaatttaaattattcatgaaatgcaattccatttattaaaaatacttccttagctcaaataaatcccagaaaaatctaggaattatagaataaagcaaagtatttaatgaaattttatctggccccattttatataggaatttattaattaaaattagatcttctcttctaggcttttaaaataaactctaataattccatttttagggtgtgacatcccccgacggcccggtgcccgtagccccaaaccctcgggagggtcccgaggcccccgtgggaggaagagaggctctggcgggtggccccgaggcctataatcccgatatggcccgagatcctgtcacaccctaaaaatcctaaatatataaattgtagtttaattggaattattagaatttattttaaatagcctagaagagaagatctagttttaattaataaattccaatataaaatggggccagataaaatttcattaaatactttgcttaattctataattcctagatttttctgggatttatttgagctaaggaagtatttttaataaatggagttgcatttcatgaataatttaaattgaaaaaggtttttaaaagtcttcttttggctttgggccgaaagtcggcccaaaacccctctctctctctccctcggcccagtcggcccagtccggcagcagccgcccgcccgcgcgtccttttgctgacaggtggggcccacctgtcagtcttcgtcttcctcgcgccgctgccgccgcccgagccctagcgccgcgccgccatcatctccttccaaattcggccgcgcctttccgtttccggtgaaatcaacagaggggaaatgatcttcgggatctcctctaccttttctcttttggaatcgtcggctaaaatcgttcggaaatccgtggattcgatctcgaatcggcttcgtctctctccccgaaccctagaccttccttcgccgttgccggtcgccgtggcctccgacgctacctcctagcccctataaaaggacccccaagcccgccgctacccgccgccaccctcgccttcacctctcgtcgccggtagagccctagcatcgtgtagcctagcgccgccgtcgccgccgcagctccatccgtgcgccgccgtcgctccagtcgtcgtcgctgctcggggaggtcgccttcgtggtcaccaagccgtcaccgatctcgtccacccctccgccgtcgccgtaggtcgccggagcaccgccgtcgtcgttaagccgaaggttgccgccgcttcttcctcgacgccgttgatcttccgccgttgttttggtcaccggtaagttcgccgcattgccatctacgagttggtgtcctccgttcgcgtcgtcgcaccgtcgttcgccggcgagcttgccgcccgagccgccgccggtgatgacgtcatcgccgacgtcatcgttgtcgtccgtcgtagaccggtcgtagaccgttagatcttggccgttcgttgtggataggatcgatctcggccgttcgtttccgtgagctgccgccgtgcaccaggtccaccgtgaaccctagccgctgacgcaataattcccttttccttttcaaaaataattcattattgcatcataattcaattaaaatccatataagtgttttaatccgatttaatctttaaaaattcataactaattcatcttagctcggatttagttggttcaagtctctaaatttttctaaaattgagatctacatgttaaaaatatccacatatactgttcatgcttgtttatgttctgttttggggtttttgctcttttctgtttaggttccgacgttttcggagagtctgagtttgtaggagaagattttgaagagttccaaggccaccacggcacggcacacagatcccaaacaaccctttgagcatgttgatcccgtttaaagctattgtttctattcaactactgcatttattttcaaatgtcattgggtggaattaacctattgtttgttatagcccttttgttcttgattactttattccttgataccttgggttattataacttgactagttgggctatatatagtggttcagctagatattagatatgattgcttagccatgcttagaaacattagcacactattgggataacttgtgactcactattacttaatgatggcttaatgatagttcacaatggtcaatcgtgattggttaattaattacttgccaactaaaacttgataatggtgggttgtgagcacatggttttgagagttgtgctcatgacaattaaggaccggttcacgagtttcggttgtgaaacattaaccgtgccaaccacaagccagcgtgggcaacggctttaccttttgtatagcatggttcattgcggagcaccagactgagaagtggcggagataagcccacgggggtcgctggggagtccatgccttgtttataagggggtgattatgatccaggaacggtgcactgtggtggattgtgttgtgcaaggggtactgtcacagctcctttccgaggtaccgtggtggtattgaggcacatggtgacatgttgtggggctatgtcttgtgggtacagtggtacacctctggccagagtaaaactattcgaatagccgtgcccgcggttatgggcgggtctaacaatgtctttcgtgattagtttcacacttctcatcataataaaagatactataactggtaataatttgattagctcctggtttggaatggtatattcctggtgtggagatagaactgtgcagccaggatggttgttcagaatggttgggcctatgcaacagggtatgttgtatagcgttggattaatgttgtttaattattacctaactgttttattaaattctgaaatgtttcataaatgctgtttatgcaaatgaaaccctactatgccatcctttgttatcctgtgcacttgcatatttgctgcgtggcttgctgagtatgtcatatactcaccttgcaatcattcatcagaggaggagttctacagtgatgctgatggtgtggaggattaggtgtagccctggtcaagctgcctgtggagtggagtcgtctgcgccgtttatcttatttttttccactgcttggatctttattgattgagaggaactatctacctctgtaatgacattttattcgcttattaattagagtgataattgtactctattatcaatttgttattgtgtgcctcggctgattcctggacgagggttcacacacacgtaagcgtttggaattttggatagaaattccgggcgtgacagatcccccccgaggcccctgagtacgggcgccctaggccagctgcctctgacaacaaggaccggccccaccgaaaagtgcagcgacccgtctactttgtcagcgaggtactccgagacgcgaaaacccgatacccacaggcccagaagatgctttacgcagtcttaatggcctcgaggaaattgcgccactacttccaagcgcatcgggtttttgtcatgacgtcttaccctctcggccaaatcttgcacaatcaagagggtaccggtcgggtcgtaaagtgggccatcgagctcgctgagttcgacctacacttcgaaccacgacacgcgatcaaaagccaggttctggctgacttcatcgcggagtggaccccggtggacgaccatgttccgtccaatgttcccttcctccccggagacggaggaaacccaaacgccgacattcgcgccgggcactgggttatgcacttcgatggctccctcaaccttcaaggtgca

SEQ ID NO: 23088 - DNA, 4429 bp, Oryza sativa
gaagcagcaagacagagagagactagacagttttcacaaataacaaaggatttttatttttgagaatagtgctaaggcttgggatctatggctcgtcctagggtcaaaggtggctctgataccaacttgtcacgaccggaaataacccaacgggcgttcctgacgtgcgtgcattaatccttgtcccaggaggcaaggtacaccaaaagttgatacaatttagagtttaacaagtggaagcgtaaatagttaacttattacatgggcagcgaaggcccagcacacacaaagacaaacgggaaacagcggaagactagggtgacgaccacaggcgcttgacggcaggcacgagctagacaccaaagccttcatcttccaggggctcctcttctggggttgggaaaaattgagcaagactgagtacaaccaccgtactcaacaagacacacccacaagtgcggaataaatgcaagggagtaaaaaggggtcatactataaagggttagggttgcagtaaacagcatttcaagagatttagtgtctcaaagctattttgtaaacacgattctagaactatacaatattattcatcaaggccgtgaacccacacgaacctgccttaacccaaggcctaagatgattcagaccgaactggcaacccgaccctgggtcccagctcgtcccaagccaacccaggccaacccttccacattttagttgttaagcaggttttaagaattgaaacactaacttgggtacattgctcggcttgcccataaccgagggcgcggctattcgaatagattatactctgatcagaggtgtacatctttacccacaagacacatcttcctcacgtgcaaccacgtgccacataccaccacggtatacagacggaagacgtgacatagtttccaacccatcctagccatagacaagagtaccgacccaatcccacctacggccggaacccccgggacaggcaggcaggactgagcccctagcagcaggacaccggccctgtgccatgacatctcgactaccgggccgcagctcgtgtagccttcatttgccctggagaatgtccatcgacccccgacttcatccatctccatccgtgtacttttgtttataaccagactgagccacaaactaagccttacccactagacatgtggaagtacggtagtgctttgcaacagaggcccgaagaccggtccttatatggccgaggtgctactatcaaaaccatgcaccccgagcccagcctaaaaccattttggggattttgaatagaaggagcggtgtgaatccaattccacaataaccagaccattccaaagtatccaggtgatatgaatatttcccaaagtctatagttgaaaaaccacctaatgttacctaattaaattgcgaagcatctacctaaaattaaactagtggtgccatgagtagagtgtccactagttgaggttttgtttattctagggtgaacaaggtaataataacaataacaataataataaggtcataacaaaggtaaataggcatggctagataaaacagtgataacgcgtgaatttaaataaagcgataatgcaataatttaaatcaacataattttacaaactgggattcaatatgttcaaagatgatgtgacttgccttgctcgctttcccaaacgtcggcttcaacttccacgaagagcggatcttccgaagctgcagcgtctacacgaccaacggaaaagaaaaggcttttactctaataaactccatataacagcagaaacaaagcacaaaaatgggtttttggcttcataaggaaaaattagagacttgaacggtccaattccgagttcaaatggccaagttatggctatttgaagtttatatgctctttaaatggatatttgcgaatttcttcatttaaattttaattaaaaatcggatttattgcgtcagccgggagagagggcgcgcggaccgggtccacgggagtggggcccacgcggcagcctcacggtccacggtggaccgggtgcacgcggcttgcgccggccggcgccgtgggtcccatgcgtcagccgcacccgagggagcgggcggctgacggccgggccccacctagcagccgcggccgaccggagctcggcggcgacggcggagagagaggacgacggcgcgggctcgattccgacggggagagaaagcggcgagtggcggaaacggaggagggaggcacggggagcgtttaaatagcgttgggagtgagagagggcggccggaggggaaggaaaccggcgcggcgatctcgggctccattgatgcgccggcgaagttcgcgggagtaaatccgaacgaatccgagggtgtgagagagagggaaaagtgggggaaagagggagggaatcacggggagtgatttccccctctttatggcgcgcggggacggcgggatgcggcggattcggcggcggcggcggcgctagggcacgggcgggcagcgggtgtggcgcgaggtaggggatgacgggtgggccccacccgtcagcgagggtggcgggcgggcccgcccctcagcggcgcgcgcgcgggggaagagccgatgggccgcgggggagaggagagagagggtgagaactgggccgagccggcccaagaagggaagggggaaaaagaagactttttagggtttttctttttataaaacctttttaactttgtttatttcttctcaattattatttgtgctctgaaaattccactaaaatttatttacgcattttaggcttttaggaaatatacaaaaatcctccaagccttatttgacttttaaatttgcacattttaattgttggaggctttcacatggattttaattattctcggcataatttcgaggatgtattttagagtcgttttgggacgcgacaaacctaccccccttaaacggaatctcgaccccgagattcggaagaactggcgaagagatcggggtgggctgccttcagctcgtcttcacgcttccaggtagcttcttcttcggcgtggttgttccactggaccttgcaaaaacggattacccggttcctggtcctgcgctccatggtgtccaggattttcactggcctctccacataggtcaaatcttcgcgaacttcaatttgctctgagtcggcctgctcggatggcactcgaagacatttcttgagttgcgacacatggaacacatcatgcacgttgcccaaggaggcgggcagctccagctggtaagcgactcctccgcgccgagcaatgatacggaaaggacccacataccgaggtgcgagcttcccctttgtctgaaacctgtgtacacctcgcaatggcgtgacccgaagatacacaaagtcatccactgcgaattccagatcacggcgtcggttatccgcataacttttctgccgagactgggccacctttagattatcccgaatggttctgactttagcttcagcttctctcaggatatcagtcccgaacacttggctttctccaacttggtcccacaatagtggtgtccggcatttgcgcccgtacaacgcttcataaggtgccatttgtatgctggcttgataactgttattgtaggagaactcggcataggggagactcttatcccaggtcttcccgaaatctaagacacatgcgcgaagcatatcttttaggatctgatttagacgctcggtctgtccatctgtctgcgggtgatacgcggtgctgaaatttaatcgggttcccaactcttcttggagcttcttccaaaagtgagaggtgaattggcttcccctatcagatacgattttcttgggaacgccatggagactcacgatcctagcgaagtagagctcggctagtttgttccctccataggtggtctttacaggaataaatcgagctaccttggttaatcgatccacaactacccatatagaatcatatccgccttgggtttttggaagtccggtgatgaaatccatcccaatttcatcccatttccattctggtacttggagaggttggagaagtccggccggtcgttggtgctctgccttgacacgctggcacacatcacatagggccacaaactctgcaatttcccgcttcatgctaacccaccattatttctccttcaagtctaagtacatctttgtactgcccgggtgaatggaataagggctctcgtgagcttcctgaagtatcagctgtttaagttctctgttatctggaacgcatacccgatttccgttccatagggttccgtgttcatcctctgtgaaaccagcggctttaccctgtttcatattcttgaggagtccatgcatgtccgggtcgttcttctgagcctcgcggatttgatcgagcaaggtgggcttggcttccagcg

SEQ ID NO: 23089 - DNA, 4774 bp, Oryza sativa
tgagttgcgacacatggaacacatcatgcacgttgcccaaagaggcgggcagctccagctggtaagcgacttctccgcgccgagcaatgatacggaaaggacccacgaaccgaggtgcgagcttcccttttgtctgaaacctgtgtacacctcgcaatggcgtgacccgaagatacacaaagtcatccattgcgaattccaggtcacggcgacggttatatgcataacttttctgccgggactgtgccaccttaagattatcccgaatggttctgaccttcgcttcagcttctctcaagatatcagtcccgaacacttggctttccccaacttggtcccacaagagcggtgtccggcatttgcgcccatacaacgcttcataaggtgccatttgtatactggcttggtagctgttattgtaggagaactcggcgtaggggagactcttatcccaggtcttcccgaaatctaggacacatgcgcgaagcatatcttctaggatctgatttagacactcggtctgtccatccgtctgcgggtgatatgcggtgctgaaatttaatcgggtacccagctcttcttggagcttcttccaaaagtgagaggtgaattggcttccccaatcagatacgattttcttgggaacgccatggagactcacgatcctagcgaagtagagctcggctaatttgttccctccataggtggtcttcacaggaataaatcgagctaccttggttaaccgatccacaactacccatatagaatcatatccaccttgggtttttggaagtccggtgatgaaatccatcccaatttcatcccatttccattctggtacttggagaggttggagaagtccggccggtcgttggtgctctgccttgacacgctggcacacatcacaaagggccacgaactctgcaatttcccgcttcatactgacccaccagtatttctccttcaagtctaagtacatcttcgtactgccagggtggatggaataaggactttcgtgggcttcctgaagtatcagctgtttaagttctctgttatctggaacgcatacccgatttccgttccatagggttccatgttcatcctctgtgaaaccagcggctttaccctgtttcatattcttgaggagtccatgcatgtccggatcattcttctgagcctcgcggatttgatcgagcaaggtgggcttggcttccaacgcagccaagaatccacggccaactatgcttaggttcagggcttccatctgttgattaagttcgggtgggatgccacggacgttaagagtgttgcaatggctttttcggcttagagcgtcggcgaccacgttggccttaccaggatgatagtgaattcccacatcataatccttgatgagttctagccatctcctttgccgaagattcagatccgactgggtgaagatgtatttcaaactcttatgatcagtatatatttcacagcgattcccaatgagatagtgccgccagatttttagagcatgcaccaccgcggctaattccaagtcatgggtagggtagttgccttcatgaggccgtagctggcgtgaggcataggccaccacatgaccgtcctgcatgagcacgcaccccaatccttggcgcgaagcgtcacaatacaccataaaatccttgcgagtatctggcaagattaacactggcgaggaacccagcttttctttgagagttttgaacgccttctcgcattgcgggttccacacaaatttctcttctttcttcaacaactgtgtcatggggagagcgattttggataagttctcgataaacctccggtagtatcctgccaaacctaagaaactgcggacttgagtgactgtcttgggttgcttccaatcggtgacggcggtcactgtttcggggtccacagcaactcctttagcagatatcacgtgccctaagaatttgacttcggacaaccagaactcacacttgctaagtttggcatacaattgatggtcccgcaactttcccaacaccagacggagatggtgccgatggtcttcctcggattgtgagtatatcaaaatgtcatcaatgaaaaccacaacaaacttatccaagtattccatgaacactttgttcattaagttcatgaagaaggcaggtgcattggttaaaccaaacgacatcaccgtgaattcatacagtccgtatcgtgtggtgaatgcggtcttcggaatatcttcttcacgaatacgtaattggtgatatccggaacgaagatcaatcttggagaatacagtggcacctttaagctgatcgaacagatcatcgatccggggaagagggtacttgtttttgatggtgacttcattgagagctctgtagtcaacgcacatcctcttcgtcttgtctttcttctccacaaaaatcacaggagcaccccagggggaagtactcggacgtatatacccctttcctttcaactcttccaattgtttctttacttcagccagttcatttgctgccatacggtagggtcgcttgtacagaggagtggttcctggagcaagatctatccggaactcaatctctcgcttgggcggcataccaggtagttcttccggaaatacgtctccgaactctctgactatggggatttctgacagccctatctgatgcagttctgaacttctgacagaggttgggggtgcaaagaaaacaaccggttgttccggccctcggtacagagtgacagtgcgtctcgcgcaatccactactccttggaattgagccaaccaattcatcccaaggatcacatccaagttcttggtgtctagcagaatcagatccgagggaaaaggaatccctgaatttctatagggacggcaggactaaaatactttgctgtcataacccctccaggggtggtgatgagcagagggttcctaagcctttctacccccaactgatttctccccacgaatggcacagatataaacgagtgggaggctccagagtcgaacaaaatggtagcagggatggaatgaatgaggaacgtaccaacgatgacgtctggagttgtcagcacgttctcggccgtcacgtggttcacacgaccccgaatgacatcgttaccaccattgttggagcggggaggcgctttgccttgctggcgcctcggctttgggcatttatccgcaaagtgcccgggctcgtagcagttgaagcacagacgctgcggaccttgagcgtccctgcggccttgaccaggctgcacagttggcgtaggaggacggggcgcacgagtcccttgttgattctgctgctgctgcggctgtgggacgcgcaccacgaattgaggtcgaggcgcggagcgaggttgctgctgctgttgttgctgctgcgaggaggatccccctggatagggattggtgtagcggaccctttggttagcaccctgttgattgcggaaattcgccaagcggcgcttgtgcgactccagttccttgtgcttggcttccaagcggatgctcttgtccaccagacgttggaaatccggatagtccccggagactagacggacggacagttcagggtccattcctgccaagaacttctcttgcttctcctcatcttcccgcacatcctccggggcataacgggccaggttgttgaactcatgcaaatactccatcacagagcggttgccttgcttcaactctcggaattcccttttcttaagggccacgactccggcgggtacatggattctccggaaagcggcggtgaagcgagcccaagtaataggctgcccctctggctgcgtagcctggaaatggtcccaccatagagatgcgggcccctgcagctggtgggcggcgaagatgactttctcctcatcgctgcactgcacagtgtctagctttttccccacggcatgcaaccaatccaacgcatccacggggttgttggaactagagaaggtgggtggacggatgcggaggaactcggcgagtttagagtgttggggaggtggtggtggagcattatgttgtggcggattttggaggtggtggaggaaagcagtcatcatgttggcctgctgggcgaggatttgggtgagaatagcgttggtatctggtggtggtggtggaggcggaggaggaggtgggggtgggctgccatggttgttgtggttgctgccctcaggttggttgccatcaccggtattagcacttctcctggtcatcaccatctgaaaaccccacacagaaccagcaaacagagagagagctgacaattaaagctaaccacccacgactaccttaattcttaaatttattactgctattaaattggttcattaaagttcaaattgcttagacaaataaaataaagacaggctccgacacagttatgccatacaccggcataaccatgccccacacaactccaacaagaagacaaacgagaaagaacacacgcgcaagcctactaactgctcgtctatcgctgcgacgggccaggacggaaggtgagcaacagcgcatcctccgtgctaccaacgccggaggcttccccctcctggggaaccacgggcgcgggctcggcacgaggggtctccacgaagcaggtccacgccagggactgacgaacaagctcgggcctggaggtgctcttgcgggcggtgatcttctggctgcggcagaccccgcggcgcttgggaccaccgacctcaccctgggcgaccttaagctgacacagctgcgcct

SEQ ID NO: 23090 - DNA, 23168 bp, Oryza sativa
gaccattcctgttgctgcgagtgttcaccatctggcatggatagggcacaagaagagaaaccgggggaaaactacttaggacagagaattactttaacttttattgatcttaactgagtttcattattacaaactgaagactctcacaccactaaactcaccaacttcctaacactcaaaaagcaaacaaacgcatgtacttatatcccaccactgatgtaaatcacatgcaagacccacacacacacaagcaagcttaaaagaagcaaactaacacaacgatctaagacaacgacttaacaagctactcttgttcttccgagcatcgaaggtcgattgaaggctcgttcggctcgtcttcatcatcttgagttgctacccactcaatcttggaatggttgcgcttggattcttcttcttcatcactacttatgatgatgatcggaggatctgctggggcaacttctttctccaccacacggacctttggcgccaattgatagcgagggacaaatagagctctcttccttgcggtaagacgaatcctggccttctgcggcggtgcttctcccttcaatgcggctagttccttctccaaacgatccaccttgtcttctagctcgcaaatcttaccacgattccgatcttcacgatcttgagctgctaacacagtctccgcacgactttcatccatagcccatagcatctcaaccaaatgtcttgtggtagcatcattctcaattccttcagtctcaaggtaactgccacggtcacttccctgcggttgacgaggatggtaacgatactcagtgtcggccaactgatcactgtagcgatcacggagctctcctatggcgatccttgccacttcctgacatgcatggatgtagttccttcctccagcttcgaacatcactgatgggatatcttcactgttactgttcaaggtaactttgactcggcacttctcttcatgacgatcatgacgaatctaggcataaaaaggggcagtcccaaatccaatgacaaaggacatagtacgcaactcctggacaaaaccctcaacaccaaacaagtactcaggcttgtagcgcggcatctaaagacaagtgaaaggagggagttaaaacatttatccaattaatagcacaagtttttggattaattttgaataaagtttgaaaatcaaagcaaaaggtaagtaaataaagtaaaccaaacttgcaagatgagttgaaatagttgaaaatgaggtcacaagttttgtacttttgaataacaagtttcaaaagaaataaaagaaagttataaaatcaacttgctaaatttattttattgcagtaagattaaatgaaacatcattgtaaaacttttgctggaaaatgagccattagtacagtaatagatgtacagtactaataacactggaataaattttgaatgagaaccattaaaagagattatgaagtgcatgtgccattagtttggtttaattaaaagagaaagagaggagaacagttctacttttccaatatttttagaaggcttctatgggtaaccatttggcataacctagggtcaaaggggctctgataccaacttgtcacgcctggaatttctatccaaaattccaaacgcttacatgtgtgtgaaccctcgtccaggaatcagccgaggcacacaataacaaattgataatagagtacagttattactctaattattaagcgtataaaatgtcattacggaggtagatagttcctctcaatcaataaagatctaagcagcagaaaataaaataaacggcgcagacggctccactccacaggcagcttgaccaaggctacacctaatcctccactccatcagcctcaatgaagaactcttcttctgatgaatgattgcaaggagagtatatgacatactcagcaagccacgcagcaaatatgcaagtgcacaggataacaaaggagggcataatagggtttcatttgcaaaggcagcatttagcaaacatttgagaatttaataaaacagttaagtaattaaacaatattaatccaacgctatacaacataccctgttgcataggcccaaccattctgaacaaccatcccggctgcacagttctatctccaaaccaggaatataccattccaaaccaggagctaatcaaattattaccaatttaagcatctcttactaaggtgagaagtgtgaaactaatcacgaaagacattgttcgacccgcccataaccgcgggcacggctattcgaatagttttactctgatcagagctgtaccactgtacccacaagacacaaccccacatcatgtcaccatgtgcctcaataccaccacggtacctcggaaaggagttatgacaatacccctcatacaacacaatccactgcagcgcaccttcctggatcataatcacccccttataaacaaggcatggactccccagcgacccccgtgggcttatctccgccacttctcagtctagtgccccgcaatgaaccatgctatacaaaagataaagccgttgcccatgctggcttgtggttggcacgataaatgtttcacaaccgaaactcgtgaaccggtccttaattgtcatgagcacgaccatcaaaaccatgtgctcacaacccaccattaccaggttttagttggcacattaattaattaactaatcacgattgaccatcgtgaactatcattaagccatcatgaaataatagtgaatcataagttatcccaatagtgagctaatgtttctaagcagggctaagcaattatatctaatatctagttgaaccaataaataaagctcaactagtcaagttataataacccaaggtatcaaggaataaagtaatcaagaacaaaagggctataacaaacaataggttaaatccacccaatgacattcgaaaataaatgcaatatttgaatagaaacaatagctttaaataggatcaatatgctcaaagggttgtttgggatctgtgtgacttgccttgctggccttggaactcttcaaactcttctccggcgaaaacggactctccggaaacgacggaatctaagcaaaaagaagcaaaatcaccaaaacagcacataaacaagcatgaacagtacatgtggatatttttaatgtgtagatctcaattttagaaaaatttagagacttgaaccaactaaattggagctaagatgaattagttatgaatttttaaagattaaatcagattaaaacacttaaatcggtttaaattgaattatgacgcaataatgaattatttttgaaaagaaaaaggggatttattgcgtcagcgggctagggtttcggtggaccgggcgcacgggcggcggttcacgcgaacggacggccgagattcgatccaatccaaacggacggccgagatcgatcgggtccacggcggttcacggcggacgaccttgatgacgtcagcaatgacgtcaccgacggcggcggcggcttggcggagcggacggctcgggcggcgcacgctcgccggcgaacggcggcgctaggacacaaacgaagggcaccaacgggtagcggacggcacggcgaactcaccgacgaccaaaacgacggcggagaagcaacggacggcgccggcgacgaagaggaaacggcggagttcttcggcttgacgacggcgacgatgctccggcggtctccgacgatggcgaagcggcggacgaggacggcgacgacttggcgaccacgatgacgtccttcccgagcgacggcgacggctgaatcgacggcggcacacggctggagcggcggcggcggcggcggcgcaaggttgcacggcgctagagcgactccgacgacgagaggcgaaggcgagggtggcggcgggtagaggagacaccggggaggcttttaaaggggctcggaggcgaaggcgaaggcccacggctgccggcgacgaggaaggaaagctcgggcttgaaggaaagaggccgatccgaattgaactcgattccacgaacttccaaaacgaattagctgatgattccaaaggagaaaaggtagaggagatcccggagagtgtttcccctctattgatttggccggaaacggaaaggggcggccggattggaaggaaacagcggcggcggctcggtggcggcgcgctagggtttcggcccgaggaagacgatgggcctgacaggtgggacccacctgtcagcgtccaaacgcgcgcgcgcgcgggcggctgcggactgggccgacttgggccggggagagagagagaaggttttgggccgactttcagcccaaagccaaaagaagactttttaaaacctttttcaatttaaattatttcttaaatgcaattccatttattaaaaatactttcttagctcaattaaaccccggaaaaatctaggaattataaaattaagcaaagtatttaatgaaattttatctggccccattttatattggaatttattaattaaaattatattttcttttcaagacttttaaaataaattctagaaattccatttaaacaacaatttatatttttttgaatttttagggtgtgacaaacctaccccccttaaacagaatctcgtcctcgagattcggaagaactggcgaacagatacggatgagctgacttcaattcatcttctcgttcccaagttgactcttcttccgagtgattactccactggactttgcaaaaacggataactcgattcctggtttttctctcatttgtttccaagatacggattggtttctccacataggtcagatcctcttggacttctatctgttcaagattagcttcttcggtaggtacccttaaacactttttcaattgcgacacatggaacacattatggactcctgccaaagattgaggtaactctaactgataagcaacctctcctcttctactgacaatcttataaggtcccacaaaacgcagtgccaattttcctttggtatgaaaacgatgaactccccgtagaggcgtgacacgaagatacacataatctccttcttcaaaactcaaatctctgcggcgattgtcggcataactcttatgacgagactgagccacacgcaatctttcttgaatgattttcaccttttcttctgcttcccttaggatatccgtcccgaaaacctgacgttctcccgtttgatcccacaaaagcggagtgcggcacttccgaccatacagtgcttcgtaaggagccatctgaagactagcttgataactgttgttgtatgaaaattctgcataaggtagattcttatcccaacttccaccgaagtctaaagcacaagctctcaacatgtcttccaaaatctgattcaccctttcggtttgtccgtctgtctgcggatgataagcagtactaaagttcagcttagaacccatctcttcctgaagtttcttccaaaaatttgaagtaaactgactgcctcgatcggacactattttcttagggacgccatgcaaacacacaatccttgccatatacaattccgccaaccgactcccggaatatgttgtctttactgggatgaaatgagccactttggtaagtctgtcgactatcacccaaatagagtcatggcccgatgatgttctgggtaaaccagtgataaaatccataccgatttcttcccatttccattcaggaatcttcaaaggctgcaacaaaccggcgggtttctgatgttctgccttgactcgctgacaaacatcacatactgctacatattctgcgatttcacgcttcatacatgcccaccaaaatctttccttgagatcctggtacatcttggtactaccagggtgaatggagtataaagtatcatgagcttctttcagaattgcatcttttaaatctttgttgttggggacgcagattctctcacccaaccatacagttccttgctcatcttccaagaaaccaatagcttttcctcttctcatattcttcttgatttcttgaatatcatgatcattaatttgggcttctctaacttgatcaattagagtgggcttcgcttctaaggctgcaacgaaacctctactgacaattcccaaatttaatctttcaaattccttgcataattccaatggcaactgtcgtccttccgtagcattgcaatagcctttcctgctaagagcgtctgctacaacattagcctttcctgagtgataatgaattcccatgtcataattcctaattaattccaaccatctcctttgtctcatgttcacatccggctgagtaaagatatactttaaactcttgtgatcggtgtacacctctgtacgagtaccgaaaagataatgaccccaaatcttcaacgcatgaactactgcagctaactcaagttcatgagtagggtagttcttctcatgcggacgtaactgacgagatgcataggcaaccaccttcccatcttgcatcagaacacaacctaacccaagtttggatgcatcgcaatacacttgaaaacccttctttggatcaggtaaaatcaaaataggagctgatatcaagcgattcttcaactcttgaaaactctgctcacattcttccgaccacttgtacttcacatctttctgaagcagtcgtgtcatgggcttagcaatcttggaaaaattttctataaacctccgataataacctgcgaggcctaggaaactgcgaatctctgaaactgtctttggttgtttccagttggttatggattccacattactaggatcgacggcaactcctccggctgagatgacgtgaccaaggaacttcacttcagacaaccaaaattcacacttgctaaacttagcatacagttgatgttctcgtagcttctctagtgcaaggcgaagatgttcttcatgttcttctttggttcgggagtagataagaatatcatcaataaagaccaccacgaacttgtctagatattccataaacaccatattcatcaagttcatgaagaaagcaggagcattggtaagtccaaaagacataacagtacattcgaacaacccatacctagtggtaaaagctgtcttaggtatatcttcctctttgattctcaactgatgataccctgatcgaagatctatcttggagaaaacggtggcacctttaagctgatcaaacaaatcatcaattctgggtagcggatacttattcttgataatcacatcatttagggcacgatagtccacacacatcctctgggtatggtctttcttttccacaaaaataaccggagctccccatggagatgaactcggtctgatgtatcctttctgaagcaaatcgtctacttgccttttgacttctgccaactcattggctggcattctataaggtctcttatggatcggagttgttcccggtaccaaatctattctgaactctatatcccttttaggcggcataccaggtaaatcatcggggaacacatcgggatactcccggactataggaatctcttccaaagttatttggttcagtcttgaccttaaagactcagaagacaatgcatgaacagttacaactcgaccatcattgctggtgagaattacttttctgttagcacagtctatcacacctttatatctggctaaccagtccatccctaggatgacatcaaggtctttggattctaacaggataagattggccagaaatggtacttcttgaatttctattctgacagaggtttcgttgcagccttagaagcgaagcccactctaattgatcaagttagagaagcccaaattaatgatcatgatattcaagaaattaagaagaatatgagaagaggaaaagctattggtttcttggaggatgagcacggaactgtatggttgggtgagagaatctgtgtccccgacaacaaagatttaaaagatgcaattctgaaagaagctcatgatactttatactccattcaccctggtagtactaagatgtaccaggatctcaaggaaaggttttggtgggcaagtatgaagcgtgaaattgcagaatacgtagcagtatgtgatgtttgtcagcgagtcaaggcagaacatcagaaacccgccggtttgttgcagcctttgaagattcctgaatggaaatgggaagaaatcggtatggattttatcactggtttgcccaaaacgtcattaggccatgactctatttgggtgatagtcgacagacttaccaaagtggcacatttcattccggtaaaaacaacctattccggaagtcgcttagcagaattgtatatggcaaggattgtgtgtttgcatggcgtccctaagaagatagtgtctgatcgaggcagtcagtttacttcaaatttttggaagaaacttcaggaagagatgggttctaagctgaactttagtactgcttatcatccgcagacagacggacaaactgaaagggtgaatcagattttggaagacatgttgagagcttgtgctttagatttcggtggaagttgggataagaatctaccttatgcagaattttcatacaacaacagttatcaagctagtcttcagatggctccgtacgaagcactgtatggtcggaagtgccgcactccgcttttgtgggatcaagcgggagaacgtcaggttttcgggacggatatcctaagggaagcagaagaaaaggtgaaaatcattcaagaaagattgcgagtggcccagtctcgtcataagagttatgccgataatcgccgcagagatttgagttttgaagaaggagattatgtgtatcttcgtgtcacgcctcttcgaggagttcatcattttcacaccaacggaaaattggcaccgcgttttgtaggaccttataagattgtcagtcgaagaggagaggttgcttatcagttggagttacctcaatctttggcaggagtccataatgtgttccatgtgtcgcaactgaaaaagtgtttaagggtacctaccgaagaagctaatcatgaacagatagaagttcaagaggatctgacctatgttgagaaaccaatccgtattttggaaatagatgagagaagaaccagaaatcgagttatctgcttttgcaaagtccaatggagtaatcactcggaagaagaatcaacttgggaacgagaagatgaattgaagtcagctcatccgcatttgttcgccagttcttccgaatctcgaggacgagattctgtttaaggggggtaggtttgtcacaccctgaaaattcaaaatatataaattgttgtttaaatggaatttttagaatttattttaaaagcctagaagagaagatttaattttaattaataaattccaatataaaatggggccaaataaaatttcattaaatactttgcttaattctataattcctagatttttctgggatttatttgagctaaggaagtatttttaataaatggaattgcatttaagaaataatttaaattgaaaaaggttttaaaaagtctcttttggctttgggccgaaagtggcccaagtcctttctctctctcctcggcccagtccggcccagtccgccgccgcgcgcgcgcgtccgcccgctgacaggtggggcccacctgtcagggtcgtcgtcaacctccggccgccgccgcccgaaaccctagtttcgcgccgccgctgttcccttccaaatccggccgttcctttccttcttcggccgaatcaaaagaggggaaatgatcctcgagatctcctctaccttttctcctttggaaacatcggctaattcgttttggaagttcgtggaatcgagttcgattcggatcggcctctttccttcgaaccctaaaccttccttctcgtcgccagctgccgtgggccttcgccgtcgcctccgagcccctttaaaaggttccccggtgtctcctctacccgtcgccgccttcgccttcgcctctcgtcgtcggaaacgccctagcgccgtgtgccctagcgtcgccgtcgccgccgtcgctccagccgtgcgcccccgccgttccagtcattgtcgtcgctcgggaagaccgccgtcggggtcgccaagtcgtcgccgtcctcgtccgccgcttcgccaccgccaaagaccaccagagcaccgtcgccgtcgtcaagccgaagagcgccgccgtttcaacctcgtcgccgtcgccgtccgttggtcttccgccgtcgctttggtcgccggtgagatcgccgtgctgtccgctacccgttggtgccctccgttcgtgctgaagcaccgccgttcgccggcgagcgtgcgccgtccgagccgtccgagccgccgccgccggtggtgacgtcatcgccgaggtcatcggggccgttcgctgtgagccggtcgtggaccgttcgatctcggccgtccgttttagatcaagtcgatctcggccgtccgttcgcgtgaaccgccgccgtgcgcccggtccaccgaaaccctagcccgctgacgcaataatccttcttttccttttcaaaaataattcattattgcgtcataattcaattaaaatcttcaaaaattcataagtaattcatcttagctccgatttagttggttcaagtctctaaatttttctaaaattgagatctacatgctaaaaatatccacatgtactgttcatgtttgtttatgtgctgttttggtgattttgcttctttctgtttagattccgtcgtttacggagagtccgtttttgcagaagaagaatttgaagagttccaaggccagcaaggcaagccaaacagatcccaaacaaccctttgagcatgttgatcccgtttaaagctactgtttcttttcaactattgcatttattttcgaatgtcattgggtggaattaacctattgtttgttatagcccttttgttcttgattactttattccttgataccttgggttattataatttgactagttgagctttatttatattggttcaactagatattagatataattgcttagccctgcttagaaacattagctcacttttgggataacttatgaatcactattacttaatgatggcttaataatagttcacgatggtcaatcgtgattggttaattaattaatgtgccaactaaaacctgataatggtgggttgtgagcacatggttttgatggtcgtgctcatgacaattaaggaccggttcatgagtttcggttgtgaaacattaaccgtgccagccacaagccagcatgggcaacggctttaccttttgtatagcatggttcattgcggggcaccagactgagaagtggcggagataagcccacgggggtcgctggggagtccatgccttgtttataagggggtgattatgatccaggaaggtgcgctgcggtggattgtgttatgcaaggggtattgtcacaactcctttccgaggtaccgtggtggtattgaggcacatggtgacatgatgtggggttgtgtcttgtgggtacagtggtacacctctgatcagagtaaaactattcgaatagccgtgcccgcggttatgggcgggtctaacaatgtccttcgtgattagtctcacacttctcaccatagtaaatgatgctataattggtaataatctgattagctcctggtttggaatggtatattcctggtttggagatagaactgtgcagccgggatggttgttcagaatggttgggcctatgcaaccgggtatgttgtatagcgttggattaacattgtctaatacttaactgttttattaaattctgaaatgtttgctaaatgctgcttctgcaaatgaaaccctattatgccatcctttgttatcctgtgcacttgcatatttgctgcgtggcttgctgagtatgtcatatactcaccttgcaatcattcatcagaggaagagttctacagtgaagctgatggtgtggaggattaggtgtagccttggtcaagctgcctgtggagtggagcggtctgcgccgtttattttattttccgctgcttagatctttattgattgagaggaactatctacctctgtaatgacattttattcgcttattaattagagtaataattgtactctattatcaatttgttattgtgtgcctcggctgattcctggatgagggttcacacacatgtaagcgtttggaattttggatagaaattccgggcgtgacagcacgcctcctctcgaagccgcagctcctccgcgcgacgagccaccaaagcctctgcggctattgacagaaaacacgaggcctgggagatctgcttaactccagtgcaggtccaaaactcgccttcggatgtgtgagcgtgccagttgatttgatcctgcaatcaacaagaaacaaagacaaagaaaccgaaattaaatccataaatgatagccgatcggctaaatgccgatgacgtatcatttatctttgagccgatgtcatatgtaaatcgatcggcaagtgttaagtaaacaaatcagaactaaatctactcgatcggctgtagacatcaataatatataatccttatatcgatatatacttgaatcaagtgattgggatagatcggtcaccttgccgagacagtataaatcacttaaatcgaaatatatattattaatgagattatatatatatatattcatagcatagccgatgaaatagatctagcatgtatcggctaataccccgataccacttcgtattaagatattaaagcaagtagaatataccaaacagaagcctaatatacttaaatgcaacaagatcttaacataaagggcagatctaacatgtcaaacgatcatataggataaaagcagttagatcaggtaagatcggctgaaactccgatactaccctaatcggcaaccagtaggcaggctagatattgaaattctaagcacgacttaatagatcaaactcaactgatacagcattaagtatgaaaagaagaacaatatctagacaatcaagccgctggatgtttcatagagtggtggatatctcatataatctaagccaacgtcgttatttaacctaatcggctgccttctggtaacagatgttagccgattgtaggttagatgatgatatcgtcaaggattatgcaagatatatgataactcgacgaattacgtaaacaagactagagtatcataaggatggaagcactaatctcaagaacacaaaccgccataacaagttttacctcttgttgaagatcgaaaccgatgcagctcaacccgaaagcaagaactcgttgaaataaaactaaagcaaaaagggtggcgatgcgccgaaattgtattgaacgtgtgtgttatccattacatagggctcggggcctatttatacccgagaattataagatatgtccatattggacacgactcttatccctaacaaactctaagataccataagtttttgcggcagacttttgcccacatttatctctaaggaatttacataaaatatcctaattaatagatacaattgccttcccaggactctatccatgcgtggcaatcatcttgaagcacatcaattcgaacccgatgtcgtacacaagtcatattatcggaatcggctgtatcacttaacacagtctgactcagacttagccgatctcaatcgtagccgatccggactccagctgattcttactctgtttccgcaacaacccttatcttcgattccgcttcgatccattttcatctcccatgctgatattaccaaatttggtcgttaacacatgccccccaagtccgggatatttgataatgttccggatttgccgtgtatcgactccgagcaagtttcgcactctaccgttttcccaaccgttactctagtgctttaaatactaaccgttatccccgagaaatctcacaccgtgacttccgttttcaccgcttaagcgaaactttaccctctctctctctggcgattcctccaatgcgcaaggcaattcccaggcgactccatccccagccagatctccgcctgcgacgatgtcaacctccgcgagcccatctgccgcaccatcggccaaatacgctgaggtaagtccccatcggctagatcccccttttcatcattagatcggttttctctcgcctcatactgctttctttttctcggttactttgaacttgtagcatctctccaatttagtcgcagttccaagcttgtcacatgaaaaccactactttctcggcccagtcggcaaccctgaccccactgagttcatcatcggtgaaaccaataggattcctttcagactatccaatccagatctaggtcattggaagaacacctttaaatcttggccgtctctagaaaaaacttcacccgagaaaagttggattacatggttcaagcgtatgtcagctagcaaacgagttcactggaacgaaatcggaatcggccaagcacttgacctaaccatagcaaactcagccaaagaagaacctctaatggcagctgcttcttacttttggtccaacactatcaatgccttcttattcaaccaagggccgatgaccctaactctcatagtcatcattatgatcacgggtctagatgtcacttcatcggctaaccccatgagtctgaacacaaaaaaccaatatgacttcaagaccaagagtataggaggttggtcaggttatgttgcagcatacatgggccaaggttcagttacccctcgagaacatgtagcctttttgctaatgtggttagagaaatttctcttttgtggatcaagctgtggtcctacaaccaactggcagtttgtagccgaagccttggaagcaaataaacaatttcctttaggcaaaatcctcctcggctacttgtaccaaatgctgaataatgcttcggctaagttatctgtcggctcggtagtcggagcaggtggaccatggtggctgctacagacttggttgaatctaatatgtcatgaaagtcgtcaatcgaccatccgtcacagaagctgaatttccaagattagagccgatcatagaagatgacgaagaatgcactcatcgccgatgtatgtcatatggagaatacgcatccacaccggccgatgctggagcaaagttatcagccgaactgctcaaagattggttctgcagtttctatgaaggctttcaaaaagatgctcgagtttggtttccctatgaagattcagcaaacctcgagctcccatcagatttcagatttgaagacattaatcatgaaagattccaaacatccagagaagtcttcatagctgcaatcagcccatgcattcttccagtcggcatccatcaaggaagaaacgtccaagcctcttacgaattctatcatccaatgagttcagctagacagcttggactgggccaacttccaatcggcttattctttgccgataagatccaatgccgaggagagatttcatcaactttaatgatggatcggctgctcaaccttcaaggacctccactgggtagcattgaaaacatagagctagtaatgtttaggagcaaaaactttgatagatggtggggtgaatagaagttgcatctattccaccaaccagcttcaatgtacatgacagacctctttccagatgttgtccctcaagtaagcctttgactttacttgatttcatttgaataactgcttagccgatttatcttaactaatcttttctttgatttctagacaacagaatcctctcctcctcgtcaaagcaacagtggcagggatatcacctacgccccaggcttaattcctaatggaggtgggccatctcctcctgtcatcggctatgatgcccccaagacttcagctcttcttcaagggcttatcagagaaccagccgatgccggtaagaaaaggaaaaccagatcatcggctgtagatactttagccccagctccaaagaagaagatcaaaaagaaagctaaaccagctgatgatctgcctgccctagatccatctattaaacaagctctggatgaagaagaaatcggagaggatgttgatcaagctgtagccgaaataagcgatactgaaagaacaccatcggcttcacctaagcaggtccctcaaactccttctgctccaactcattttacaagagtaagaaaccttctataaccacttttgtaatcatctcactttatggccgattgctcacatacttggtaactgcagaaaaggaaggctgctgtgaagaagaaatcggctccaatgacatctaaaccagctccactggtacaataaccttaattctttcattagttaatctcagccgattttatataacacttgtctattttcaacctccttcccctcctattcaacaagcatcaagcgatcggaccccatcagctgtagggagtcatcacatagaagaagaagttcaaccaactgctccagctatcccagtaaatttcttataaccaacatatgcagatcggctatgcctatttgatctctaactctctttaaatcatcactgcaggtcttagccgatcttttcttttttgatatcagagattatcttgatgaagagacagaggttgacaacactagcaaggctctagctcctttgtctgatgatgtgaagaaaactcttgaagatatctctcatcggctagagacatcatcactagatagcctagtagtcgactgtggatcaattaggactcggcttcacgaagtttacgctcaaatcctcgatgagttagccgatatccttactacagctgtttatcttgagcaacatcaatttaagctggaaaaggccaagctgagattagccgagcatcaagagcgcaaagacattgaagcaacaatccaggccaatcggcaatttgttcatgaagaaaaagccaagctcgatcaattatctaaaggcccgatcaaatccaatattgaccggcttgaagctcgcaagatcgaactcttagcacaacttcaagaatgcaatgctgaactggatctagagcacaagaggttagccgatctcccacagtctatcgaagaacaaaaagcaaggttaaaatcagctatcaagaatgttgctaatatgaccaaatctttgaaggtcattcctggaaccgacgctcaagatgcccaagccatagaagaagtagaacagattaggcaaagagctatatcggctatccagcgatacttatctgaataatctttgtgtaatatgacttggaattttgtaatcggctaagacattcggattaatatgatgtgtaagctttgctcaaaaatctcaaaaattttgcactgtattgtgatatatatatatgcccccctagttttacaatgtcaagagcattgataaaaatacgaaacaactaagggcgatataacaatatcggccattgtatatcagcaaaccacgactgattacaatagaaccactaagggcgatataacaatatcggccattgtacatcggcaaaccacaaccgattacaataaaacaactaagggcgatattacaatatcggccatctcaaggcgatgcaaatacatcggctatcatgtatcggcaatactagccgatcatgcgttaacccaaacacttggataatatttcttcaaatatttgccattaagcgctcgcccataaacttctccatcgagtccttgcaacatgtatgctccttgagacacaaccttatgtatttggaacggcccttcctaatttggtgaccacttgccaaatttgctatcccgggttccaatcggcaaaatcaatttccacacaagctcaccttccaaaaaagtcttaggcaccactttcttattataatgccgagcaacacgttccttatccctagtaacttttgcaagtgctcgcaatcgcgactgaaccaaatcctctcgttcatcggtcataagattatagtactcattggctgtcaaatcactttgcaactctgttcttcttgagccgattcgaacttcccatggtaaaacagcttcatgtccataaacaagcttataaggaggaacttggattgatccatgacaagccatccgataagaccacaatgcttcggctaaacgagtatgccattgccgaggataatcagaaatcttccttttaatcaacttgatcaaacttttgttagatgcctcggcttgcccattagcttgtgcataatacggtgaagaattcaacaactttatacccatactatcggcaaactgaacaaacttatcagacacaaagattgaaccttgatcaatcgtaatagtctgaggagtaccaaatcggtagattatatgttcttggacaaactgtattgcatccccagaatcagccttcttcaaaggaatcgcctctacccatttgatgaaataatcagttgccaccaatataaacttatgtcctttactcgatggtggattaatcatgccgatcatatcaattccccatcctctgaatggccatggtttaatgatgggattcatagccgacgccggcgctcgctgaattgctccaaatttctgacaatcttgacaacctttgtaatatctgaaacaatcttctaacatcgtcggccaaaaataccccgcacgccgaagtaaccacttcatcttatgagccgattgatgagtaccacaaattccttcatgaacttcgccgattgcaactttagcctgataagcactcagacacttaagcaatactccatcaatcgttcgataataaagctcatcatccaataaagtatatttcaacgctttatatcttaacttcctataagccgactgggatggattttgtaaatattgatgcacatcatatctccaatcatcggccgtcatggcagcaacttcaatctgaacatccttgatcatcggcttatatcccgatgccccttgagctaaatcatagacctcaatattctgctctcgagatacatgcttcaaagttactagccgaaactccttcatcagtttttggcacttctcattataaactatcaacgtatcattcttacactcatattctcatgccaactgactgattactaacaaagaatcccccatgatttcaacagcatcggcttcaacctccttgagcaattgcaaccctttaagtactgcctcatactcagccttattattagtcgcataaggtttgatagtataagcaaactcaaaacatgccccccgaggcgaaattatcctttgtgtagacgttcgaatcctccacgacgccctcaaaataatagcttgggttctccatcttcaattggctgtatatcagaatcggatacttttaaaaaatctccatcccaaacttttccagataaacaatcaaggccatccatctcccaaagagctaaatcggcacaagcaacattgactgacctgtcggctggtacgatctctatcttgttgccttgccattgaatcaagcattggtgcatggtcgaaggaatacaacaattagcatgaatccaatcccttccaagcaacaagctataagaacccttcccatcgatgacaaagaatgttgtagggatggttttactgccgactgtcaactccacgttcagaacccctttggtttctgatggattgccaccaaagtctttaagcaccatgtttgtcttgatgaggttttcggcgttcctacccaatttcttgaatgtagcataaggcatcaagtttactgcagccccaccatctaccatcatcttaggcatcggcttcccattgacataaccgtttatatacaatggtttaagatgccgattctctgtcccctcaggtttctcgaacactgcttgttctggtgacaaccaacttagccgattcctcttccaccttgtctacatcggcttgatcaatcccaaattcggctggcaatgtaaaaaccatgttaattggtgccactacaacactcttcccttttgccaacctctttgcctcatcggctacaacatcatcggctataggaatctgattcttaacacgcaattcctgtcttggttttgctttcttcagccgatggttaatttcttgttcaacctcctgaaggcgctccctgttcctcaatctttgaacccttctcttctgattcttcatgaaaataccagaaggacaccattgatttgtcctgactacgtcatcctcctggccacgaccttgattcactgggcccaatctttgacgaacagacactctttcctgcctcagccgattactcctattatatgactgacttgagctctcaatgatatcattgcacccaaggtagttttcgatagacggcaacctcatcccttcattccagcagaatctaaagaactcacaaccccaatgaggatcaaaaccatcatcgtgttcttcataatgcttctcctgctgcttctcatacttcctctgatatttgttgattatcttagccgaattcacttgaaaaccctttgcacggacgctatcggctgattggccagctgtatgtaccatattaacaggaaaaggattaccatcgaccttcattggcctcttcgaatcatcaaacttgatttttcctccctcaatatccgtttggatctgctgcctgaagaccttgcagtcattagtcgtatgagacccagaattatgccacttacaatacctctttttgcccaactcttcagccgatggaattgtatgtccagcaggaagttgaatctgtttttctcgaactagcaaatcaaatatcttatcagccttagttatgtcaaagtcatacctctcctcttttcctgagtttttcacccattggtaaggtataacctttttgctcctaacccactcagctgcagctatttcagaatcatcatcctcaccatccgatccatacatataaggataaacatgattaatcttcctagagttcttcctagcttccgcgaacctttgttgatgcaaacctaccttctgtgtaaggtacgacaagctttcggaatcttcagatgagaatttttccttgatcggagcaatcatcccttaaaaagccaaatcggctaactgggcatcagtcaagctcaagctgtaacacttattcctcatttccctgaacctttgaatatactcatgtaccggctcatcatgcttttgcttgattgacatgagatcagacagtttcatctcgtgaatcctactatagaaataactatgaaactgcttttctaaatcggcccaactgttaatcgacccatgtggcagcgaagaaaaccaagtaaaagccaacccagccaatgacaaccggaataacctaaccctcaaagcatctacagccgatgcctcaccacactgagctaaaaatcggctaatgtgctcataagtcgatgtagtgtcttgtcctgaaaactttgagaaatcaggtactttgaaccagttaggtaaaggaactctttcaaaccattcaggatatggttgtcggtacaaatttccagtctcctttggtttaagcccaaattgctccctcattacatcacctatcacatcagcccatggtcgctgctgaggtgttgcttgagattgttgtggtgtgggctcatgtcacgaccggaaataacccaacgggtgttccttacgtgcgtgtattattccttgtcccaggaggcaaggtacaccaaaagttaatacaattcagagtttaacaagcggaagcgtaaatagttaatttattacatgggcagcgaaggcccagcacacacagagacaaacgagaaacagcggaagactaggacgacgaccacaggcgcttgacggcaggcacgagctagacaccaaagccttcatcttctaggggctcctcttctggggttgggaaaaattgagcaagactgagtacaaccaccgtactcaacaagacacacccacaagtgcagaataaatgcaagggagtacaaaggagttatactataaagggttagggtttgcagtaaacagcatttaaaggtacttagttgctcaaagctattttgtaaacacgattctagaactataccatattatttatcatggccgtgaacccacacgaacctgccttaacccaaggcctacgatgattcagaccgaactggcaacccgaccctgggtcccagctcgtcccaagccaacccaggccaaccattccacattttagttgttaagcaggttttaagaattaaaacactaacttgggtacattgctcggcttgcccataaccgagggcgcggctattcgaatagattatactctgatcagaggtgtacatctttacccacaagacacatcttcctcacgtgcaaccacgtgccacataccaccacggtatacagacggaagacgtgacatagtttccaacccatcctagccatagacaagagtaccgacccaatcccacctatggccggaacccccgggacaggcaggtaggactgagcccctagcagcaggacaccagccctgtgccatgacatctcgactaccgggccgcagctcgtgtagccttcatttgccctggagatgtccatcgacccccgacttcttccatctccatccgtgtacttttgtttataaccagactgactcacaaactaagccttacccactagacatgtggaagtacggtagtgctttgcaacagaggcccgaagaccggtccttgtatggccgaggtgctactatcaaaaccatgcaccccgagcccagcctaaaaccattttgggattttgaatagaaggagcggtgtgaagccaattccacaataaccaaaccattccaaagtgtccaggtgatatgaatattcccaaagtctagagttgtaaaaccgcctaatgttacctaattaaattgcgaagcatctacctaaaattatactagtggtactatgagtagagtgtccactagttggggttttgtttattctagggtgaacaaggtaataataacaacaacaataataataaggtcataacaaaggtaaataggcatggctagataaaacagtgataacgcgggaatttaaataaagcggtaatgcaataatttaaatcaacataattttacaaactgggattcaatatgttcaaagatga

SEQ ID NO: 23091 - DNA, 10299 bp, Oryza sativa
gcgtcagcggagggtagggggcgcgcggccggggtccacggggagtggggccccggcgggcaacctcaaggtccacggtggaccgggggcacgcggctcacagtggccggcgccatgggtcgccacgcgtcagccgcacccgcgggcgcggacggctgacggccgggccccacctggcagccgcggggcgcgcccgaaggcggcctcgccggcacggccgacgggaggcggcgcgcccgcgccccgatggtcaccgccggcgaccaccggcgcggcggggtggcgcccgagagagaggagagaagagggaagcgaagcggcggtcctcggctcaccccgggtcgacggcggcgacaaaaacggcgaccgaagcggcgagaggcggcggtgcggttcggatcgacgaggacggcggcgctccgacggtcggcaggcgaaacgaaggggtggacgaggttgacggggacgcggcgaagccgaaggaggtgacgccgagacgggaggagatccggggcgacgacggcggcgaatcggagctcggcggcgacggcggagagagaggacaacggcgcgagctcgaatccgacggggagagaaagtggcgagtggcggaaacggaggagggaggcacggggagcgtttaaatagcgttgggagtgagagagggcggccggaggggaaggaaaccggcgcggcgatctcgggctccattgatgcgccggcgaagttcgcgggagtaaatccgaacgaatccgagggagagagagagggaaaagtgggggaaagagggagggaatcacggggagtgatttccccctctttatggcgcgcggggacggcgggatgcggcggattcggcggcggcggcggcgctagggcacgggcgggcggcgggtgcggcgcgaggtaggggatgacgggtgggccccacccgtcagcgagggtggcgggcgggccctcccgtcagcggcgcgcgcgcgggggaaggccgatgggccgcgggggagaggagagagagggagggagctgggccgagccggcccaagaagggaaggggggaaaagaagactttttagggtttttctttttataaaaccattttaactttgtttatttcttctcaattattatttgtgctctgaaaattccagtaaaatttatttacgcattttaggcttttaggaaatatacaaaaatcctccaagccttatttgacttttaaatttgcacattttaattgttggaggctttcacatggattttaattattctcggcataatttcgaggatgtattttagagtcgttttgggacgcgacaactgacccgcaaatggatgcatacgtctgcgaggtgcgatgcatggaacgccgcttcgacggactcgagctctgtcacatgccccggcgcgacaatgcagtcgctgacgagttgtcacgcatcgcgtcggcatgagccccactccccccggggaccttcgaggaaaggctcgcgcagccatcggcacgggtggaccccccgagggaccccgacgccacggcctccgccccgacccctaacgacccgcggccctcggggcccgagggggtcgaccccaacccccctcgtcaggtcgtttggttgactgacatttgggcgtatctcgataataatactcttcctgaggatcacgcagaagctgagaagctcacgcgtgtctctaagcgatacgtgctcatagaagggaccctctaccggcgtgccgccaacgggatactcttgaagtgtatttctcgggagcaatggggtcgagctcatctctaacgctcatcagggtgagtgtggggcccattcggccttacgtatattggtcagtaaagccttccaacaaggtttttactggccgactgcgttgcaagatgcccaagaatgggtccggcgatgcaaggcgtgccagttccatgccaagcaaacccatcagccggccgaagacttgcaggcatcccgctctcttgcctttcgcggtctgggggctacacatcctaggacccttcaaagcggcccgaggcgtatatcagcacctgtacgtcgccatcgacaagttcaccaagtggcgcaaatcttactgtaacaccctgaaaatttgaccaataaaaacaaaactctaaaaatacgggccttcgaaaacttttaaattaattgcatcatgccgatcttattcgcctattttatttggatttgatttcgaagttcattaatcgtgagtaaagtatagttaattaggaataaaccctagaagtaaattggtaaaataaatataacttaaaataaagactaggtgtggatagaaataaataaaatattatcgcgatcatatttgtatcaattaaatttaaatgcgatggaataagaattaaccctaattaaaaattcaaataaattatataaataaaatatgagtaatattaatcaagggtgaattcattagttgagataacacaaatattgagaaaaattcatacatgcaaaaattagaaattgtggaaccaaatttatataagaaatagactaaaatgagagaaataggaaaaagacactgttcattgcactctaggtgctcgatgtggttctgtagccctgcccctcctccatcgcctgtccctagccgccccgagccgtgccgacgtcaccatcgccgcctgccgtcgcgtcaccgtcatgtgcattgttgctgtggtggcttgttgagtacgattggtactcacccttgcaatatacaaacttaatcagcggtcggagatgaaccttcggaggatccctatgcttactaccaggatggtgatgaagaccatggccctcagtaggtcttagttacggtcgttgcctgtggcaatggcgtgccgctgccttaactccgctgccttacctacttctgtttttggaatgtattccggaccacttggtccgatgatttaagactatgcctgcgggcttatgatgtaataattcgttctagacactcgtgtatgtgcacttggtatttcagctatgaattcgtgtgtaccagactacttgatccagggaaatggtactgtttacacgattgatttctgttataaaaacgggggtccacacttacccaatcggtgcccaaccgtatcattacagataacgacacccagttcaccagtgaacttttcggcgactattgcgacgacatgggcatcaagctgtgctttgcctcgcctacccaccccaagagcaacggccaagtcgagcgagccaacgccgaaatcttcaaaggactcaagaccaagacgtacaacgtcctgaagaagcacggggattcatggctcgaggaactgcccgccgggctgtgggcgaatcggaccactcgaagtcgcgccccgggggaaacaccctttttcctggtgcatggcaccgaggcggtcctaccttcggagctttccctgggtttgccacgcgtcacgctgtacgatgaggccaaccaggatgatctttgccacgacgacctcgactatttagaagagcggagaaggtgcgcggccctgcgagcggtgcgctaccagcaaagcctgtggcgctaccatcacgccacgtccgggcccgatcactgcaagtcggcgatctcgtcttgcgccgcgtacagtcgcgcttggggctgagcaagctctcatcaatgtgggaagggccatacaaagtgatcggcgttccccagctgggctccgttcggctaaccacggaggacggcacggcgttgcctaacccctagaatatcaaacacctccgccgtttctatccatagagtcgcgcgtcttttgctttcttggaactcaggccaagccccacgctaccactgttaaatatgttgtatcttttgtcacgaccagaattaacccaacgggcgttccttacgtgcgtgtattattccttgtcccaggaggcaaggtacaccaaaagttgatacatttcagagtttatcaagcggaagcgtaaatagttaatttattacatgggcggcgaaggcccagcacacacaaagacaaacgggaaacagcagaagactagggcgacgaccacaggcgcttgacggcaggcacgagctagacaccaaagccttcatcttccaggggctcctcttctgggtttgggaaaaattgagcaagactgagtacaaccaccgtactcaacaagacacacccacaagtgcaggataaatgcaagggagtacaagggggttataatataaagggttagggtttgcagcaaacagcattaaaagacacttagttgctcaaagctattttgtaaacacgattccagagctatacaatattattaatcaaggccgtgaacccacatgaaccagccttaacccaaggcctacgatgattcagaccgaactggcgacccgaccatgggtcccagctcgtcccaagccaacccaggccaaccattccatattttaattgttaagcaagttttaagaattaaaacactaacttgggtacattgctcggcttgcccataactgagggcgcggctattcgaatagattatactctgatcagaggtgtacatctgtcacgcccggaatttctatccaaaattccaaacgcttacatgtgtgtgaaccctcgtcgaggaatcagccgaggcacacaataacaaattgataatagagtacaattattactctaattaataagcgaataaaatgtcattacagaggtagatagtttctctcaaacaataaagatctaagcagcggaaaaaaaagataaacggcgcagacggctccactccacaggcagcttgaccaaggctacacctaatcctccacacctcagcctcattgaagaactcctcctctgatgaatgattgcaaggtgagtatatgacatactcagcaagccacgcagcaaatatgcaagtgcacaggataacaaaggatggcatagtagggtttcatttgcaaaagcagcatttagcaaacatttcagaatttaataaaccagttaagtattaaacaatattaatccaacgctatacaacataccctgttgtataggcccaaccattctgaacaaccatcccggttgcgcagttctatctccaaaccatgaatataccatcccaaaccaggagctactcagattattaccaatgatagcatcctctactatggtgagaggtgtgggactaatcacgaaaaacattgttaaacccgcccataaccgcgggcacggctattcgaatagttttactctgatcagaggtgtaccactgtacccacaagacacagcctcaacatcatgtctaccatgcgtcgcgatactggaaagtacccgaatagaggctgtgacaataccctttgtacaacacaactcaccacagtgcaccattcctggatcataatcacccccttataaaacaaggcatggactccccagcgacccccgtgggcttatctccgccacttctcagtctggtgctccgcaatgaatcatgctatacaaaaggtaaagccgttgcccacgctggcttgtggttggcacggttaatgtttcacaatagtagctcgcgaaccggtccttaattgtcatgagcacgactctcaaaaccatgtgctcacaacccaccattaatcatattttaattcccaattaattatcataacacgattaaccatcgtgagctaccattaaatataaccataaataataatgtagtacatatgattcatcccattagtgagctaatgtttctaagcatggctaagcaattatatctaacatctagttgaaccaatatatataaagctcaactagtcaaattataatatcccaaggtatcaaggaatagagtaatcaatgcaaacaggccataacaaaggaataggttcacaccacccggtgacattcgaaaataaatgcacagttgaaataaatagaaaatttaaatataggatcaacatgctcaaaggattgtgtttaggatctgtgtgacttgccttgcaataatcggtcttcaattatcttcttgaatacttccggcgcactcgcgaaccttcgcaacgacggaaacgacaagctaacacgcaaaacaaagaaaaagactaataaaaaccaaataaacagtacataaaaagtaaacaaacatgtagatcataattttaagtgaattatgagacttgaacgcctcattctgacttcaaatgaatttaatatgaattttacaagattaaatctaattaaagcccatttaaaaagaattaaataaatttaattcaatttatggaccattttaatatgtagatctttattttatacaacttttgcaacttgaaccacattaaactgagttcaaatgaattagttatgaatttttaaagattaaatcggattaaaacacttatattgattttaattgaactatgacgcaataatgaattatttttgaaaaggaaaagaaggattattgcgtcagcggctagggtttgcggtggaccgggtgcacggcagcggttcacgcgaacggacggccgagatcgacttgatccaaacggacggccgagatcgatcggtccacgaccggctcacgggagacggggacgatgacgtcagcgacgaagtcacctccggcggcggctcggcggctctacggcacaaacggagggcaccaagacgtagatcacggcgcggcgaactcaccgatgaccaaaacgtcggcggaagaccaacggacggcggcggcgtcgaggaaaaggcggcggagaagatcgggtcgacggcggcgacggtgctccggcggtcttcagcgacggcgaaacggtggacggggacggcggcgacttggcgatcccgacggtggccttcccgagtgacgacgacgaccatagcgacggcggcgcacggctggacgaacggcggcgacggcggcgcaaaagctcagaggctagggcgctacacacgacggcgggcgaaggcgaaagaggcggcgggtagaggagagctcgggggtccttttaaaggggctagcgagcggcgacggaggcccacggcgaccggcggcgagaaggaaaggtcggattggagggagaaaagtcaatccgaatcgaactcaaatccaccggtttccaaagaaaattagccgatgattacaaaagagaaaaggaagaggagatcgaggagattatttcccctctatcgatttcaccggagaaggaaagacgcggccgaatttggaaggagacggcggcggcttgcgctagggtttcgggcggcagcggcgcgaggaggaagacaggcctgacagacgggccccacctgtcagcgagcgaaggcgcgcgcaaactgggccgacttgggccaactggccggggagggagaaaaggaaagagagaggttttgggccggctttcggcccaaagccaaaagaagactttttaaaacctttttcaatttaaattattcatgaaatgcaattccatttattaaaaatacttccttagctcaaataaatcctagaaaaatctaggaattatagaattaagcaaagtatttaacaaaattttatctagcccaattttatattgagatttaacaaattaaaattagatcttctcttctaggcttttaaaatcatttctaataattcctttttaaacaacagtttataatttaaggatttttaaacaagaaaagctcttaacaaatataattagatcattaatgatcaaataattactgaactgttctttgtaccatttaggaattgagctctgaaaaatccgagaaaatttcagagagttgacttaatcatggagaatttaataaaaattaaatccatccatgctttatatttaggaaattttatttcccacatttaacttcacttgtaaattaaagaacacttaatataaattctattattaatttattaaataatttataaaccctgaaacaaaaatcaggatgtgacacctggtcaagctgcttgtggagtggaaccgtctgcgccgtttatcttattttccgctgcttagatctttattgattgagaggaactatctacctctgtaatgacattttattcgcttattaattggagtaataattgtactctattatcaatttgttattgtgtgcctcggctgattcctagacgagggttcacacacatgtaagcatttggaattttggatagaaattccgggcgtgacaggggacgaggggccatcgctagtcaagggggcccctggtcccttctcatagccaggctcgcaacgcgggtcgccctcgtcgcgctcaactataagagcggcactcaccgcgtgggggtcgcggccaagtagagcagcaacggtttccctagccccagggctactaggatgggggggaggtgaggtaagctttcagctgattgagagcttgcttcgcttcctccgtccacacaaacggcccgaggcgtttgaggagtttgaataggggcagcgccctctctcccagcctcgatatgaatcgacttagggcgaccatgcatcccgtgacgcactgcacatccctaagtttgctggggggtgcatcctctctatcgcgcgtattttctctcctcgggagaagactagaaaaccgagtttgcccgccggcacaccaaacacacacttttcggggttcagtttcatgcgcgttgacctaaggctgtcgaaagtctcagccaagtcctgtaataacgtctcctggtggcgcgtctttaccaccaggtcatcgacatacgcctctacattgcgccttatttgattactcaaagtaatgcgagtcatgcgctgaaaagtaggacctgcgttcttaagaccaaaaggcatagttgtataacaaaaggtgcctacaggagtaatgaaagcagttttttcctcatcttccctagccatgcggatctggtgatacccagagtaggcatccaaaaaagacaaaaggtcgcaccccgcagtggagtcgactatctgatctatgcatggtaaagggaagggatccttagggcataccttgttgaggtccatgtagtcgatgcacatccggagcttgccgttggccttcgggacgaccaccgggtttgccagccactctgggtggatgacctctcggatgaagccggcctccaggagccgcgtcacctcctctcggatgaaggcttgccgctccggggcttggcgtcgtacattctgccggatgggtcgcgcatccggccgcacggcgaggcggtgctcaatcacctccctagggaccccgggcatatccgacggcttccacacgaagacatcggagtttgcccgcatgaaggagacgagcgcgctttcctatttggcgtccaaggtaccgccaatcttggcggtcttggacggatcatcgccaaggggaatctccttgactggcacctcgttggccgaggcaaggtgcttcttggaggcgttggacgcagaggcctccgggacctgcggctccatggctgccgccaggttgtcggcgcgatgctccgcgcaggcgagagcgaccttgacatcgccaaagacgatgatggggccgctggggccgggcatcttcatttagaggtaggcgtagtgggtggcggccatgaacttcaccaacgcaagtctgcccaggaccgcgttgtagggcagattgaggtctgccacgtcgaagtcgatccgctcggtgcggaagttggtggagtcgccgaaggtcaccgggagctcaacgtgacctagaggccacgtgtgacccggggttacgccgatgatcggcagtgacggctggagcttcattctcggggccttgagcgcgtcaaaggcagccaaggagatgatgctgaggctggtccccccatcgaccaggacacgcttcatcttgacgttgtggatggtcggggagaccacgaggaccaacttccctccccgagtgagcaccgtcggatggtcgctctggtcgaaggtgagctttacctctgaccagcgcgccttccgtgccgccttatgagtcgggacggcggccagaagctcacgcctcatggccttgaagccacggcgggaggtgtgagcacaagctcccccgtcgagggtggcgatggtcccctgaggtatctggaattccagatcctcactatcatcgccgtcgtcggcaggggccttcttcttggcctcccctcgccggtcattggtgggggtcgcgggtgctttgccctcccgtcaactctgccgcttctcctcatcggctttccgaaaccgctcgtccaagttcttgac

SEQ ID NO: 23092 - DNA, 549 bp, Oryza sativa
acctttggccccaaacccaaagaggcttttttaaacccttttcaatttaaaatatttcctaaatgccattcccattattaaaaaatcttccctaggcccaaaaaattcccaaaaaattttaggattattggaattaaccaaggtgttcaatgaaatttaattggcccccctttagaatgggaattaataaatcaaaattaattttcttttttagggcttgtacaattaattttaaaaattcccctttcgccacaatttatatattttggattttcaagggtgtgccaaacgtaccccccgtaaacagaatctcgtctcgagattcggaagacctgtcgaacaaatacgcatgacctgacttcaattcatcttctcgttccaagtgattcttcttccgagtgatctatccattggactttgcaaaagcggataactcgatgtatggttcttctctcatccatttccaaactacggattggtttctcaacataggtcagatcctcttgcacttctatctgttcatgataagcttccttgatgtactgtacc

SEQ ID NO: 23093 - DNA, 862 bp, Oryza sativa
aatttaaaggatatattttagggtcgttttgggacatgacaaacctaccccccttaaacggaatctcaaccccgagattcagaagaaccggcgaagagatcgggatggactgccttcagctcgtcttcacgctcccaagtagcttcttcctcagcgtggttgctccattggaccttgcaaaaacggattacccggttcctggtcctgcgctccatggtgtccaggattttcactagcctctccacgtaggtcaagtcttcgcgaacttcaatttactctgaatcggcctgctcggatggcactcgaaggcatttcttgagttgcgacacatggaacacatcttgcacgttgcccaaggatgcgggcagctccaactggtaagcgacttctccgcgtcgagcaatgatacggaaaggacccacgaaccgagttgcgagcttcccttttatctgaaacctgtgtacgcctcgcaatggcgtgacccgaaggtacacaaaatcatccactgcgaattccaggttacgacgtcggttgtctgcataactcttctgccgagactgtgccacctttagattatcccgaatggttctgactttagcttcagcttctctcagtatatcggtcccgaacacttggctttccccaacttggtcccacaatagcggtgtccggcatttgcggccatacaacgcgcttcatagggtgccatttgtatgctggcttggtagctgttattgtagagaactcggcataagggagactcttaccccaggtcttcccaaaatctaggacacatgcgtgaagcatatcttcgaggatctggttcagacgctcggtctgtccatctgtctgcgggtgatac

SEQ ID NO: 23094 - DNA, 6069 bp, Oryza sativa
tgggttgcttccaattagtgacggcggtcaccgtttcggggtccacagcaactcctttagcggatatcacgtgccctaagaatttgacttcggacaaccagaactcacacttgctaagcttggcatacaattgatgttcccgcaactttcccaacaccagacggagatgctgctgatggtcttcctctgattgtgagtacatcaggatgtcgtcaataaagaccaccacaaacttatccaagttttccatgaacactttgtccattaagttcatgaagaaggcaggagcattggtcagaccgaacgacatcaccgtgaattcatacagtccataacgcgaggtgaatgcggtcttcggaatatcttcttcacggatacgcaattggtgatatccggaacgaagatcaattttagaaaagacagtggcacctttaagctgatcgaagagatcatcgatccggggaagagggtacttgtttttgatagtaacttcattgagagctctgtagtcaacgcacatccgctttgtcttgtctttcttctccacaaaaatcacgggagcactctagggggaagtgctcggccgtatataccccttttcttttaactcttccaactatttcttgacttcggccagttcatttgctgccatacggtagggtcgcttgtacagaggagtggttcctggagcaagatctatccggaactcaatctctcgcttgggcggcataccgagtagttcttccggaaacacgtctccgaactctctgacgatggggatttctgacagtcctatctgatgaagttctgaactactgacagaggttgggggcgcaaagaaaacaaccggttgttccggccctcggtacagagtgacagtgcgtcttgcgcaatccactactccttggaattgagccaaccatttcatcccaaggatcacatccaagttcttggtgtccagaagaatcaaatctgagggaaaaaggattccctggatttctataggaacggcagggctataatactttgctgtcataacccctccaggggtggtgatgagcagagggttcctaagcctttctacccccaactgatttctccccacgaatggcacagatataaacgagtgggaagctccagagtcgaacaaaatggtagcagggatggaatgaatgaggaacgtacccacgataacgcctggagttgtcagcatatcctcggcagtcacgtggttcacacgaccccgaatgacatccttaccaccgttgttggggcggggaggcgcttggccttgctggcgcctcggctttgggcatttatccgcaaagtgcccgggctcgaagtagttgaagcacagacgctgctgaccatgaacgtctctgcggccttgtccaggctgcacggctggcgtaggaggacggggcgcacgggtcccttgctggctctgctgttgctgcggctgtgggacgcgcaccacgaattgaggtcggagcgcggagcgtggttgctgctgctgctgctacgaggaggatccccctggatagggattggtgtagcggatcctttggttagccccctgttgattgcggaaatttgccaagcgacgcttgtgtgactccagttccttgtgcttggcttccaagcggatgctcttgtccgccaaacgctggaaatccggataatccccggagaccatatgcacggacagctcagggtccattcctgccaagaacttctcctgcttctcctcatcttcacgaacatcctccggggcgtaccgggccaggttgttaaactcatgcaaatactccatcacagagcagttgccttgcttcaactctcggaattcccttttcttaagggtcatgactccggcgggcacatgggtcctccggaaagcggcggtgaagcgggcccaagtaataggctgtccttctggctgcgtagcctagaagtggtcccaccatagagatgcgggcccctgcagttggtgagcggcaaagatgactttctcctcatcgttgcactgcacggtgtctaactttttccccacggcatgcaaccaatccaaagcatccacggggttattggagctagagaaggtaggcggacggatgcggaggaactcggcaagtttagaatgttgcgggggtggtggtggaggtggagcattatgctgtggcggattttggatgtgatggaggaaagcagccatcatgttggcctgctgggcgaggatttgggtgaggatagagttggtgtctggtggtggtggtggaggcgggtgaggaggtggaggtgggctgccatggttgttgtagttgctgccttcggggtgactgccttcaccggtagcagcacttctcctggttgtcaccatctgaaactcccacacagaaccggcaaacagagagagctgactattaaaactaaccacccacgactaccataattcttgaatttatttctgctattaaattggtttattaaggttcaagttgcttaagcaaataaaataaagacaggccccgacacagttataccacacaccggtataaccatgccccacacgactctagcagaaaaacaaacgagaagaacacccgcgcaagcctactaactgctcgtctacttctgcgacgggccagcgcggaaggtgagcagcagtgcatcctccgtgctaccaacgccagaggctccctcatcctgagaaaccaagggcgcgggctcgtcacgaggggtctcgacgaagcaggtccatgccaaggactgacgaacaagctcgggcctggaggtactcttgcgggcggtgatcttcaggctgcggcagacgcggcagcgcttggggcgacagacctctccctaggcgatcttgagctgacacagctgcgcctcccctgcgtctaggtccttcttcagctgcagattctcctgacgtagctccaggatcttcatgttgttctcgaccatcccacggcgcaccatctgatggaagtcgatacgagccgcgtcgtacgcctccaccatgcgcgccaggtgcacgatggtagcgtcatcctccgagctagcatcccggaaggtggcgaagtcgcgggctcctccgcagcgagggtggtagcggtagggcgagtgctgcaactcgtccgggtagcgctggtgaagagtgccgatggcgaggagagcggcgttctggcaagcggcggggaaggaatctccacccgcggtgactgccagcgaagtccgctcgggagagccagtgaggatcactgcagtaacctcccacgcagcgtggggctctgcatcgtcaccctcctgctccggaagcggcctggcctggtagtccactccaggcggataccccaggacaacgcacatgccccgtagctccaaaacgaagccagtcaggtccaaaccacgatggttgatgctgccggccatctacaaacaaaaacaaaagagaatagcaacattttaaagatcagattttgacgataaatgaagcagcgggacagagagagactagaggattttcacaaataagaaaggaattttatttcgaaaatattgctaaggcttgggatctaaagctcgtcctagggtcaagggggctctgataccaacttgtcacgaccagaaataacccaacgggcgttccttacgtgcgtgcattattccttgtcccaggaggcaaggtacaccaaaagttgatacaattcagagtttaataagcggaagcgtaaataattaatttattacatgggcggcgaaagcccaacacacacaaagacaaacgggaaacagcggaagactagggcgatgaccacaggcgcttgacggcaggcacgagctaaacaccaaagccttcatcatccaggggctcctcttctgggtttgggaaaaattgagcaagactgagtacaaccaccgtactcaacaagacacacccataagtgcagaataaatgcaagggagtacaagggggttataatataagggttaggatttgcagtaaacagcattaaaagacacttagttgctcaaagctattttataaatacgatcctagagctataccagattattaataagggccgtgaacccacacgaacctgccttaacccaaggcctacgatgattcagaccgaagtggcaacccgaccctgggtcccagctcgtcccaagccaacccaggccaaccattccacgttttagttgttaagcaggttttaagaattaaaacactaacttgggtacattgctcggcttgcccataaccgagggcgcggctattcgaacagattatactctgatcagaggtgtacatcacgtgtaaccatgtgccacataccaccacggtatacggacggaagacgtgacatagtttccaacccatcctagccatagacaagagtaccgacccaaccccacctacggccggaaccccccggacaggtaggcaggactgagcccctagcagcaggacaccagccctgtgccatgacatctcgactaccgggccgcagctcgtgtagccgtcatttgtcctagagatgtccatcgacccccgacttcgtccatctccatccatgtacttttgtttgtaaccagactgagccacaaactaagcattacccactagacatgtggaagtacggtagtgctttgcaacagaggcccgaagactgatccttatatggccgaggtgctactatcaaaaccagggaccccaagcccagcctaaaaccattttgaggattttgaatagaggggggggtgtgaatccaattccacaataatccaaccattccgtagtgtccaggtgatgagaatattcccatagtctagagttgtaaaaccacctaatgttgcctaattaaccagcgaagcatctacctaaattcatactagtggtaccatgagtagagtgtccactagttgaggttttgtttattctagggtgaacaaggtaataataacaataacaataataaggtcataacaaaggtaaataggcatggctagataaaacagtgataacgcgggaatttaaataaagcgataatgcaataatttaaatcaaaataattttataaactgggattcaatatgttcaaggatgatgtgacttgccttgctcgctttcccaaacgtcggcttcaacctacacgaagagcggatcttccaaagctgcagcgtctacacaaccaacggaaaataaaagggcttttactctaataaactccatataacaagcagtaacaaagcactaaaatgggttcttgacttcttaaggaaaaattagagacttgaatggtccaattccgagttcaaatggccaagttatggccatttgaagtttatatgttctttaaataaatatttgcgattttcttcatttaaaatttaatttaaaaagggtttattgcgtcagccgaggggaggggcgcgcggaccgggtccacgggagtggggcccacgcggcagcctcacggtccacggtggaccgggcgcacgcgggctcgcaccggccggcgccgtgggtcccacgcgtcagccgcacccgcgggcgcgggcggctgatggccgggccccacctggcagccgcggggcgcgcccgaaggcggcctcgccggcacggccgacgggaggcggcgcacccgcgccccgatggtcgccgccggcgaccaacggcgcggcggagcggcccccgagagagaggagggaagggggaagcgaacggagcggtccacggctcaccacgggacgacgagggcggcggaaacgacgagcggagcggaggaagacggcggcgcggctcgggtcgacgaggacggcggcgttccggcggtcggcgggcgaaacggaggagcggacgaggtcggcgaggacgcggcgaagccgaagggggcgatgccgaagcgggaggaggtccggggcgacgacggcggcgaaccggagctcggcggcgacggcggagagaaggtgcgacggcgcgggctcgattccgacggggagagtgagcggcgagaggcggaaacggaggagcggagcacggggaacgattatata

SEQ ID NO: 23095 - DNA, 2763 bp, Oryza sativa
aggtgcggggagggtttaaatagggttggaagggggagagagcagccggcgagatttgcgggggcaaatccacccgtttgaacgcaagagagagagggaaaaatggggggaaagggagaggggatcacggggagtatttccccccactttattgcacgcggggacggcgggatgcggcggatttggcggcggcggcgtcgcttggcgcgggcggagcggcgggagtgggggaggacggggatgatgggtgggccccacccgtcagcgagggtggcgggtgggcccgcccgtcagcggcgcgcgcgcggggagggaggccgaatgggccgcgggggagaggagagagagaggggggagagagatgggccgggccggcccaaggaagggaagggggacttttagggtttttctttttataaaactttttcaactttgtttatttcttaataattattatttgtgctctgaaaattccactaaaatttatttacgcattttaggcttttaggaaatatacaaaaatcctctaagccttgtttgacttttactttgcacattttattttttggaggctttcacacggattttaattattctaggcgtaatttaaaggatatattttagggtcgttttgggcgtgacacaccacaagtggcagcaatgttccgaagagggggaggaagttctcctctgtacccgggacccgccggaaggcgatgagcccagcggtaagcttctctttcgtccttgagtacgtagtcagaacgacttaacctcacatcatattatcttactcaggacttgggtgcgtctccaccgcctcagcgaaagcagaggttggtgacggtcggcgagaagtaagtaaatgtttttgaggtttttttattctcaaagttttgatcacctagcctcatggagaaaaaatcttcgcaggatggcactggtgaaagcggcgcacagtggggctgatgctgcttctagtgcgccccctgtggcgacctcgacggaagtcatggccagtactaaggaccaggaggcggcgccatgtagtcctatcgctcgcctcgtgcccgtccggcctctgtccgccgacaccctcacctgggggcagctccaggctaagatggagtgcatccttcaagcgggcgcccgcggcgtgggccgcgagatcgaggaggccagtgcagcggcgtcgtcggcaaatcattgtgccgatcagctggcatgtgatctggcggagtcccgcgaggacctccaaaagatgaaggagctggtagctggcaacgagacgtagcggcgtggactcgagcaccgtatgtcggagctcgagggccatctgacagccatccgaggttcgctgcggacatcgttcaccggcgtgcaccaactcgccggggagttcggtgtcacaacttcgatcccagcgcatcccgacgagtggttgctgacatcgtcgctcacggaactggctaaggcgatggaggagatcccctccagccacacggctaggcttggtgaggagacgtctaacggtatttacactggggcgtgccatgtccttgcgtttatgaggctagcgcatcgcgacttagaccttaaagaggctttggatcggggggccgccgatgacgcgcgtaaggacacgatggaggaagtcagtgacttgggggagttcgtcctccccctttttcaagagtaggatttttattttcctctgtactcctttatctacatgttgtaaaactttctgtgggttcgaactgcttttatttaaacagttgtttccctgtttccttagcatgtgatcccgagtacctttgtcattgtagatatgttgaagtcgaggatgtccagcagtgcgggcagcccgatacgtcagtagtcattccggcgctcacgcttgagcctcacgtgccggaggtggaaatcgatcaaagcccgtccgtggagacgaacatggtgatgacgtccttaggtttgtgtcttgatttccttcgctcctcgtgttcggattgacttaattagctgtgttctcgaaagagaagagtagcttgacttaatcttttctgtgttgggcaaatttcaagaacgtgttggcagaccgagatcgtcgaatccagtattggaagaccaaactcgaggtggccgaactcgaaaggaccatcgtggaggcgaagaaggaccaggccatggaaactctccgaggtcgcgaggtgtggttcaactcgtacctcaagggttgctgcacggccatggcggaagtttgcagggagctccgagttccccgcggagatcccatggagtccgctgctggttatatctcgtggatgaagggggcctacgcacagctctaagggattggcaagcgcatcgacgaggccctgaagcaggagtgtcgtcgagcgagccgctacgccgggggacatgtgctggcttgcatccaagataaccgctcgcagttgcacctcgagttccttcgtgaagggttctctcgttctcggaggacatccgtggagattgacggtcttgcgcagttgatggcgtcgcttgccgagaaggttttctgctccatgtattggcgttggccgtcctagtagcttttgtatcctgtagaaaaacatctcaaggaagcatgtaatatactaagttttcttattttgggtatgttgtgtatgagtgttttctcgttctgcgactttgattagtcatttgagccatacactctccctatcccccagccttgtctgatgaactactgtacca

SEQ ID NO: 23096 - DNA, 5315 bp, Oryza sativa
cggaggacataatctccgatcgaaagtgtacgtgctctgatgcgcttctcgtgatattggagaagggcctactagtagctgcctgctctgacggcaactctttctcgatgttcctcgagtagattcacatcgtcacttcgctgctcctcctgctcctcgtcggagtacttctgcactcgtgtgctctgatgtcgtagctccgtggggagcatagcctctgagccgtacacgaggaagaagggtgtctcctcattggattagttaattcagtcatttgaaattaaattataaagataatcatttatgattcagctgacagaagcttgatattagctcaaatctagatgcatacagatttggcataatactgggaatcttgacagtatttaattaaatctagactagaccactggtattaagaatgctttgtattatttacaaggcaactttaagtaacatgcttatatttctaaaagtctatttggtctctaaagtttagagatatttggacacacttattttgtgagatgtgtggatatttataaagattattaagctaatttagattaagctatgtccacacataggggagcaataaccatggaaaaggtccaaaataatctcttattgcatagtcgacgatgcagttggattttgtagcatgttatgattcagtcatatgtttaagaaaatttccctgaactaagagtggtaaatagcgctcataaaccactcaaaattatactatgctataagttgtgcactaattaaacacagttttctattctagtaacaacatgtgttttcacatatggttgtgaaagatatgtcccagggtctaattattaagctgagcatttgctcatggctccatactctaaaggctagtaaaattaagtttaactaagatatgttctagctagcacatgtgtaaattagagccttattaagatcctggatgaggggaacttaattttcaatcaatacccactaagttaagcttgagtttatttgcgtaccatagtgttgtctcagtgacgcttgtgacacattgtcttggggaggtattttatttagtaaactcgtcagttagtctcaaaatcaaggggagaatgttggatgattttcttggctaatgccggttagctaggaagaataaaatcccactggttttcctatcctaacaagaaaccaaagaagagaaatctgttttgtgtgatcggtacaaaatagattcgaatttagcttgagaaaaaaccctgagccccaccgatgtcgctatataaagaaagagaaggagggaggcaaattaacaacctaactctatctaaccctaaaccctaagtcaatcgtccgatcgattaggcactggaaggggttcgtgaggcatctctagaagaagaagaaagcagaagaacaatggcttcatttttaggtcagtaaatcaattaatttccgcataagtagaaggtgatcatgtctaggctaagatttaaccaattaagtgttttaaactccaacacatttatcataaatgacatatttgcaatggcatggatcgaattaacccaaaaaagcattccaagttatttggctttggtgtatgtcaaaatatataactttaagtagaacaaaccaaacaagcaacccatcgttttgctcaggcttatgcttataagccaaattctaaattttaaagcttaattttagagttgattttgtgcccttttcatcatagtttatatatttatttttaaattgctaataacatgtacataaaaatttcacctacaaattaattttttagttaataatatgtggtacggataataagcataaaatgatggggccgaaaatcccagccgactcttaaattttttgtttggcaatgatcaattaatgccacaccaaaataattggcagtgggccggggccgaggccgggccaggccctagttctttcaccgtggaacggttctctagccagctggcaaggactccatgaccaagagtccaggagcaaagcaacgagcacgtcatggagtagactaaactcgtggcgtcgacaggtatccatggtggtggtggcagctggctggggctggcatccatggcaaagacagcggaacctccatgagccatggcaaggtaggtggataggtctgctcccgctcccacccttctgggccatacttgtgctggcccagcacgaacagacccatcaaaaagcaagcaacagcttcgactcaacaagcggcgaccatgaccctagaaggcatcgaccttgaagtgcaagccgaagccgagatggggacgatgcgtcagaacatgaacaagttacaagacatgcttcgccaaatgcaactgcagcatcaagcctatgaagcggcaaaacaagtcaagccagccccatcggccccccacccgacttcgacagcgatggtcaccacccaaggtttcggccatgctgcacaaccccatgctccgccggcttcggccatgtacggacaagtctatcaagctccgctgtacgttgccaaagccgctccgaccgttacagtgcaaccggccccttacaccttcacgatgcccgttcagccggcagtgacacaagtacaaccggcgaagcatgtcgaagcacagcacgccgccatagaagcatctttgaccttacaagctcagttccaagctttccttcaacagctcaatcaaccccacacaatttcgaaaccaaccccatcggcgaatgccgttggaagcaagtcaaggtgccccggtctggcagccgtcaattcggtgcaatgcaccaagcgaatcagtcaagccagggggctccgacctggcaaccgataagtcaattcggcgcggcaatcaatcaaccaagtcaagggacaatagcctggtagcaagcactgagcttcgaacagaacaccatgacccaagcatcaacaactgatgtttatgggataatcaccggtttcggctccacacagcaagcgaaccagtcgaatcagggcgtggcctggatccaagcaccacagttcgacctaggcatggtgacacaggtagtttcagccaacatgcaaggagcactgttcagaaccggaccctagccgaaagcgatggcccaaccacgggtgcaggcgatgacttcgccattcgccatcccataaccgagcttgaactcatctttccaaggtgcaacgatgagaggcgggggcgaaaagaggccaccgttaagttgggtgctcaagaatcatcccatcccaccccaattcaagtacccacccgttgcaatatactcgcgtgaatcagacccaagtgagttcttgtcaatctacgagtccgcaatcgaagtggctcacggcaatgacaataccaaggcgaaggtaatacatgttgcgcttgacgggatcgcccgctcttggtatttcaatttgctatctaatattatatactcatgggagcaactctgtgaagtctttgttcttaacttctgaggcacctatgaggagccgaaaacgcagcaagacctcttcggcatttgctagaagacggagaaacaacaaggagtacattcgacacttctcgcaagcacgctgccaagtgcaagacatcacagaggcgtccgtcatcaatgctgcttcggcagggctccttccaagcgacctcacaagaagaatagcaaggaaagagccccagaccatcgagcgcttgtttcgcatcatcgacggccatgcacgtggcgaagaggacacaaagcgaaggctggagatacaagccgactatgacaaggccgccgcttccgctgcagctgcgcaagcggtgatgcaagcagctgaagccatgccgctggcgaatcgccaagtgcagccgacgaagaaggtgctgcccccaagacccagccaagctcccatgacgtgtaaaaagaccagagccgaacgtggaaaggttgtgagtggcagtcgaagaggtgtagaccctccacaaggtgcttgacacacaccaggacaccaatcaccagcaaccctttcgcaagaaggccaagaaggatctctactgcatgttccacgggcgctctttgcactccaccgagcaatgccgaaacattcggcagcaaggcaaccaacaggagccaagaccacagcaagtgaaggccgaagaggtgccctgtgaacctgttcaggacataatccctcaggccgaacaacagcaagacatcccgcaaagtgttatccaagtgataacaagagcagatccaccctcacagctgtgaagctgcaaagaaaaacgcagcttcgggcggtgcacaacagagaaacgccgagggggtcttgttcctacaccaagacccgctgatcatttcggcagagatagctagatttaaagtacgtcgaatccttgtggatggcggcagttcggcatatgtcatcttcgccgaagcatacactaggatggggttcctgaccttggctctctctcaggcgctcactttgcttcacggctttgggggcgaagcggtgcaagtcctaggccaagttcacttagctccggcgttcggcgcgggtcccaacagacacgagcagatgattctcttcggtgtcattgatatttcgtacaactacaacgccatcttcggcaccgccacgttgaacaagtttgaagctatcgcgcaccacaactacctcaagctgaagatgcctggtccggccggggtaatcgtagtcaaggggctgcagtctttggccgtgctagggagcgaaacaacagtgataagtagagaagtagacaatgtacaagctgaagatggtgagcgagcaagaatcgtgccgaagccgtccccacatggcaaggtgatcaaggtccaagttgacgaggctgaaccaacaaaggtggtttccctaggcggcgatataagtgaagaagaaacgaataacatcttggccgtgctcaagaaaaacatcaacatcttcgtctggggatcaaacgaggttgtgggcgtttggcccgacctcatcatacaccatctagtagtaaagctatatgcaagccaaagaagtagaagctacgcaaaatgtcgatagaccgccaacaggcagtgaagacagaagtctaaaagctgctcaaggctggtgtgattcgggagatcaaccacccggagtggttggcgaacccagtgttagtcaagaagtccaatggcaagtggcggatgtgtgttgatttcacggatctgaacaaggcttgttcgaaagatgacttcccactcccaaggattgatcaattggttgattcgaccgtgggctgtgtacttatgag

SEQ ID NO: 23097 - DNA, 661 bp, Oryza sativa
ccacctccccaacagtcaaaactgggtgagttcctcggcatcggcccacgtacgttgtccagctccaacaaccccggggatgggttggtgtggtggcatgcggtggggaaaaagctagacgctgtgcagtgcagcgatgaggagaaagtggtcttcgcggcccaccagctgcaggggccggcatctctatggtgggaccatttgcaggctacgcagccagagaggcagcctattacttgggccggtttcaccgccgatttcgggagggacccatgtgcccgccggagtggtggcccttaagaaaagagaattcggagagttgaagcaaggcaaccgctcggtgatggagtatttgcatgagttcaacaaccggggcccgttacgccccggaggatgtgggggaagatgaggagaaggcaagagaagttcttggcaggaatggaccctgagctgtcggtccggtctagtctccggggactatcgggatttccaaggtctggtggacaagagcatccgcttggaagccaagcacaaggactggagtggcacaagggccgcttggcgaatttccgcaatcaacagggtgctaaccaaagggtccggtacaccaatccctatccagggggatcctcctggcagcagcaacaacagcagcagcaac

SEQ ID NO: 23098 - DNA, 2213 bp, Oryza sativa
ctgttgtcagagaatatgaaattgcagaagattcttgcaattttcctgttaagtgcatttctgcatgatgtctgcatgacctacatgataggagcacaaagcttttacatctttggtaaggctttcacttacatggattaaaagaatgttaggtgctagcgaaatactagtggagtaattcacagcttctctgatgtaattttgtcggagctaaaaccctgcaagctatgataatcaaactagactactgatgttggatagaactgcatattgtcaacaactccaccgtccagatatcagccatgcatgcagtcaacgaccgccctcactacaaaaatttctcttctgttaccatcaccaacatgtataaatgattaaatgtactccgaacaaatgaaatctttcacctttgctcaactgcacttccattgggggaggaaatgtaggaagaataattttcaatggttacaggataaaagaaaccaatgtatcaagtcctaatcatcgtctgtccttgcctaatgacgtctttgccaccgatttagcactatcattttgctgtacctgacgcgaacttcgtatatctaatattatatttcatcgacttcaaaatttagagttcccatttgctcctctaccgatcggtgatccgaactatctagaaatgtagaaagtgcagtttgaagacatccagtataacctcactgtatctagcgaagatattctgagttgagaatgcttctacctgaccaactgttgaaaaatgcgagctttcaacaagagggcaataattatcagccaaatcacacagcagactttccctagttactcgtatttgtcatgcatatggaagtattccctccgtttttaaatatttgatgccgttgactttttaaaatatatttgaccatttcctatcatttaattcattgttatatatatatatatatagacacacacatacatatatatatacatatacatatatatatatatatatatacatatatatatatacacatatacatatatatatatatacatatatatatatatacatgtatatacatatatattacatattccacaaaagttcttgaataagacgaacgatcaaatatgtgctaaaaagtcaatggtgtcaaatatttagaaacggagggagttgaactagtttcaacagtcagacgaaaaacaaattgtgaaccattttcctgcacaagctaccttttccttgaattgagaggaagagttttacgcaacttgtcaacagtggcttttcacggtggaacctataaaattcaaaattttctaggcatgacgttatattttgtaaaaggaacaaaagcaccgggcagactttttgagtgtacactggcaagaaaaaagaacttcacttcgtttcgtcagaatcataagaaacaaaggcagcaccgcagcacatcaaacatttcctgccattcaaatgcacaacatatgatccatattattactgctagctaacatccagagtcttagtattctcatagccacacattagtcctactcctacttaaatttcataatagcaacaaaacatttggacaaagcaaagtgcggttgggcagaggctagtatcaatcatagaacaagctagcgtctaattaaaatgtttttggtgatcatccgcaccgcccgttctattctaaaccacaattgaagctgacgaattaagttgccagcacgacgccatgtgtataaaaggggcctaagctgaacgagcttcgccacatcagtaatcgccaagctctctttcaagcgtagagacctctccacacttatcagagtaataaggaaaaaaatatagattaaaaatggtgaagctcgcattcggaagcttgggtgactccttcagcgccacgtccgtgaaggcctacgtggcggagttcatcgccaccctcctcttcgtcttcgctggcgtcggatccgccattgcctatggtgagctcaacgcattttccggtttgatatgtacagtagtatgtttcatttctgacctaccgacggcttggtttgtgtagggcaattgaccaatggtggcgccctcgacccggccggccttgtggcgatcgcgatcgcccatgcactcgccctgttcgtgggcgtttccgtcgccgccaacatctccggcggccaccttaacccggccgtgacgttcggcctcgccgtcggcg

SEQ ID NO: 23099 - DNA, 1802 bp, Oryza sativa
ggctcgtgtacggcgacgtgttcatcggctcataccagcccgttgccgaccaggactacgcttaaaagtggatgaaccgaattaattgaagtatccgtgtcagtttgcatgcatcgtacgtttgcttgatttgatattcgtcgtgtgtgatacgttcacaggctttgtattttccggtttaccttctttttgtcaaacacggtacatgtaaaaggtcactttctgcgattgttgtctggaaggggaaatcaaaattgtaaaatttcatcgacacaattgataagatcaatttgcattagatttggtttgtaccaggaaatttggaagccatgtcccttttctggctaagataatctatctatctatctatctatctattatatctatctatctatctatctatctatctattatatctatctatctatctatctatctatctatctatctatctatctatctatctatctattatattattaaaacagctttgaaaggagacatcacgttcgctgtgggggttagaaatttccacattaatcggagaaaaagaaaaaaaaagagtccaagtagaagtacaatttaaaaatagctgaaattcggaattaaaaataaacgttcgctgtgggggttagaaattcccacattaatcggagaaaaagaaaaaaaaagagtccaagtagaagtacaatttaaaaatagctgaaattcggaattataaaaataaacaatattgaaagaagtttccatataagaacccaatacgagattaatcaaaattcgaaataaaaataaaataaaaatccaaaattagaaaaggaaaggagagtccaagtagaaatacaatttaaaaatagctgaaattcggaattaaaaataaggaatattgaaataaatttccatataagaacccaatacaagattaataaaaaattgaaataaaaataaaataaaatccaaaattagaaaaggaaatgagagtgcaagtaggaatacaatttaaaaatagctgaaatttgaaattaaaaataaggaatattaaaagaagagtccatataagaacccaatacgagattaattaaaattcggaataaaaataaataaatccgaaattggcaaaagaaaataaaaaataagagttcaagtaggaatacaattctaaattagctgaaattcagaagtaaaaataagcaatattgaaagaagaatccatataagaacccaatacgagattaattaaaatttagaataaaaataaaataatatctaaactagaaaaactaaaagagagttcaaacagaaatacaattttgaaacaactgaaattgaaaataaaaaataaaaacattataataacacaatacaatattaactaatttttttaaaaaatctgaaattagaaaaagaaaattaagatttcaattaggaatacaatttataaataactaaattttttgataaaaataaatattattgaaagaaaagaccatctaaaacacatgacgagataaattaagtaacatgcctataaaggagtagagtggtggtggttgatacgagatataaaaattgttaataaatcaccaaaatagaatcctaatgacaattaaaaggagggacgtcaggcaggccgtgaagcaaacgtggaaaacggttgccgggacttctataaagtaaaaaaaaaacctcattgataatcatattcaatttttaaaatcttaatgacaataaaaagtagaagcagcgagcggggtgtataagagtataattgcagagccgccgatgattgacgggacttctag

SEQ ID NO: 23100 - DNA, 3611 bp, Oryza sativa
ttcgtcatcatcgtcgcgtgttgcacagccagccatcgtcgtcgacgacgcggaccaagagtcctgcgcatcaggtagcaaggacgaggagaggaacaggttcttggtgccgcagccaatctcgatggcagcccccatgatggctcagatgacagtgatcgctccgcaagtggtgccacagcacatctcgaccgtgccacgtggcatgttcgagtgcaaggcatgcaagaaggtgtttacatcgcaccaggctcttggcgggcaccgtgccagccacaagaaggtgaaaggatgcttcgccgcgaagctcgagagcagccgcaacgagactagtcagactcagactcagcagcaacacgtctcagccgctcctcatgacaataccagggccaccacctctcatgtcatcaccagcgatatcagcatggatgcaaacacgatcggtgccagtgctgatgctgacggcaaggcagcggcaagcggcgttggcgcaggtgaaattgtcctcgccggagcttcgtcgacggatatggccatgatgatgtcggtcgaggacttcgcgccgacaccgttggcgccatccgccgtctcaccgttcaagaagaaggggaaggtgcacgagtgctccatctgccaccgggtgttcacgtcggggcaagcgctcggcggccacaagcgatgccactggctgacgtcgggcgcaacggacccgctcacgaagctccagcccgtcgcccaagaccacgccatgatggccgccatgtgccaccagctcacgctcgggcgcccaatattcgaccctaccgaccagcggatactagaccttaacgtgccgacgaacccactggcagaagcggtcgcggccaggcagcagcagcagcagcaggtcgccgctctcaacgacggcgcactctgcctcaacgcggcggcgtcggtgtacctgcagtcctggacagggcacagcaacgggagccacgtgaacaagaccaccgcgacgagcagccgcatcaacgacgcggccggcggcgtgaccacggaggacgatgaagcggacagcacgagcgccaagagagccaagatcggcgacctcaaggacatgaaagtggcaggggagtcgttgccctggctgcaggttggcatcggaatttcatcagagagcaaagaaaagaacactcaagagtgacctggtcatgacaaggaggtcatgccgactaatgaactaagaaattaattaattaattaattagtgctaatctaatccatatatatatatacatattgtaggtgtacgtactatatcaatgctttatgtgatcgggatatatgtatgtgtatatacatccaatgtaagtatttacaagtagggtcaattcatgtgttcctaaaggtttgaggcaacatctagggacgtattgcttgggggactgtaaattaataggctagcaagcttgattctaaaaggtttccttactgtacgattctttgaggagccttgctttttatttttatttttttccttttattttttctattttgtaactaaccgattatttaatttgctgcttccaaaatgtatatatgcaagttgattttgtccttgtgttcactgcaattagacaagctatatgtgtgcctatatatgtttttttcttgcatttctacactatatattactctaaatatacgacgttcttaacttttaaacataatatttagctatacgttttatttaaatttattgtaaacataaaaaaatcacgccagatataaaggatctttaataatgcaaattagtaaagataaaaaaataatgtttaaagtaaactgaatgataaaataagttaaagcaaaataaatgaaacttacttcatagctaattttatgcagatatgcaaatgtataagccattcttaacaaatcaaatcacaataaaataaataatacttaacaaatttcatgtcaaaaagatatattcaaaaatggaggtggtactattctgcgggaggtgaggaacgtcaatttttttattcatatcgccacggtggagaagcttgctgatgttcgttaccagtccagttcgatggtgcatgtaaataggtcgggcaggcgcccgatacttataatatgtatataaagtgtatatatacgtatagacaacgtatatgtataatataaattttatgtatatgtattttttatgtataaaaatatatattcgtataaaaactttgtatatgtatatgtatacttgtattggtataatacaaagtttatatacatatgtattatatcaatataaagtttatgtatgtatatataaataattatatgtataaaaaatattggcgtataaaaatatacacgtatacaaagtttatatacgtacgaattaaaaaaaccgaaaaagactgccacccctctctccgtgcaacacatggctgcgacgcgcgggggaggagcatgcctaattagaattggaactagctaataatctgtcgacagtttttaaggctcaaaactttcaaatttttaaccataggatttgtcatcaacagttgaaatgggtactgttaacagtaaaatttggtaatcccaaagttaccatcggtttagagtcagtatcggcttcaaagttcgagaatcagccgatgggagtcaagtcgccacgatgtcgtgttcttggtggagttggatcaatcaaaggaagcttatctagaagagttcgagttcaagaaagatgcgacatgacagttatctattaattaggcatagtttattagtttccttttatctttaggaaagtgtgtttagtgtccgataaggactttatcttttcctttttagtttctttcttgtccgacaaggactagtatctccctatgggtataaatatgtacacccggggtcattgtaatctatcaatctatcgatcaataatactctcggcgcatcgccaccctcttccctaaggtttttacttatcttccggcggaactttggcacctgacgcagggctgcatcggctttcgatctccagcgaaggggtaagtcctacgttctgtcgggccctggtgaatctgtcggctacgttggtattgttcaaggctgcatcgattcgatctcttggatcgctctggtttggttgatatatttgtctacctgatatctcaattctatctctaattgcattgtgtttagagacgcatcggtttagttgggactgtctcggttaggtatgatctcctgtcttagccgatatatctctacaatcataatgctgttctaaatagatttgttatatctatcacattagatagatctatcggctcatcgagtattagattatcatatacaatctcgtgctgcatcggttaggttcgatctactagattgttgttgataatataagtcttgttaagtcgataggttcatgctaatgttttatcggggtactagccgataagttatctggacgttgcatcggcttgtagggattgcatatacatataagttggattagccgatggcaacaaaggtttcactatttaatctaatcttgtggatcttatgacatcggacctccagctgatgtgtgctttaaccttcggatc

SEQ ID NO: 23101 - DNA, 926 bp, Oryza sativa
cgctatcggctggtatcggtatcggctattatcagctatcggctggaactactccatcggcttgtcagccgatcggctgtttagatctactatttgcatatcttgtcagttgcaggagcaaactgactggcacgcccgcatctcatcaatctttggtcctgcacaggagctaagcagatctcctaggccggtgtgttcgatttttttcgtcaacacagattggcacgcctagtgggaccacgaattttatatccacatgtctgaagaagaagtcaatgccaagatcatggtcacggtggagaatttaatggaggaacaacaatattagctcggggggcaagtgcatcagtttcagcatggtggagcacatcagtatcagcatggttgatttttcattacattttaacactgttgttgtcttacttaacttggggaatttctgcaatttgcaagtgtgttaccttgcaaactatacctttttcttctatttgaactgtttcatccaagttcattgacgtgatgatcgattgtaattcataaacagcgtgggtctactcagctgtatccaacataattcgttcaccaagaagcaatcacccatagctactttattattatttaaatattcttatgttggttactgaatccttttttattaaggatcctgccaaacgtgccattttttactttattcatgtatcccgcaacaatgcgcggggtaccatctagtatacatattgtaggtgtacttgctttatgtgatcgggatatatgtttgtgtatatgcatccaatgtaagtatttatagtagttttacaagtagggtcattcatgtgttcctaaaggtttgaggcaacatctaggaacatattattgtaaaaagccagatgtaaaggatctttaataatataaattagtaaagataa

SEQ ID NO: 23102 - DNA, 3171 bp, Oryza sativa
ggtttaagagttgttaattgtttcgcattgttcgatgttagtatgtatggttagcacatgttagtatgtggaactagttcagtatttataaatgatgtgcaactggttcattatttctaacaaatgtgcatcttgttaaatactcttaataaatgtgcaactggttaaataattttaattgccttgattatttgtggaacaggcggaatttgttgagcacgttcacgtggagtccgacaccctgctgcaaagactagaggcgagacctccaggtctgacgacgtggcgagtgtccttcgcaacttccgtgcacgtgctgccgcactactacgtcgtgtctcctgtcggagcgcggcagatgtggtgcagacgtcgggccgacggccatcaccaccactaccccgacgttccagcgtggatcggagtggtccatcctcttcacgtcgcgggtacgaagcggcccacacatctcacagtcgtccttcctttcagcacaccccagcaccggagtacaccagggggtcagccggatcaggggtacccacgtcgagcacggcaccaccacgtccgcaggtattccaaactccgccttatgttcacccctcgcagggagcatctgggtcggcacacttcccttacatgccaacgggggacaacgtgttgaacacaccagcatggggacttcatatcactccgcgtgcgccagagcagggccacacacagcacacatgtaagtcattttaaacaataacacgctttagtttctaattatatgtatcgttactaactacgccatattttttggtttctccctcttgtacaaacagacgatgagtacggttcggcgtcgacgcatcacggagtgcctgcttactcccctcgcacagcattcattgaggacttcttttccactgatcctccccagggggaagtagggatggattactggcacgcagcacctcaggtcacacagccgacgcaggagacggaggccggtcaggggccagacgtgacaccacagcaggcagctagagataggcacccccctgataatttgacatatcccactgagcagattaggcgtagtaagaagggaggacctagcaagcgtgcgaagggcactgatcgtccttgacttatctatttgtattaaacttttagtcatttatgttctgtccgtactatttgagaaacactttacgattaacttagtactatcagtactatttcataaacttcttcggataattactcagtagcatacccttcgaatgaatcatgacaaattatcattcaaatatacaaataatgaaactaaataattcaaatattttaaccaacaaataaatactacaatttctgaccaaacattatcaaaccctaaatcacatacatataacattacaaaaatattttcctttcttacacactaaaataaattacatattattaaaaaaataacttattacaaataaatggagaacgcgaccctgtcgaactgcggcagttcgacggacatcctgtcgaactgcggcagttcgacagcccagcctgtcgaacgggggctgttcgacagccctgcctgtcgaacgggggctgttcgacaggtcctgtcgaacggcagccttccgatctcgtcgccagtcgcgctctggccgttcgataggcgccctatcgaactgcatccgttcgacagggacctattttcgcgattttccccggttgaccactacttttgcgattttccataaaaataatattaattctcaaaaaaattctctaactcacagcatgcactccctctgtatattcgttgtggcatgtacttatattttgggatgacatgctagattggccatattcgtcagtttccctgaattcttgattgccgttgataatatcctctaggaagcatattactctactgattctgagttttaagcaagatcaagtagtcctaattattcccataatcttgcagctgcttgacatcttagaatgatactatctgttgtttctcgtgctgggcataaatcaccgtggggattctcatcccattttttccttgccatattggccttagcattcggtctctgaaaaccaatagaggaatatacaacaagggcaagctctccctccaaactatgaagtgatgagtagaataactgatgctaagaagctccaatggattcacgaactatcacaaggcagttgactcaagctaaccagaataccaatgcaaaatccaaacaaaattgaagtcacaaacttgaacatttgaacgcatcaacacatatatgcacttcatcctacttgtttcacccagaaatcaagcgagaaggaactactaaattccgaacgagggtgtaccttcttttcgtcggagcgcgggggaggcacggaccgattggtggctgccaccgcagccggcgaggcggcgccggtgcaacagagctggagcgctgccgctccgggtcaggatcatcagtgccctccatgatacgaaccctaaccacccctcccaatgcgcccaaaccaccgtaccaatccctcctccggcgaggcgaaggggaaaggcaccaacccccagcctaatccccggattgcgatttgaggtagcaagccgaggaggtgggagaatttgggggcatttaactatttgcggtggttttggctgcgcctgcgagaggtgggaaaaaaaagttggcatggatccaattaacccttgttatagccaacaccaaaaggaaaagcacgtgctcgtgtcaaaccgcagccgctctcgcgcaccgcaccagctcgggagcccggtcatcacctactccgcccgccgccaccatctacaagtacccaaacactgtgccgcacgtccgacgccgcagtcttgtagtctcgtgcaccaatcgtcgcgccgcggcgacgttaggcatttcgtcgaacacctagagcgcagccatgatgctcaccaagccccacccttcgtccaacctcctcctccccaccaccacagcgctcccaaatcctagcccaaaccctagccgcgtcacgcccctggcttccggccgtggccgcccggccaccaccgcgtgtgcgcctcccccgtcgcgcccgcgcagcccgcgtcggtggcccagcccacggcaccggcgctgagccgacgtggacgttgat

SEQ ID NO: 23103 - DNA, 2011 bp, Oryza sativa
ccaattcaccagggagacgagagtacgagacgcagtctgcatgcatacataatttcgacgacctgcagatcgattaaaggcggccaatgcaagcttggcgtttgtccgcgccggcactgtttgcgttagctgctatagctaggctccgcgtgcggccgtgcagagtatggggtggcatactgctacagtacatgctacgcgctgtgccgcggatcgcgacggcggcatgacgacgcgcgctgtatcaacctcgataaatcgtcgcgattggtaggagagggatcggagggagccaatgcaagcttgccggctgtgcgcgatgatggggtgaaaacagatacggaaattcccgatcgaccgaacgacgttttcgtaatatgggtactgtttctgaccgtactttttcttaatttttaaaatttggtttttcataatttcttttacatcgtattaatatcgatactgagtagtttaaatgataaatatgttccattaccgatcgagtattgtttccgactgttttcagcccgcgcgtgcacccgagccggcggctgttgcggggacggtggcgtttaatgtggatgccacggggacacggggtgcggtgcgccggtgcggtggctggtggtagatcgagctatagcgttagccggaataggagtggagttcgcgggcccacggatcgatcaatcggtgccgccgcgacagcgtcggcagccggcaggccggccggccggcctcgcgtacttcctcctcgtgcgtatggagtcaaatgctccaggtgtttcacagttgcagcgaatacggagcacaactagcttggttcggttcctgcgcgagggtaatttcgcggtcagatcacgccgcgcacgcctacctacctgcacacctacctaccttgcaccattctactcctgcctgtttcccatcaaggccgtgtttagatcaccctcaacttccaattttccatcacataacatctaaaacttttctacacacataaacttttaatttttttccaaactacaacttttatcaaacttttaacttttttcaggaaccaaacacaatccaagtgcaaagttagtttttttttagggggggggggggctgaaaattccggaagctctgaaaatgggagcatctcaggtacaactgaaaaaaagaatcacgaatctttttcaaggaccaagtaagagcacgagctcgaataaggcggaacacagtgaacgcctctagctgcgatgcatggattgcatgacttcatcaggggtcaaagcaggaatgatgctaccgcgacagttcaaagtgcgggcaaggcttttcgtgacacgacccttctctggccgactggccgtcgaaacccaaccacgacacgcaccacgggagaaacaacagaggaagcttacaaacaaaagtgccatcttatcttggcgaggcgtggcagtagagcgtatcagggctccttcagtccagcaatcaatgtagggcatcatggacataaactcgataacaccaagcgtaccagtacgagaaaaaggaacagggagaaaggttttgatgccctcagcaacctctaccaacctgtctccacaaaggcacaagaaagccatcaatgagctctcgtcaggaaatggaccttaattgtaacaaagtcagaaattacagaacagggtccacccggaacaacgaatcatcgctaattctgctggcaagtgatcagccataaccataatacgctgatttaagcccgtgacatgagttatacaaatgcatccaagcttatcaaccaagttgcccgtgccagacaaatcaaattctgttgctaaagaaattcatttgatgtgatttggctagcagccaaaaaaaactggaaccgtgtacccggtaaaatctagactccagacgaaccagtacctttccatcatctcaaccattaggagcaatagaactataggagtataccatgcatgacatgttttggactcactatgcatcactctttcatagg

SEQ ID NO: 23104 - DNA, 1660 bp, Oryza sativa
  unsure (1)..(1660): unsure at all n locations
ccgccgcctccagcacaaacctgagcccccgcaaacgcgtaagatcatccgcgattggatggagagtgcgagaggtttttttgcgagatgatctgatccggagttcgtgtttctgcgtgcagtattccaggtgcaggagcgccatctccgcgcaccagcacacgatcgggaggtggttccaccacagggacgggagcagcagcagcagcagcagcagggtcgacaaggcccgcgccgagcgggcgcgcgtgcacgccgcggtcaccgtggcgagcgtggcggccgccgtcgcgccgtggcctccggcgcggcgaacgacccggacgacctcgacgacgccaagatggacgccgcgctggcgtccgccacacagctgctggcctcgcactgcatcgagatcgcgnagctcgccggcgccgaccacgacaggttcgcctccgcggtggaggccgccgtcgacgtgcggagccccggcgatctcatgaccctgaccgcctccgcagccacaggtgagcaaccatgcatcacgacaggccttctctagctcctgccacgcatgccaaccccgaagcaactaaatcatcttcgagttctctcgcaacatggcagctctgagaggagcgacggcgctgaggctgagagcgcagcgggaggcgaggagcaaggtggcgcggtggcgccctacgagaagaccggcagctgccgcggcgacatatggtgcaaggaagggacgctcctgaaacgcagccggaaaggtaaagctcaaaaaaagcctctccttgacacggacgcacgtcacaacgtcgtcacgtcgccgcgcgcccaaactgagctcgatcttgggatggtgattttttcaattttctcatcaggcgcttgcaccggaagcgcgtggccgtctacatcaacaagaagtcgcaggtgatcgtgaaactgaagagcaagcacatcggcggcgccttctccaagaagaagaagagcgtcgtgtacggcgtcgacgacgacgtgcaggcgtggccggcgccgcacgcgtgcggcggcggcgccgtgcctcctgctccggagacggcgtcgtcggagaagtgccagttcgggctgaggacggcgcagggcgtggtcgagttccagtgcgagagcagggcgcagaagcaggactgggtggagtcggtgaagaatctgctccggcaggcggccggcgggacggctcagctcgagcactccttcgaatctctccggcttagcgcctcgtaaaacgtaaaaacccagtgaattcgttttcgtttgctgtaaaatttacctgtcgagaccccgactgcccgttcattttatcgcaaagggagcagccgagacgtttcagtgttggagctgaagaataaatgtgcatacttgtaataacatgaataatttgtataaggatcagtagataaatgtcggtgttaagattttgatgtatctgctctctttacacacgccactcattacctgtttaggtagcaattccgctcaaaaatgcaaacacgcagtgataagtagtactcatatgaattctgaaggcgttgtttgacctttcagtcagggtctcgggggagagcccattagttattgaccctcttcatttacaggtatcgggggaaagcaacaatttttgcacgctaccaat

SEQ ID NO: 23105 - DNA, 2959 bp, Oryza sativa
gcctcgcacctgactccttccgcgccaccaacgttgccaccgcctccacagtcacggccgccgtcgccgctgccaccgacgcgaaccaccgcctccgcaaacgtcgttgcgccgtcgccctccaccaccaagcagccagcaaccgccgccgccaactgccgcgaccacaccgccgccgctgtcgccaacaggcgtcgccagccgaccaccaccgaccgcacccagatccggccgagagccgccgtggacgttgcagatcgcgggcgccgtcggcagccaccgccgccggcagcaccacctccagaagctcctgccgacggatgtcgccgccgctgccgccgcgacgggtgcccctgccacaagcttgccctgctgtcatcgccacgttgtcgcgagctccgctgcccccgccacgagctagctcgatccggccgccgggtggctagatctgccttcagcgtggccggatccagcgcctctgccgccgtcgccatccccgccgccgtcgacccagccgcgtctctgccgacaccatcgccttttggctgtcaaaccttacaattcgaatttaaaattccaccccctctctcgaactgagctattccgatgataaatcactaggacgacataagacagacacataacctacgtaccacaatttcttcccgccgccgtctccatccctgcgccagccgccaccccgccagatccggccgaggcggcgcggatctggcggtcaccgtcgccactgccctgggttgctcccccggccgcccggacgagatgaggttgacgagaaaatgaggagccccgccgccgccgtccttgcggccgcgcggctttgccggcggccgctcaggcggcggcgaggcggaggaggaagatgggggggaggggcggccggagattgacgcctcccgtgccacctatgggggagggcgacgcgagaggaagggtcgaactcgcttcacaaatagtgaacttttgaagctgatggcataagatggtcattaacataaattactcattcgatctcaagtaacaatgttcatacaaagactatagatttcactcaagtatccaccttggtttccaggtacaaattgctcatcttactcctaactagatgcaattcgaagaaactaatatagaaaaggctggtaaggagttgtaaggactgataaccgcggagaatacaaacagggtacgtacgcgacggcgcggtggggctcatcggcggcgatctccccggcggccgccggccgtcgtgctgtggcgtaagggccggatgtgtgggggaaaattagttcaccagctcactcgtccatccgagctggacaagtcaacaagccctccttccacatctcccgagccagccacacccgtccgatctggcgtcgcgattcatgcagatccgaccgccatgggccgtagtgcgctcgtgcctggacaggattaatgggccggtcgaagcaggaggcccattatatcgacaccgagtaggagaggccaatgcaaattagtaccacctcgcctggcgagagtggaggatgaggcagaggatgctataaaacgatgggcaaggcaacgtagcaactcatacctttctcggccttttggctaagatcaagtgtagtatctgttcttatcagtttaatatctgatatgtgggctatgtgttcactttgatattaaatttattttcttgtgggggaaggcccaccacggtagcttgctatcggggctctcgcgtgtcgccctagcgttgcactactgcttgggcccggcgcaccccaaccaatccacgtttcaaagattttgatctgctcatttagttttatagattttcatttgttataaatatttttttcaacttgcctaccgcagcgcaatgctgaattgctgcctgggctgaaaattagtatatcaaattagtatatcagtataatcaccggatggacgggggcatttttcctggtcgattagtccatttccgtttccgaaccttttggtcgattaatccgtttccgaaccttttctggtcgatcaatccagttccgaacctgcatggctgttattcgatgactcctgtttcttgactgtgttattctttactaatccctctcgctgcccgtccgttctatcgcaagggcgtggtgttggggctgaaggaataaatgtgcatacttgtaacatgaataatctgtaaaaggatcagtagagatgtaggtgaatcactgaaacatgcaaacgtgcagtaatatctcatctgtattccgaagacgtttttgccctttccgtcagggcgtcggggaaagcccattaggcccagtttagttctcaaattttttttcccaaaaacatcatatcaaatatttggacatatatataaagtattaaatatagataaaaacaaattaattgcacagtttgtatggaaatcgcgagacgaatcttttgagcctaattagtccatgattagccataagtgtaacagtaacccacctgtgctaacgacggtttaataggctcaaaagattcgtctcacggtttacaggtgagttatgaaattagatttttcattcgtgtccgaaaaccccttccgacatccggtcaaacgtccgatgtgacaactaaatattttcttttcaccaactaaacaagcggcagttattgagccttttcatttacaggcagtggaaagcaacaatactagactaggcctatcaatcgtgtatcgaactgagacagttcacaagctcagctacgcaaacagagcaagagtcaacttttgtagcatggtcattaacataaactactcattcgaggtctcagtcattatttgacttatacttataatttaaatttaaatgttacaacttggagtaagtttccatttgttttcttaatcatagtttattttacttcatttgcttttcttttacgggtcacgaggacg

SEQ ID NO: 23106 - DNA, 1064 bp, Oryza sativa
gctttaatgaacagattcgatgaaaaacaattcacaaacaagtgcgttttccagatgtcccatattgatgacaaacccgcacacccatgaattgagtcccaagagttcatcgcagacttgcaatgaaacctgccactaacatcgaggcagttcaatcgcaaaaaaacaacgcggctgcagaggtcctcaaaacccgtggtgattctcacccagtcgctctcacccattcgcattctccccgcactattccccgccttgtttccctctttccacgtcgcgagaggcctctgcgccccatccgctcatcataaaaacccaccactcccactgctttccctcccacctcaccacacaccacgccactcgcctcgcctcgcacagtcgctcgctcgcccgctctagctagctcacagctcgctcactcgctctcctcttccaaccaactccaccaccaccaccagtccaccacagcgcgcggcgccatggacgactcgtcgttcggttccgagccgaccacgtcctcctcgggcggggaggcgccggcctccccgccgtccaccgcgtcgtcgtcctcagacggcgccggcggcaagaagaagcggccgcgcaaggacgggcaccacccgacgtaccgcggggtgcgcatgcggagctggggcaagtgggtgtcggagatcagggagccgcggaagaagtcgcgcatctggctgggcaccttcgccaccgccgagatggccgcgcgcgcgcacgacgtcgccgcgctcgccatcaagggccgcgccgcgcacctcaacttcccggacctcgcccacgagctgccgcgcccggccaccgcggcgcccaaggacgtccaggccgcagccgcgctcgccgccgccgccgacttcccggcctcctccgccaatgcgggcgccagcaataaccccgacggatcggacgacgcgagcgccgggtccgcctcgccgccccgcgcgtcggacgccgctgacgacgcgctgttcgacctccccgacctcctcctcgacctcagatacggcccgcccagctcgggcctttcgtgcgcg

SEQ ID NO: 23107 - DNA, 3044 bp, Oryza sativa
agagagagagagagagagagagagagagagagagagagagagagagagagagagagagagctaaagattgatgaacatttgggaaaggaatggattcgaagatgatgttcagtagacagtaaaccaattgttaaatcgtgtgcgtttgagaaaggtttgggccagagatgttcgccaattcttggtttttttttatgcgtgctatcctaaccgccgagggcaactacctcgtgagatttcgttttctttatcatgatttgggcgttggagaacgtgatcacctacattatcaaagaggatggcctctgactccttccattttgtgttatactactaaccggtagcaacaatatgatcatgcatatgggattatcctatcgcccaaaagaaaatcatgagaccgatcgaccgatcaatcctccccaaattcgtcctcaaatcgcgtgtgatttacttcattgttgttttgtttacttcgcttttttgtttttaaaactaaagcttgatctgacattgatgacattagtgatctccggggccgtaaataaataaactcggagattcaactcatgatacacctgaactattagcagttagcttcctgacttctagcacttccatcatttgagtttgtttacttaagtctttgtgtagaggtcttgcacaaattgccatcactctcactcttaactttttttatttttttagaaaagttttaaaataaataaagtcaacaaagtaattatataatctccaaatgcacccctgaaagattcttacataattcttacaaacaaactcttaattgttggatgtaattatatgggagttaaattaaatctagattttagtcgatgtatagagatcacatcattgtttgtaaggtttttgtaagaaaaaacattgtacatatagccttttccttacatataattttgttaatattatgtacgcattccttaattagaaattaacatatgtacataaaacaacaactttaggatactatccctaataccctataacaattttattttattcatttattcacatttgacaactagaattataccagtgggtaaagaccaatgatataatagctattaggagctccgataaattgaaacattaggatcgctatatacatcataattgaaaagttaatgaaaaattcttccttggttttgggccaaatactattcattccttcctttctagccccaacctagtacactaccacccttcgctcggtctgtctcttttcgatccagcaggcccaacttgcacaaccggctaataaatatatttaatgtaattgtgctgcgtgtgcgtgtggtggatcgaatcagaaaaaaaaaatcagaagcctaaaaaaactggacggacagaaaaaccccgaaaactttatgtatcttttaattagttatattatagatgtaagaaatggttatctttcatgcagcttgtgtaatgacttgtatctctttcatgagagatgactcctcatatttctcttacatctcgtcatttgaatcaacatggcagtcttggaactaatacttactcgccactccatcgtgggcacttaattagccaaaatgaccacttttaaaataagttttagatgcattttttttctaaaaaaagttttagaaatggaaatttgcctgcataccttgagatttgggatagcttaagtccctggcaaacgcaggaaatttaaccaaaaaacaatatcatgccaacttcgggagcaacgtactactgtacatagatcaattctttacttatgaatggtatatataaaattgaactaggcgagatgcatggtttcagatttgactgttcttgaaaccgatcagacttgactgttagttgtgaagttttccctgtgttccaattacaagtagacactagctaatctaatactaacagtagcatccctcttggttgttctgtagtgtactgaaaactaatacaacaatgctactagtgcctgataagttgatcttcgaacaatgtgcgcttatagcaggtacatactctgagattgaatttctcaacttgtgttatcccaattgtacttcaccaatccacttccttacaagaaattcagctcgccttattttgtaggtactggatactgatcgaaaatcaacaacagttcgtttagcctttttccctacaccaacttgtcacgttctcaccaataattctcgaccggcagaatccctaaatttcttgccacgtacgtctgcatccctccaaaaattccctataaataccccttctcggccactccctgcaactcacccaagaacacactcgagctgaccacgtctagctagctatatctctcaacatcttccgagctactactagtagctagctagctagaggaagcagcagcaatggcgaaatcttgcaccttggtactactacttgtcgcactggtcgggctctcacttcttgtgagccccattgcttgctcccgcaagctcagcaagccgaaacccaagccgaagccgagcatgaagaagccggtggtccgggctcacaacaactacaccggtagcccgtcggtgacggtcaccaccggctgggccgccgccggcgccacgtactacggcgcccccaacggcgacggcagcgacggttagtgctcgcttgctttcgctttcgagcttacagtacttgcattgcacggcattggtcgagctggaactgaaattaaaatggaatcgggggaaaacttgcaggcggcgcttgcggctaccagaccgccgtcgggcagcggccgttctcgtcgatgatcgccgccgggagcccgtcgctgtacaagggaggcaaggggtgcggcgcgtgctatgaggtcagcacacacacacgacactgacacatgtacacacagcagtgtgtggtcacacgggcgagctagctattactgctgcgagagctttcgtgtagctccattaatggcggaaagtggtcggctgatcccaactcaatgcgttcatgtggccgtgtacgcaggttaaatgcac

SEQ ID NO: 23108 - DNA, 3106 bp, Oryza sativa
actcaatcctagatttgaaactgaacacattggtttttttttttaacggagggagtatgtcctagttgcagttcgaatccctgaacaatcaaccagtaatttgaactggagtagcacaagatagatgctgtacaaagaaaatactggacgtgcattttggtgtaaatcatcagcgcgctgtttctgtgtcctcctttttttcttttcgctgaaacctaatactcccaaacagcataaactccaatgctgcattatccgcccgcacattgcaaagtactactgtagtataagttgtgctataaattttgctctcctgttatgctgggttcctgccgacgaagacacatgcagttctcatcgaaagtagacaaaagtgcagagtcttgaatgttacacacactgattgtactcaattattagtagtttaagacacgaactggttttcaatggaattattaatgcatggagtacacttgtgctcctctacataccggagcttcgcttgtcctcggcattatgaactggaaactgagaaaagtcgtctagtttgtcatgtgggtctgacaaatgaagattatatataccaggagcgacgaccatggatttcgattcagaaagtttttttttctaaaaaaaactctgcctatttctgcacgagtgtgcagattaatattgtacagtacccgccgtcatatggatacagatttttattttaccacttagtttatgtcatttgatctacttaattccactagcattcaatttcttatttgaaacgtgccgctggttgcatggattaaaaataaatctcaaaattcaactagcaaccaattgcctgccccagatttaccggaaagggatacccacatgttagtgctcaactgcacatccagttttaccatgatctctacgtagtagaaattactttaaaccattatctttttttttctgatacaatgaaacgtatatttggtactagcatcttgactttttggttgtagaatatctttttccacaagcactgataatagaactaataaatcaataattgagtttgcttttaatcgtgacaatattagtagagaacaccgtaaaaataagtatgtaaaaaatagataaatttcgataacatacgtgtgtcgtggatatggattttcataccttgatgggatctccacccgttacttgtatgtcacctaaatatttatcaaaaaattgaaaaacattgataacatatgttaatatgaaatatatcagtgcacaaacatacaataccaaatttgacttctacaagttaaagcaaaaaaaaaaaggtttaaccaaaaatagttatcatacattcgcagctatatttgttatttttcttacatcttacagaaattgaattgtaatatatttaatattaatctatcttgtcaatttattttaaatctgtaatgactatttaaatagcatttacggaactagaggatatcacctatcctcttgaagaataaatacactttcccgtgtgttgttggtatatttctgctcgcagaatgcaaaccacatccgatgctaacaaccaatcacggcctaacaaactagtagtgcggagtacgtgccaacattttgatatggcatagtctcagccagcaagcaaaaaatctgcgcttgtctcctttttctcgttttaatgcatcacatggcagaaagtgaccgtgcgtaaatcattcataactaggagtaggctatttcaagaccttcaattgctcacagtacaacgatctagcggcggtgatacgaaagagaccaccatctatggcacatagctctctttcccaagaagaagaacatgctgcagacctgacctgcaacctgcattcaggtgcggctcgcgcgagtggtcgatgtcaaaagacgctacctagtcactgtcaggatccatcgcgatcctccatggctgcgctccatgtgcccgccaagcgcacacgacaacgatctggatgaaaataataatcgctctcgaaacggcacagtgtacgagcggaaaaccgatcgagagctcccccatgctctgaccgctcgcatgttccgctcccccgttctgtctcccttcccctcccccctgctaataatctcggcgtcgatggatcgatcggttggtctgtgcgtttcacagtccgtgtagccgcctccggccaccaccaccatcaccaaccaaccaaccaaacaaccgagcgagcgatcgtgcaggcggcgtagcgtgaggtgaggtgagcagcgcgcgcgcgcgcgcgcgcgttccccaccgtgtcagtcgcgggcgcatgtggagagattctccggtgacgggagggtgaaagactgaaagcaacgggcgcacatggcggtggtgctgtgcatgcatgcgacgcgcgcgcgaccccgcccgcggccacggttcggctgattttgttgggtattcgcccctattcgaccgaggggtggtcaaaactcaaaaccccgcgaacatgttaattggcagcatcgaaatttctaatctgtcctgtccttccatacatctaccctggattcggatcaggccactttggcagtacccaatcatccagccatccagcacacgagagatggcccagatttaaccgtgtcatacatcattttagctatttgaacaagcatagaacagtttcagttcagattttgcctgcaatttctctccctttgatctgaattttcttgaactttaagacaacccaaatattgttaaagaaaagtagacacatacttcatttcattatattgaacttcataatatcttgcacgcataattgacaaaatgagctagagtttaagcccttgtttagtttccaaaatattttttccaaaaacgtcacatcgaatctttggaaacatgtatgacgtattaaatatagataaataaaaaaaagtaattgcacagtttacatagaaattgcgagacgaatcttttgagcttatctttgatcttatttttctattataatatataaaataataaatgtatatttacttttattatggtgttttgaaagacaaatttatatatgttgtcctttaaactaaatatttttaaaattattgatgg

SEQ ID NO: 23109 - DNA, 4343 bp, Oryza sativa
tctatgcgaggcagggggtaaggatccttaggacatgccttgttaaggtcggtgtagtcgatgcacatccgaagcttgccgttcgccttggggacgaccaccggttcgccagccactccggatggatgacctcgcggatgaatccggcctccagaagtcgcgccacctcctcgcggataaaggcttgacgttccggggcctggcgcagcactttctgccggaccggcctcgcgcccggccgtacggcgagacggtgctcaatcacctccctggggaccccgggcatatccgccggtctccatgcgaagacgtcagcgtttgcccgcaggaaagagacgagcgcgtcttcctatttgccgtccagaagaccaccgatccgtgtggtcttggacgggccgtcgcccagggcaacctccttgaccgggacctcatcgcacgtgactacccgctgcctcggggcggcgggggcggatgtgccaaacctctcgtcgccaccctcgggcttggtcacgacggcgaggcggtccgcgcgctgctccatacaagcgagcgcgactttgaggtcgccatggacagagatggggccatcggggcccggcatcttcatctggaggtaggcgtagtggaccgccgccatgaacttcaccaacgcgggcctccccaggaccgcgttgtagggcagactgaggtccgccacatcgaagttcacccgctccgtgcggaagttggcgggtccaccgaaggtgaccgggaggtcgatatgacctagcggccaagtgtgccccggcgtcacaccgatgatcggctgggacggccggagcatcatccccggggccttgatggcgtcaaaggctgcgggggaaaggatgttgagggctgctcctccatcaatgaggacacgccccagcttcacgttgcaaacagtgggggaaaccaccattgcgatctgtcctccccgggcaacgcacggtgggtggtcggtctggtcaaaggtgagggcaacctccgaccgccgcgcccggcgcgtcgcctcatgagtaggggccgcggccaggagctctcgcttcatggccttgaggctccggcaagaaacgtgagcacacgctccccatcgacagtggcaatggtggccccaggctcttggaaacctaggtcatcatcgccatcatcgatgtcctcggcgggggccttctgcttggcctcacttcgccgattgccggaaggaaccgccggggactttccctctcggcgctcctgcctcctctcctcctcccacttcctcgtccgctcagccaaacttttgactacacggcagtccgcgaggtcatgaagggaagtgttgtggacggtgcaccacttgccggttgggcgctccctgctgggagcgccggcctctttctttttgtcacccgcaggcctcccctttcgggtggcccgcggagcgccctcgacggcgaggacatgaccctcgtcgtcggtatgggctgacctcttcttcctcctcctatcacgccgccctgtctgagcggcggatccgggggcggccgaagctgccacaccggaaccggaggggttccaggtccatgcctcctccttacgagccactcggtccgcgagctgaaaaagctccgcggtagtctggggctctttggaggcgatcttttcgagcatgcggttgtgccgcacaccccccctgaacgcgtaaatcaccgcgtgtgcagggatgcatggtatggtattacggacttgacagaaccgctgaatgtacgagcgaagtgactcatcatcccttcgctgtactgcgtgcaagtccgcttcctcaccggggcgcggatatgtgccttggaagttcatggtgaactgttggcacaaatcctcccaagagtggacagacgcgggtggcaagttcattagccaaccccgcgcctgtcctttcagggccatgggaaagaaattcgccatgaccctgtcgtcacccccggcggcctcgatcccggtcgtgtagacctggagaaactcggcggggttgacgctcccgtcatatttttcggcgatggtgggccggaaccttgggggccaacggacattccgaagactcgccacaaaggctctacagccgacaccaccaaccgggggcacggagggctgattcccgcgtccgtgttgaggtgacactctggacgaggaagcgccctccgttgcgtgggcagcacgtcggtcattacgccggcgctcgatgctggtgcgggcgtccggccccccacgcagatcttcccgggtcgaaggagtcgacgaaggagtggcggccgaatggcgaacagcggctgccgctcttcgtgccctccgtcttgacgacgcggagccggtggtagcagcaccagaggccttggtggcggaggaccgcccaccagcacctaggcgctgccgtgcagtcatgaccaatttggccacatcgtccagccaacgttgggctggagactccgggtcatggacgacgggcgggtgacgtaggagcgcgcctgcagcttggagcgcgccctggggcgtgctgccgtcgccgtagacgaggaggcgacgctccccatctcgccgcccttctccacctcctgtggatgtcgaagtcgcggatccttcagccctctcgagcgccttctcccgcctaggactttggcgtggagggggcggtggagtacgagctcgacggcgtgggtttggctccccgtcgtcaccgctcatactcggggagaggtcgtgcgcctttgctggctcggccattgggctgaacagaaaaagcttggcgcacacgaaggagtgcgagagctcagaagatcactcgcagagtcccctacctggcgcgccagatgacggagcgtggggctcctcaccgggagaccgcgcaggcccccctttgccggttcggccggggaccctgggtgagactctaagctcccaatctgtatgtggaaggttcgcgagacaggaagcacagaagacgccggcgatgtatacaggttcgggccgcttagaagcgtaataccctactcctgtgttttggtggattcgtgtgtgaaagagctacaaagtatgagccagcctctcccttgttctgggttcctaatctggaaaggttcagtccaagaaaaagaaaaaccccctctctcggtgggcaaggtcctccttttatatcttaagaggataccacatgcaccatttccctcttttttgtggggacctcccccaccttttcataaatggacggagatttgtatagttgccatccgagtcaccttctgatgggacggcccacaactacccccactttcgccgggagcagatgcgacgtggaatcgtggccgcctgctgacgacatgaccggagtcagaccagtcacgtcggtcattcttgtccaccacgtgtcagcttagcaatctacatgtccgcccttcttcacacaacatcttgcttgtaatggttaggatgaagcctggcatatatctgatcagggctaacgtgccatctctgggaggtaacacgctagctccagctggggacgagcgcctagaagccctcgtcctgacgggatggggcgaggcgtgtgtcagatcgcctgtggccacctaacccgcgatctgaccggtctgtgactggtcacagaccggataaacgagtgcactgcactacgttgcatgcggcgtgacacgctcagtcaaaccgcaataaatgtggtaggtgagccccactgtgctcacctaacccatacacgcggagcaaaaaacccacgaggggtcggggcgcctcggccctcggggccgaggggggtgcagcccgaccccctcggggggactaggaggagggcgaacacatcaccctcgggcccgacgtcccccgagggtgccaggccacgtgggcgattgcgtctgcctcaaacctctagtcatgatactcctgatcccatgtcaccgacagtagcccccggcgttatgccagggcgatcgccctctttaagggaagcggtcgggcgtgacgccactcctaaggcctggtgacaggtgggaccggtctccacaattgggcagaaacccaacggtcacaaatcacgcacatcggcagtggtaactcggctgtcaataatgagcggtctcttcaagactgccacattactcgagtagcacacgaatctggacatggcgattcgtttcgtttggagatatggtaacgtcgctttggtcggcgagcgtaattaccgcgcgcacgatatgatctatctcgactgccacaaccgcatatccacctcatgcgccgcaagcgggcgaatgggattagtggaagcatgggcgcgagaa

SEQ ID NO: 23110 - DNA, 1386 bp, Oryza sativa
cagccacgggggccggtgctgaaccgctacatcccctgcgccctccgcaagaagtgggacgactggaagagcgactggttctacaccccccttgccgacgaagtgcgcctccgacttccgagccagcccccggctcaggcctccagctggcgggcgccggtagatctgggggatggctatgacgccgtcctcgaccgcctggcgggcctgcgatcccaggggctcacaagagccatggtgtacggcgactacctccgtcgtcggattgcgccgctccagcggcgcgctcggggcgcctgggagtacaccgggtccgaagacttcatgaggactcaccagggagtgagatgggactgggctcctgaggacttcaagatattggtccaacgggtgctgaatctcaactccgtggaggcggccctcattcctcaaggaatcctccccctctgcagcgatccagaccgcgcctccatcctgaccattatgatggcggtcggggcctcagaggagcgagctccaaagggccacgacggcacaggcgggagccgccggggggaacaatctatcccgagagggggtcgtgcttctgggtcccgcgacaggggcccggggagcagccgccctgccgatgcccgggggaagaggaagcagggaggaacacctcccccatctcctccccgagggggcggggcggcgcgtgccagcagcaggcgcccggagggggccgcgccaacatcgcagcccgagggggagcgcaagaagaagtggccccgcaagatgggggagacagaaccatctcggggaaacctcatttcccctccaaagtggtcgtttaaccgaccccctcgcaggttcgtctctcgcccatcgtggttgtattcattctctcaacgcgagtttttactcacccatctcgttcgtcttctggtcttttcttttgtttcagcgagatcccgtcgcgtccctcccgccattccaagtccggccagtctgaggctgaggatccggcggccgcagaggcccgcaggcgggaatctgaccggcgagaggccgcggatcgcctacgggaagccgaggaggccgcccaggaggctgcccgggctcgccaggccgaggaaatcgctcgggaggaggccgcccgggcccgccaggccgaggaagccgtttgggaggaggccgcccgagcccgccaggacgagatgttggcgacttccgaggcagctcgcgacgaggccgcggacgcgtcgcttgggcccactccctcgggcgacgctcaggcgacaacttccggggcagctggcgacgaggctgcgggcgcgtcgcttgggcccatccctcgggcgacgcttagaaccaaccgggtccgctcagacatccccgagtccg

SEQ ID NO: 23111 - DNA, 2466 bp, Oryza sativa
tgagctcgaggcgcgggcgaaggagctggacgcaagggcgcgcagcggcggggcggccgcgggcgaaagcgacgtagccgcccgcctcgcagctgccgaacacaccatcgccgatctgcaaggcgcgctggactcgtccgccggggaggtcgaagccctccgcttggcaggcgaggttgggcccggcatgctttgggacgccgtctcccgcctagattgcgccggtcggcaagtgggcctctggagagggcggaccgtaaagtacgccgacaaccagggaggcctcgcccagcgcctctcgaagatggccggggctctccaacggctccccgaggagctcgagaagacaattaagtcatcctcgagggacctcgcccaaggagcggtggagctcgtcctggcgagttaccaggccagggaccccaatttctctccatggatggcgctggatgagttccctcctgggaccgaggtccgggatgccgccgaccatatcgtcgacagcttcgagggctcggcccctcggcttgcgtttgcccccaactccgacgaggagggcaatgccggtggtgcagacgacagtgacgtcgaggccggcggtccgggcgcatcggatgagcccccagacccccgccattcttcagttttttcttcttttcttttttctaaggccttcgggcctcttttttgtatagatcaacttaatctgtaatcaaaaatgaagaaatttttgtgttaatttcatcttgctgtgagtatgagatgaggatgatctgtgccgtggtccttttgtgtcttagcttgattaagggttcgtgcccaggtcccagtcctcaaaaggcgcgggtcggggctagtgcctggggagatccacatgtcgagactggccaggccgggaacgtggtgaccgagggttatgggtaacccgattgtgggtttttgccgattcccccccggagttcaccacgccccggggcacggctcggttctgggccccgtttggcgattttagccgacccgagcccccgagggcaggattgagcacgagtgacctatttcaagtcaagattcttcaaaaggaaaaaacagcacagacacagcctttaggaaattgaaactgtctttattgaaatattgaaataagagaaataagaaagtgcatgtgtggcagcccccggccaaccctgcacgcccgagggggtgcggggttggcccgagcccgaaacctgacacccgaccccccctcaggggtagaagcgacgaaggtgttcgatgttccacgggttaggcagctcagtgccgtcgcccgtggccagccgtatggagcccggccgggggacgccgaccactcgatacggaccctcccacattggtgagagcttgctcaatccagcacgcgtttggacgcggcgtaggacgaggtcgtcgacgcagagtgatcgggcccggacgtgacgctgatggtagcgccgcaggctctgctggtagcgcgcggctcggagggccgcgcgccgccttcgctcttccaagtagtcgaggtcatctctacgaagctgatcttgatcagcctcgcagtacatggtggcccgaggagacctcagggtgagctcggatgggagaaccgcttccgcgccgtagacgaggaagaaaggcgtttccccggttgctcggcttggtgtagttcggtttgcccagagcactgctggcaactcctcgatccatgaatcgccgtgcttcttgagtatgttgaaggtcttggttttaaggcctttgaggatttccgcattggcgcgctccacttggccattgcttttggggtgggcaggtgaggcgaagcagagcttgatgcccatgtcttcgcagtagtcgccgaagagttcactagtgaattgggtgccattatccgtaataatacggttaggcactccaaaccgggctgtgatgcccttaatgaatttaagtgcggagtgcttatcgatcttgacgaccggataagcctcgggccacttagtgaacttgtcgatcgcgacatacagatactcaaacccgcccggggcccgcctaaacggtcccaggatattgagtccccagacagcaaatggccacgaaagtggtatggtctgcagggcctgggccggctgatggatttgcttggcgtggaattgacacgctttacatcgccggaccaggtcgaccgcatcattgagagctgtcggccaataaaaaccctggcggaaagctttaccaaccaaggtgcgcgaggcggagtgggctccgcattcgccttcatggatatcggcaagaagcacaacgccttgttcccgaggaatgcacttcaggaggattccattagccgcgcgccgatagagggtcccttctaccagcacgtagcgtttggagatgcgatggacgcgttcactcccttcgcggtcctcgggtagagtcttatctgtgaggtatgcttgg

SEQ ID NO: 23112 - DNA, 533 bp, Oryza sativa
tgcagaatcacgaatcaatggcgccggcaagctgtagtataattagctaaccttggtgcttaattccgttaatctctcgtagggtgccatgcaagtacagcggcgtgaacatcgcgttcagggttgaccagggggcaaacccgttctacttcgaggtgctcatcgagttcgaggacggcgacggcgacctcaacgccgtcgacctgatggaggccggctgcggctggacgccgatggtgcagaactggggcgcgctctggcggtacaactccaacaccggcaaggccctgaaggcgccattctcgctccgcctcacctccgactccggcaaggtgctcgtcgcaaacaacgtcatcccggcgagctggaagcccggcgtgacgtaccgctccctggtgaactactcctaaattaattacagctctctccacatctcctgcaagaagctgcagtgcagagttgcggtaaattggtaattacagatttataattagcctcgggttaattatatggcgggaaatgtgcgtccgggt

SEQ ID NO: 23113 - DNA, 1222 bp, Oryza sativa
aattaaatttcaaatataggctcaagatgttcaaaggtggcttgccttgctcgagatctagagcttgatcctcgaaatcctcgcactgcggttcttcgggctccgaaactatacgcaaaacgggacaactcaacaaacggcgaaaataaagccctattaatgacctctaagcgtgccattagagagatctcgagatttgaggaattttggaagttgaacggagtcaaacggatttacggttgggaagatattgaatttctaagattactggatttttggtctaaaggaaaaggatttaattaaatcctttttgaaaaagaaaagaaaagaaaagaaaagaaaagaaaagagggagggaaattagacttttcctcgggcggctagggcgcggcctgagagaaaaggggcggctcggccgagctaaatgggccggccggcccaaggcggcccaaggcacgcgcgcgcgggaggggaggagagagagagccggtggaccgggctcaccacgcgcggtcccgggtgggacccgcttgtcggtgacacggttcaccgtgcggagcgagcacgcggcgcacgcgcgcgggcggggagggacgcggtgtacgcacgcggttcgcggtggacgcggatgcggcgggcccacgcgcagcctcacggctcgcggtggaacgcgcgcacggggagggactgaccggggtcggctcgacccggtcttggccgagctggcgccgacgtggcgcctacgtggctgccatgcgggccggcgggaggtagacgacgacgccggccggaacggacggcggacgacagcggcgagcggcggagcgaaccacggcgatacaggcggaagcgagcacaccgggtggttgcacgagacgaggggagacgagccaactgctcggattcaccggagggagcttgacggcggcgaattgcggtggcggcaaccggcggcgggagaagggggaaacggcgacgaggttactaggggccgattcccggcggcgagagcatctacgcggctacgggaattcgatgctagcgttggattaggaggaaacgcatcgagggaggccggcgacgagaggcgcttccgagctcgggcggcgacggcggcgagcaacggtgagtgacggcaacggtcagggcggcgccggctacctacgaggaggctactcaagctactacccgagtctaaggggaggagatggagcgaggaggg

SEQ ID NO: 23114 - DNA, 774 bp, Oryza sativa
ctatttaagtcaacaaatctgctattcaagtccacaaattaacaacctgtcatgcaaatgatcaccaaatccgtaattatgtccaaaaacacacctcgtatcacggaaatcaccaaatatatgctactagtactattcaagtcccagctgtagattttgaacagtaacttaaattccacattcgtctttgcctctcgcgggtaccgagcccgacaaataaaagcagaaggaatttaatctttcctttgtaccactgtgccgtcgacctgccagccacaggttgcagctgcctataaaatagacagacggcaagttgtacacacatatccaggggcgcgcacagtgaaggccgcggccgcgctgctgttcgatacacacaatcggcggcgacatggcattggcagccaagctcctcccgtccatcgtcgcgttcgtggctctcgcctgctgcgtcctccgctcatccgtcgcgtccgtcgaccaccaccggaagctctccggctggtccatcggcggcgcgacgtggtatggccctgccaacggctctggaaccgatggtacatctacctcacggactcgatcgatcatcaccagaggatggaccatatatgcgagcggcctgcaggcttaattagtactgacgaggcgtgctgcatgttgatgtaggtggcgcgtgtgggtaccagggagacgtcgggcagccgcctttccactccatgatcgccgccggcagcccgtccatctatgagtccggcaagggctgcggctcttgtt

SEQ ID NO: 23115 - DNA, 2000 bp, Oryza sativa
tgataaaaaataaatatatatatatatttttgacaactttacaaaaagtaacatggtttaaaatgaaattaatctgaaccacccttcgatcttcgggggtactctcctcatcacataagatagcaacgtcgaactacgaatcttcttagtcccatccgggacggagggagtagtgcgcagtactgttaaacgccgttaaaagcttccagctctgaacaacagatatgataactgacgcggcgattacttgtgccactcctttcccctacatccactacacgtacgtacgtatacatggacacgtggcccgtctccaacccggtcggcccccgcctcgtccaaccaaaaaccgcgcacctgggaagggtccccccacgcatcacgcagccaagtgccagccgcccactctgccaccaccatccacccacgatctctctctcctctatatctcacgcggtctgcacggtcacactcactctcggtctcactccctggagctggagcgtattaaaacccttctccgtccattcgatcctgccacttcctttctctcgccacgatctcctccatctctctctctcttcctcctcgccggccgagtcagctatctcgccgccgcctgagtacgtacgtccgtctcggtatggccatggccagtggcggcaccgtctgctccatgtgcggcgacgtggggttcccggacaagctcttccgctgcgcccgctgccgccgccgcttccagcactcgtacgcactcctccgtatttgcctcgttaatttctacctctctccctattgattcctggcgtctaggtaggtacatagtgatcagaactgacgcgtcgtggcaacggatgcatgcatgcagctactgcaccaactactacggcgacggggcaccggtggaggcgggcgccggcgtgtgcgactggtgcctcagcgacgccgccgtcgtcgccgggaagaaggggccatcgtcggaagggaacgaggagccgttctccagggagtaccgtggcaggagcaagcaggcggcgtcgaccggcggaggcgagcaggagggcggcggcggcggcggccggagggtctccaaggccggcgctgtccgtaggtacaagcttctcaaggacgtcttgtgctaaagagctatggtctaatacggaccatagctgatggatcaatccttcattttcactgcgtcaccccgtcatgtacaaaactagctctagctagtaggtgcccatcgctaggtaattagatcatccctgtgtaaattgtccccgtgttaattaaccgcgcgtgtgtgtatgaatgtatgatactactccatcctagctaattaaagctatatgtatgttttcatagacatgtcatgtttgacgagaagtatcaacttgacaactagtgaaaggaggagctagcctaggtcttgtatgcgtgacattcaccaactaattgtcgtcaaaccctacttgcaatacgtgcggtgcttcccgtcattcattatcgatcgtcatcggatcgaggaaacgagctagactgtcctcaactcgatcgatcggttgatgtttacgctccaaatcgcgatcagtctccatccacatcgatcgtcttcaaacgatcgcgaaacacgaaccatacacatcagtactagtacttaattaagacttcaataattaagcactattacacgtctgcttgattattagtttcatgcatgaaagacgacgatccatcatccatcccttcctctggcacttgcgatatgtacgtggtactcggtagttgatcggtacgtactaatccagaagaagactctagaaggcgatcgcgttgcatgctcggcaccctcgccttttttttcttctcctcggcggcgtgccgatgcagaggaatcaaatcaacaactcgtacaagtacggagtatgctgcaaaatattaaaggactccaaagtggccgacaaacaccatgttatattccccccacttgtgggttagcc

SEQ ID NO: 23116 - DNA, 1628 bp, Oryza sativa
tcaatgataatatctattatattattaagacagctcgaaaagaagacaccacgttcaccgtggaggctagaaattcccacgttaatcgaagaaaatataattatttacaccgttggattgtaagaggcatagatttcaatgtctgagatttaagacaaacttggcatgttaattaagagatacggagtaccgtacgcgtgtagaattagaatcaatctctagctaggacctttacatgcaaacggactcaaaagagttttgtccgatttcctaaaccaattaaccagagttagagatgaattaggctataatacacatatataaataaagcagcgggcaacgaaccactatagaacagtaatttggatgcgtttttgttgatatgaagatagatgctagcagcgagcgacggaaatccgaagcagcgggtcaagccgtgcggctgcacagtgagccgtatttgggtgatgcacacgtcagcaaccagaatagcatgatggcatgtgcacggatttttatttgattttgaaataacacaataaaaaatgaaagaagagttcatgtagaacacaattaaagattaattgaaatccataataaaaaataaaatagatttagaaactagaaaaatcaaatataagagttcaataagagttcaagtaaaaatacattttacgaacaactgaaattaggaataaaaaataagaaatattagaagaataattcatatagacatagtatgagattaataaaaaaatatgagattaataaggaatattaaaagaagagtgcatataagaactcaatatgagattaataaaaatttggaataaaaataaataaatccgaaattagcaaaagaaaataaaagaagagttcaagtaggaatataatttaaaattagctgaaattcggaattaaaaataagcaatatttaaagaagaatccatataagaacccaatacgagattaattaaaatttaggataaaaaataaaataatatccaaaattagaaaatttaaaagagagttcaagtaggaatacaattttgaaacaactgaaattgaaaataaaaaataaaaacattaaaagaacacaatacggtaataactaatttttttaaaaaaaaattctgaaattagaaaaagaaaaataagatttcaattaggaatacaatttataaataactaaaatttttgataaaaataaatattattgaaataaaagaccatctaaaacacatgacgagataaattaagtaacatgcatataaaagagtagagtggtggcggttgatacgacatataaaaattattaataaaacaccaaatagaatcctaatgacaattaaaaggagggacgtcaggcaggccatgaagcaaacgagtaaggcggttaccgggacttctagaaagtaaaaaaaaacaaaccccattgataatcatattcgatttttaaatctcaaagacaataaaaaggagaagcagcgggcggggtacataagagtatagttgcagagccgccgacggctgacaggacttctagaaaataaaaaatgaattccaacgatattgatgttcgatttttagaatcacaatgacaataaacagtagacggcaaacgggct

SEQ ID NO: 23117 - DNA, 1411 bp, Oryza sativa
aagatttcaattaggaatacaatttataaataactaaaatttgtgataaaaataaagactattgaaagaaaaaaccatctaaaacacatgacgagataaattaagtaacatgcctataaaggagtagagtggtggcggttgatacgacatataaaaattgttaataaaacatgaaatagaatcctaatgacgattaaaaggagggatgtcaggcaagccgtgaagcaaacaagtaagacggttgccgggacttttataagtaaaaaaattaaaccccattgataatcatttcaatttttaaaatctcaatgacaataaaaaggagaagcagcgtgtggggtgtataagagtatagttgcagagccatcgacggttgacgagacttctagaaaataaaaaatgaattccaatgatagttatgtttaatttttagaatcacaatgacaataaagagtaggtggcggatgggatgttgaggtgcgtagtggcatcgtttgataggacttataaaaattataaaaaataatgaaactacaagtccaatttttaaaggttcgtaacttctaaaaggtaaaaaaaatgataatcatgttcaatttaaaaatctcaatgacaataaagaaggaaggcagcgggcgagctatagaggagtacaatggtaaagccatagacggtttggcgggacttttagaaagtaaaattgaacctagacaataattatgttcgatttttaaaatctcaatgacaataaagagaagagacattagacgggccgtagatgagtataatggcaacgtttgacgggacatctaaaaattataaaaataaaacccaacatgacaataaactctagaaactataaaatctaatttttaaaggttccaagaagaataaaaagaaatagtggtatatcgagcaagcaaataaagaacgagatgacataaggggtagcaactggtgtgacttttaaaaactagaaatacgaggatgataagggttggtctttcaaagtcttaagacaataagatagctatctaataaattttaagtaaaatcatataaaaaatatgtgatttttttaggtgctagccgcgcaattgtgcaggccatccagctagttcgtttcattttacaagtcgctttggaaaaaatatagtaacattaatttttcaacacaaaacaaatatattattataatgtattcattattagttttaataaaactaatttgatgttatagatgttattatttttttataaatttgatcaaacttaaataagtttgtttagtaaaaaaatatcaaaacacgacttatatatgaaacgaagagagcattagttagtgggcgtgtacttcaagacttcaagtcaacccttgtcaatgctaaactgggatcaaactcaggaagtt

SEQ ID NO: 23118 - DNA, 2498 bp, Oryza sativa
gatcggacacgatcgactggggtattccatggaggcgcacgatgtcggtgaagaaggctgcgccacggactcggcggtgtacgggtgcgccaaggggatgaagtggcaatacttgctgaagcggtccacgacggagaggatgatcatcttgccgtgcacccgaggaagcgcctccacaaagtcgaggccgatgtctgcccacacaatggacggaactggaaggggctgtagcaggccggccgggtggagatgttccgacttgtagcgctggcaggtcgcacacgccttcacaaagtcctgcaccaaacgatgcatgtggggaaaatggaagtcgcggcggaggcggtggagtgtgcggtggacgccctcgtggccgtcgtcatggaccgcggccacgatctcctgtagtagcggcgaggccggcgggatgtgaagccgcccgtcgtaggtgaccatgtccgtgatcacggcccacggcgccgcgcgcgtgcctgcacggacctcgtcgtggatggcgaccaggctcagatccgtggcctgggcgtggagcagccgctcgatgaaattgaaacggggcgcggagatggccaggagctcgccctcctcgacgtcgcggcgggagagggcgtcggcgacggtgttcatggcacctgatctgtactccaccgagaaatcgaagcccaagagcttcccgacccagtggtgttgcggaatcgtcgctaggcgctggtcgaggaggtacttgaggctgtagtggtccgtcttgacggcgaaacggcgtccccataagtacggccgccagtgccgcacagcctggacgaggccgatgagctcgcgctcgtacgcggcgagggcgcggtgacgaggggcgacgggtcggttgaagaaggcgaccggatggccctcctgagtgagcaccgcgccgaaaccatgggacgacgcgtcgcactcgacgatgaagagcttggcgaagtccggcattgcgagtactagggctgtagtgaccgcggtcttgagggccgcaaacgccgccgccgccgcatcatcccaagagaagccgtctttcttgaggagggcagtgagcagcgcggcgaccgtgccgtagttgtggacgaacctgcggtagtagcctgccaagccgaggaagccgcgcactgcccgaggcgaacggggagccggccagtcacggatggcctgcactttggacgggtccatggcgacgcccgccgccgatatcacgtggccgaggtaggcgaccgaggaggcgccgaaggagcacttagtgtgcttgacgaagaggtggtgtcagcggagctcggtgaggacggcacgaaggtgacggagatggttcgcccatgtcttgctgtagatcaaaatgtcgtcaaaaaagacaaggacgaactggcgcaggaaggggcggaggacgtcgttcatgagggcctggaacgtggccggggcgttgcagagtccgaacgccatcaccaagaactcatataggccatcgtgggtgcggaacgcggtcttgtggacatcctctgggcgcatacgcacctggtggtacccagaccgaaggtcgagcttggagaaaaaccgcgccccgtggagctcgtcgaggagctcgtcgaccacggggatgggaaagcatccttgacggtgagcgcgttcagggcgcggtagtcgacgcagaagcgccaagacccgtcgggcttcttgacgaggaggaccggcgacgagaacggggagtcgctgcggcggacgatgcctccctcgatcatggcggcacattgccgctctagctcgtccttgtgggccgccggatatctatacgggcagacagccaccggctgcgcgtccggcttgaggatgatgcggtgatcgtgcgcgcgctggggaggcagacgcgtgggctcggcgaagaggtccccagatgtcgccaagagcccatccaggaggagctcgctgtcggtggtggcggtgagggccggggcgccgggggtgggcatgccggaccagcagacggtccgcccttggtgctggaacgacatccggcggctggccaagtcccagacgatgggccccagggcgcccagccaatgggtgcccagcacgacgtcgaagcccgccagcggcatcacgaagaggtcggccgggaacaggacgccgtcgatggtgagcggcgcggccttgaggacgcccgcgcaggtgacgcgctcgccgttggcgaccatggccgttagccgggggcgtatgtgcaggggcatgccggagcgccgcgccgccacctccgagatgaagttgtgcgtgctgccggagtccaggagggcgacgagcgacgccggcccagcgcgaccgcgatctgcatggtgtcggcggcgggtaccccggccagggcctatagggagaagacaggcgcctcggcgtcctggtccgcggcaccctctgcgtcgtcggcgtcgtcgagttccaccccatcgatgaagaagacgcggcggcagacg

SEQ ID NO: 23119 - DNA, 587 bp, Oryza sativa
gggcctgcaggccgtgatccgcgagcagcacagggcgctgggcagcgtgtttacgctcaggtcacttgggcttgcggtgacgttcctcgtcgggccggagtgctccgaccacttcttccacgcgccagagttggagatagctatcgatggcttgtacgaggtcaccgtgcccatctttggcaaagaagttggctacgacatcgacttggacacaaggaacgagcagcatcgcttcttcgccaagatgctgaggcctgccaaactgaggggccatgttcttcccatggtctgtgagatcgaggcaagtacattttttttttgtccattacctgatcctataaattcaaagctcagatcatgtctgttatcatctccgtaaactaatcttgtttgtataggaatattttgggaaatggggagagtgtggcgtggttgatctgatgcaagaggtggatcacgtgctgatgctgatcgcgagccggtgcctgctcgggaaggaggtccgggagaacatgttcgacgaggttgcctcactgtttcacgagctcatgggaggtatgcacctgatcagcatgttcttcccttac

SEQ ID NO: 23120 - DNA, 711 bp, Oryza sativa
atgattcttgtgtcagatatggagcttcaccagaaatcaccatgctgcaaacaagaaatagttatacaaacagacccaaagaatactgagtacgtcataattagtggagctcaacgaaagactgaagattatgatgtggaggatgcagagacactactgctacctgcagatgaaggttcaaatacttgcagaaattaatctggcactcctatttatgaagccattgttttaaaatgattacttgtctgttgtggatttttcttcagaaagagacaagcttgcggatcctatgtataagcttgaacaccaggaagaggatcttaaaaagaagaaagaagctgaaccagttttagttcgccttcaacgactctccgatagccggcattctgatgactacgctcttaacagagcccttcgtgatcgtcttagggtcatccaatgaaatcctttatcatattttttttccaaaatagttatttaaaagtgtcatgattcttatccacttgtcctatttgtgtagagccaaaagaagagagttgctgaagagaaaagatcagctagaaagatgggacttggagtacggcttttaccaccctctgcagaagatgccactgcagcggcttctgtgaagtttgcatcaaaatttgagaagagcagaagggacaaaagagcagcaattaaggctgcttccatcttcccggagtcatcaag

SEQ ID NO: 23121 - DNA, 939 bp, Oryza sativa
aagagcaagccagggtcagtcgttccttacaccccttgcctttgccccccactctcgccagatggcgagctagatggtgccggcgcccctgctctcctttcctgcccggccatgaggtggggtgcaagattggaagaagggggcgacaacctcgacgacggctgcccacatcagcggtggagcggatctagagtggccacggtgagttcatcgttgcaatcttctcttccttgctgactggcgcccacaatccccccgccgttctatgctctcttcagcccctgaaccgccagaaccctcttcttccttcttgctggatccagtggaaggcgagcgtgggagtaggggcaccacgtccccaacgttggctcgttgccctatgcttcacgcggcttcgatctgaccaattgagtcttcctcaattggttgttgtagtaatctagtggaatccttcttgtatttatcgaatctgtagtaatcgttttggttgtagtaatctctttcgtgttgaacatggtatctcccctctctgtctttgttcgatcgtgatggcgcgagcgataggcgatggactcaaattttgtgcaaactacagccgtactactgcaaccaaatttttttgtctcttacgatgtaatatctgatcacatggtttcctgctttgttttggttgcaatgtgcatgcctgattggtcatctgtttaggaacactcaattctgacatgtaccaatgtagcaccaaaaaaaattcaaattttagtttgctatatgccatgatgcttttatttgatttaaagaaacttttgttttgatatgtgatggatattttttcttacttgcatttgtttccatgatgcagggacagtatagcaatattggaaccaaggactatacatctaaattatcagtgtgctgaggttcgtgatagtgctctgctga

SEQ ID NO: 23122 - DNA, 681 bp, Oryza sativa
gtggacttatgttagtaataaacctgaaacttgggatgaattgaaaaccatgatgagaaaacgctttgtgacatcttattacaaatgtactcttcgggagaaattagaacatctgaaacaaggtgacagaactgttagggagtacattcatgaattaaggtctgtatcatctacagtggtctcaaagagtgcaatgaaaatacaacgcgtagatttttcaatgggcttaattctgaaattcaggttttgcttgataatgtgacatataatcatattgggcacctattcatgcttgctcgtagcattgagagtcagatcatatcaaaggcgaggatgcatgaccaatgtgatttatctcctatttctgaatccctaatatacttatgtaatgatgatgtgcaaacattggaggagcaatcttttgtctcccctgttactaacgttttgcagaaagatcagcacatccaagaaaaggagaatggtatacttgagaagaaagaggatgaagcacctgcgatgtctgaagaaagttcgcaaggtaaattaaatggtgctgagagaaatgaaggtgagtattctcaaggtgagctacacttgtccacttttcatgctaagtagagcaaccattagtggaatcaattgctgagttgcctttgtcacaagttgatttacttgctgttc

SEQ ID NO: 23123 - DNA, 713 bp, Oryza sativa
actgcaagtagttcatcacctgttctattttccagcaagtacaagcacaaattgaaattacagacctgataaaacagattggggcactgacgagcctctaggtacataaactaaatatcgctgaggcgactatccaggaaatcatctttaatgttaatgatagctccggaggggaacaagcatgcagttcaacaatatgttgcctcatttgtagaagtcaaagtcagtctcaggcttcttgacattggttcggtaacccttctcgaagtccttggggaggataacataccgatttttgcgcacagcatgcataccagcttcttgacagatagcagcaatctgaaaaacagaacatcacaatgaatttcagaacagcacaagggaaagcgaatataaatgcttacagtatttattgagcaaaagctgagcagagagtaaatgtgcatgtgtagctgccagcaacatttatgccaaagcacagaattacaaatgaaaagaaaagtttgatgatgaacaaggctttaaggaacctctagggttacaaaaattattagaacatataaaggtaatctattagaggtggtactttcacataatgaaaataaaaaaaaaggtgtggtaaactacagtcatgtaatgaataaaatagaaccctaagatttggaaggttctcgaggggaaacatatatcttagattttgatgttattaactt

SEQ ID NO: 23124 - DNA, 717 bp, Oryza sativa
tctttagccaaacggaatacatctcgaaccatcctaggtccctaaacaaatgaataaaagaacttcatcaagaaaagaactagtatgcccaaaaaccatagaaaatctacaaacgaagtctcaacatccaaaacataaagcaaacttatgcatactattattgagcatgaagcacaaagacttggttaatttggagttgtcattgatggtcaaaaagattgtttccaaagaatattcagacaaaaaataggaattgttcaaatgaatacacagcatgggcaagctagatatttactagcactatcaaagttccccataattcttcagctaaaaatgattagcctatttcgattaacttatccttaacatttgagcagaactaatccttaacacattccttcttagtattcagtagcacagcagttcaaacattatgcagttgaaccttttaagtataaggctagatttgttatttcagcgaacaagatgtaacgagtgagctaagttattaatatatatacataaactggtcctaacatacctcacccaggtacttctgcacaaactctgaaccaacaactctgataaatgcagcagtagtgtggtgtgccacagctttggcgagcatagttttgccagttccaggtggaccatacagaagcacacctcttggaggatcaataccaatctgcttgtacagctcatgatgaactactg

SEQ ID NO: 23125 - DNA, 1550 bp, Oryza sativa
agaaaagactgcaacaaagaacaaccaagcaactcctctgagcatagccttgccacctcttaattatcattgcatagtgatgtaaacacattcatgaaacaaaaaaattatccacaggcagagaaacacgcaacctttgatcacgtgaacacgagaaaggatcagtcattctgtgcaactccatatcctcatatacataatagaatcccacaaaattggaatcatgctgcatcagtaaagattcggggatgagaggagatttcttcccgtaactcaccgagatggccactgagaagagtcatgagggtggggcttggacgccgccagccacctgactcacgactgctacgagcagcggaagcagcagggcgaggaatcgccaccaaggttgagcgcccattgtcgccgattgaattggtaatttttttttctctcttgtgaaagggatgaacaccgcggcaaagacaaggtgaaggaggatctgagacccttcgcgtttctgttgcggtcgattcgtcccctcgttgtcgttgacaacagcaagttactcgaggagagctcgatcctgtgtctgctagatcaaccacaaacaaaagccagtactgcttgagatcacaacacacaatcgtcacagctgcacaaaagacaaagattggcatagattaccttggcccttggggcgacacgggccatgagagcggcggcggcattgacgacattgttctcaatgaaactgattgtggagttgatgatgagtagtgtgatgatgcccacgaagtcctgccagttcggcggcttcccctgaaaaccccaaacaaatcaaccctcatcaattcaatcaaacctctcacaatccctcacatgccatgctctgaaacatcattaaattcattactacttactcctccattggcgagagcgatggccatgattgtcacagcctccatgacctaggacagcgggttccacatgaaccccaagaacttgaagaacttgctttcctgcacacacacacacacaaacaaacaaacatgaaaaaaaaactttgcatcattgaatcgattcctaaacagaacaagaaacttttctctactggatcttgggagagaaactgcggattgggtgggttaccttcttctccacgagcttgttggggccgaagaggttggcaggtaattagcattaaagatgaatccatcctaagcacagtgaaaatgcaatcattccaccatttgttattacctgtcaaatatactacaaagagaattcaggtcccaacagagatataagacaaatttctacagctaatgcaaagattggcaaagtgcagcagaatagcacgctgctagattcaaggaactaagaaataacacgctttgtaagtagaaaactatctattctaagatacttttgtaggtctttctccaaagtaatgataatacacagaaataaatgatgttataattctgaaatgcaggctaaaacattttaggaaggaaagcaaagcatctttaaaattctaagtatcatgctatctttagaaaaggaca

SEQ ID NO: 23126 - DNA, 7320 bp, Oryza sativa
tagaatactcaagctttactatcaagtgactattggaagcacttctctttctagtgtcattggactggatctaaccacttcatataggaactgatgtaacttgaggaggcaaaggcgttttaaccatgttgctgacttgatgagactgacgctttggcgctgaacaaccttttgagagatgataggtcttccaacagttgggaacaatggtggactatctttcttggtctcgagagtagacaattactgaggtgatgtcccggctcaagacaattgagacacgtctcacttgatggatctttgatgtgcactcttcccgctgtgcatgctcccaactgaaactggagcaaagaggggttcataaccttggtgacaatgttattactatcaccgtgggttgccgctgcagatggagcttgtggaagagcggaagtattgctacttttgttactgactgccataagttgacgaactggttgcaaggttgtcctttggtctctcactgccttagctagcaccaaactaagttgattatccttgagtccatggtatattccctcacacaaaaatcgtgcatcctttctctgccaaagactggactgaggtgtaccatagtttttgtaagcaagctaacctggacctttcttctctcctgggcacggtgccctattgtcggtcgttttgacaaataagtccaacgggtgattgaacactttgcaagaaactggccttgaaacccataccttctgtaggtatcacttgttgctcctgggattagtggtggcttggctatgctggtctgctgaagacttggtggcatactgtctgaggttgcaggtgcttgctcttggaaaacaaactgactttcgctctgatcctgattccggcttgcatctgagcttgtacttgttgttggagagattgtcgttgcatctgctgctttggactctgcggttgcggtatcaacatctgacacatccatcattagatcttggctagccaggatctgactagagcgaggtgctccgactcagctggtagcttgttgtcttgaactgatccactgactctgactgcaacacactactgctggagttgcttccgctacacttgaccttgcatcgagctttgcatctcctgcatcaacaccaatcatctgatcttgaacgccaaaagttgatcaacgggggttcctctggcattggggcaccttgcagctttcaactgaaccattgattgtgaccataatacaccgtcgttgttgttgctcttctctctgacactgacccactgctgttgggatagaaaagagaggtggaagagaggggttgctaaagataagactttaaaccacttgcctaccgaactgttgtgagtagacttttatgattcaagttgcttaaacaaacaatctagtatggtcgcatccccaccaatgatgcaaaccaaattgcatgggctctgaattgcactcgaagtcgacttggattgggcctccaccttgacttggacatcctcgatgatcctccatgactctaagtccttctccaagtgtctccttgtcatctccattgttgctaatcacaatataatcattaggtagcaatctattatcaaattcgtacaaaaaagaacataggaacgagctcacctcgaaattcaattgtcgcgcgcgagctcttgttatcggtccatgaaggagtgatgtccgcatcattcaacccctcttgaattgaagtcgtcctcgactcaagctcatcttcttctcccaagtattgtttcaaatctgaaatattaaacgtgggactaaccccaaacccgggaggcaactcaagtttatatgcattatcattaatcttctcagcaattttgaaaggaccatcagcgtgaggcatcaacttagactttctcaattttggaaatctatcctttctcaagtgcgaccaaactaaatcactaggttaaatcttcacttcatgcctacctttactatcaacaattctatactttcatgaaaaaatttctttagtttccaagagcaatacgcattgcttgacaataaaatgccattagtatagagtaccggtgaattgaattccaatctttaattttcatgcagctgtccacctcacttgaattgttcgaaatttccattagagtcaggcttaattttattaaccctcttaaatggcctattttgactcatttagaaacttctactaaattctttattttgttcatcaatcttaattattcttatatggttcgaaaaccatttggatgaacgattattttaatatcttataaaatgaacaagctttatttagtgtttaccactataatccgatctcttaactttatttgattttagcattagtatcttaaatttcttaaaggaaatcggatgtcgcttatgggtaatcatagccataaatggctaatttcttaacttagtgaaattttctaataaagctaaacaacaccattaaaatctaagggaaagaatatctctatctcatgagatgttccaaactcccctagtaatgtggcataagcgacaatgacacaatttcaatgacgtcttacttccatcattatagaataattattcttctcattcttatttaagcttcgttcattaatgatgcagcggaatttaaaacatcatcaaggcttgattaagtccacaaatggatttcttaagtctgcacactatgtgtgacttgtctttccacaacaaaaccgtcaagctatgttatgtatatttaattgtgcaagtcacaaattaagagatgcaaaattttagcatccacataatggagctatgagtcataaatgaggtagagtaatctgatctctcttatttgagctcttgatgagctcgcaatgattttattatttatgtaatggaagcgtaatatcttatgaacttgaatcacttctaagggtgaagtgtctcgaccttaatgagacgtctattctcccctagaaatgtggccgaataataaggccataatttcgacaatgtctcataatgattcaacccaaaataatgccattgatcttcttatttaattactttattgaatcaagacattaagcatgtccctatttcttgcaaagaaacttacacaagaaaatttcaagagtagcatgcataggaaggcaattttatttctccttgcgaggaatatgagctttattattattattaaattttgaatttgaaaatgagcaatggcgcgcggtggtacaacctagtggagcgcgcagcactactcccgtccgtcggctctttccttattttattcttctccctcttcccctttccattttattcttctccccaatcccctttctctccggcgagcccaaatgaatgagcggcggtgatggtggcggcgacggcggttcgacgaggagaagcgcgcatggtggcactgctccatcctccgccggttggggggcgctgcaaaagcggcgccaagccgagccacttcctgtcctgctagttcgccatgtgggtcggtggggttcaagacggtgcacgcatgatgaagctagcgtggccgcgaggaggagttggcaagggtgcgccatggcatacacgggtgaaggagttgcccgtgcggcaacgacggtgatgccttcttcccgacgaagcccgcatgacggcgctaatgtcgtgcagcatctccggtgacttagggcttcaacgatccggtaaatctccaaaacccgaagcttaatttcttgatttttgtttggatttaatgcaggctttggggcttagggttcttccctcccctcccccgaaaaaaattagggttcttagatttggggattttaggccaatttgatccggcttattagggattttgggaaatttcaatcttgtttattcccttttgcttaatagtggggaatttcaatccaatttatcccctgttttttgtttgctgagtgctagccgaaaccttagctttggtctaggaattcttggtgtgagaattgggaatttcagtctcatttatcccgatcctcattcttctcttaaaaaatactgctaaggaacgaaaattaaatcttcaatactatgcttcttctactgttggccgagaccaccagtacaacagggctcaatggcttcacttagggatgatgggatcaagtggctaagataaggctctgacaccacaatgttggaatttaatccaattaattaattgagtcttagcttaaacatgatcaccttcttcttatgcggaaattaattgatctaactgaccagagatgaagccattgttcttcttctttcttcttctttgtttcttctgctgcgagatacctcacgaaccccttccaatgtctaatcgatcgggcaattgatttagggcttaggattagatagagttcgatcatcaatctgcctccctccttctctttctttatatagtaacactggtgggactcgggggtttatctccaattagtttggaattttgttttgcaccgatcacacaaaacaaaatctaatctcttatttttctttcttgattaggaaggaaattggtggttaatctctttcctgatccttatcgatagtgagtcgataaaatcaaccaatggccatttgcacgggagtgccactattgcaaaaatccttattggtgtcggttggaaacaaactataggagctggtttaccagccggaaccaacttgggggtgccaatgactaatagcatagatgtcgatttaataactgttacctatatataattaataatagctactggttttgtctcgtagcaagtacttataatttaaaaggtggctgatatgctatgaaccgacacctttaacctatttagggttctgtagtagtgcgccgacggcattcgtgtaccgttgcgtgtgccattttggttttgtattatactagcaagactttgaattattggagcactattttacgtattatgtattttgttcttttttagcgtgtacggtggcagaccaacgtacatacgacaattgatgggttgttcaatttcatttcttgctctcacttagtgccagacacattgcctagtaaatttcttcactacaagagaattaaagcagaataaattgctctaccaaacatccatccctcttctagttatatacttcgtcccagggctgaatcagctggagggcttcctgagaaacggcgacagaaatagcatgggaaggttcttcatcactcaaacaaataccccaaatttacttaggaagcggcagtgaaaaagaaagcgtacaataggaacgagagaacctaggaaaagaagaaaaagctactggaaatcgaaatgttaccgacaacattggtgctggagtgctcagttcaagtccgtcgctcgtctgactgcatccaggacaacttgctataacgctgctccatgggtggtgtgggatccgatggattcgagctttgcttgtactgctaggatcaatttgtgaaattccatttttgacatgcgtgcagcgatgtgtacttttgcaatttttggtgagtaggtagggcgtaaaatttttctttatttccttcatttttaattatttgatgaaggatatctttctgttaatgcgacctatatgtttctgttaaaggagagtatgttgtttctttgcaaacaaacatacgttagcaatcagcaaattttagtgttcaacaaaaagatcgattgaagcttaatttggattcatccgtctatgtatttcacgtttccaataattaggtgctaaatataaaaaagaattttctaaaaaataatcaataatgatttgtatacatagttcaacattcattaatagttccgtagcaaggtgtatatatcgtttgctccatgcacctaccgtgatggtgttatacatgaaacacattgatctaggaggataagtaaagtcactaaatttaaatgctatgcaaacttccaaatatagttctattaagtatgcactttatggccgagttatgcccaataatgatctgttacaactttagaacatataaaaataaaaacaagatatttttactaccaatagataacactataaaaatgaattttttttacggtggcgctaatacgcgcgctgcacgcgaaatattagttcgagcgccgcacaacgctctctccttccggttttctcttttttaccttcccacctttcctccgtcctttttttttgttttttaccaccccaccttccatgtttattttttctcttttccatctcatatgtgtttcatgacagggccggtaaaaaatgaagtatccatattttttcctttttcgttccttctctccatttttttatttcacgttttagtaaaatatttatcatctagtttttctttccggttttctgtttttctattttctatccacatttcaaaagcaacgaatttacttcatggagttttccatttgcacccagcctcccacacctgcttattcaaaagtaacaaatttactcgtatgaatgtcccttcaaaaataacaagtttattttacatgaatgccctgtgatgatacggcaccattcctagatggccctaaaagaattactaccataattgttttaccactgttatcaatattgtttagactttgtggtccgcaagaaaaacaattaccaccttcctctcattatagaccttgatctcgtagccaccgtatagtaatatgttactgatgtgttcaatacacagcataagagtaaaaactgaattaagagtattgtttatctgtatcacaaaatggtcgtaggaatgtaaagaattacagatcacacacgagtgataaaattactcacttaaaaagaaaaaaatgattcagccaaaaatccatcatgaagttgtgatcctagtggctttgctggatcttactataaggatggagcggctggtctgtgtcttgtgactggtattggagagggcaaccaggtggcgagcagtagtcgatgatggaatcatgaaaggatgtagcagtgtggtatatttatgagctcgaagttgcgcagtagcagccatccattatctagcaagcacgaaaaaaaatgcaaaaatattctcgttcatgtcattgagacaacgagcaaaagaaaaatagcaaacaacttccatcactggcgaactccacaatatcctctgcgagcaaccacatggagcacgatgtggaaatgtagatcatgtgcagcccatcaatttagatcaggtaatattggatattgcacgttaatttgatttgcaaaaagaaatcggggtttcgtgagtg

SEQ ID NO: 23127 - DNA, 17297 bp, Oryza sativa
atagcacatagaggttattgttcgctcaaagaaaaaatgccataggaatgagaggtcccgggaaaagaagatgatatccaagagaaggaattagtcaccgagagcattagtgctggagcattcagttcatctccattgaggacttgacatcttacttctcttgctttagtagaaattctgagtgtcatgcttgcgggtggcaatctggcaagctttgtctgacagtcgtagtgcatcagagttccaactgctgtaagcctgtaagctgcttaggtcacatcgttatttgaggttatgcacttgttgagttctctcgggtataggcgcgtagttagttgttgaggccaggaataaagggaaaaggatgtgtttcgttacagttttcttttgtatcagtgactcgtgaatgttttgccaacctgtgcatttcacctaggtcccaataaacaacatgattatataatgagcgactaaagccttttatgaatttcatatgttttggattagatggatgagcattagtgttattttggaagtatcaagcgacagcacaatacttgtcggttcgcaccaattaaaagactaaaaacctagtaaaaccagtaagatagtgattttttaataagttggtgatacatctctattaaattgtttgcctctataaccaccattttaatagccaaataaacgataaacatgctcatgtcatatgttaacatcttgctttcttccatcggatatggttcctgatcaaatactaatcagagagcagttatagtcgactaaaccattacaagctttttggcgtgctctagggtggacagagatgcaaacctgctatgcgtgttgctatcttgccatatggtgatgtgctgttgatatcagactagtgataattttcttcaatggccacgtcactactgtagttttttcacgtactcccctacgacgccgttgacttttcgaccaacgtttgactattcgttttatttaaaattattgtgcaaatataaaaatatttatgtcatacttaaagaacatttgataacgaatcaagtcataataaaataaataataattacataaattttgtgaataagacgaatagtcaaacgttgaataaaaaatcaatggcgtcatatattagaatatggaggtagtatttccttgagctgtaagcctgtaggctagcttgactctcatccctctttcaggctgtgcactttgttgagtttctgcagttgtagacgcgtaactagttgtcaggcccaagaaaacgaaaaaaaatgtgattgatttatttacatttttgttttgtttgttagatataccagtgactagtcaatgtttttcgccaacccatgcaatctagctatgtaccaataaccgtaacgctattatataataagcgactaaatgattgctatgaaaattcaattagtaagttttggattagatccatttgaatttatgaagaactacagcacgctatttttcggtggctccaaattaaatgattctaaaacaagttaaacacaggaatcctctgagcaagttgtccatacatctctactaagccgtttgcctgcatatccaccaattaatacgcaccgaaaaccctacatatgctcatatgttactccctccgtttcacagtacaagtcattttagcattttccacattcatactgatgttaatgaatctaaatagatatatatgtctagatttattaacatcaatatgaatgtgaaaaatgctagaatgacttacattgtaaaacggaggaagtatatattatagtaacatcttgctttcttccctcggttagtctaaatcaaatactataactaatgagaggctttcttgtaacaccctgaaaattcgaccgacaaaatcaaaactctaaaaatacggattttcaaaaactttttaaattattgcatcataccgatcttattcgtctattttatctggatttgatctcgaagattattaatcgtgagtaaagaatagttaattaggaataaaccgtaaaaacaaaattggtaaaatacatacaaattaaaataaagattaggtggggatagaaataaataaaatattatcgcgaccatatttggatcaattaaatttaaatacgatggaataagaattaaccctaattaaaactcaaataaattatataaaaataaaatatgagtaatattaatctagagtgaattcattagttaagataacacaaatattgagtaaaatgcatatatgcaaaattaggaattgtggaatcaaatttatatggaaaatacactaaaatcgggttaattagaaaacggcattgatcattgcacctaaggtgttcgacgcggtcccctaacccagctcctcctctttccccctctctccgtcgccggccgccgcacgccgtcgccttcgtcgcctgccgccgcgccaccgtcgccatcgccatctcatcgccgcggccacgccgtcgccgtcgcgtcccgccccgcgccgcgcgtgcatcccatcgccgcctcgcgccgcgcgccaccactgccgcgccgtcgccgtcgccatcccgtcgccgcgtgcgcgttccatcgctgcctcgagccgtgccgctgccgctgccactccgcgagcccgcgccgcgccgtcccatcgttgcggtcacgccgtgccatcgtgtcgccgcccatcgcatcccgccccgagccgcgcgccaccgctgtcgccgtcgccatcgacgtcccgtcgccgcgcgcgtcccatcgccgctaccgcgccgcgcgccgcctcgtcgcctcgcgccccgtgccgcgctgctccccgagccccgtgccgccgctgctaccgcgccgcgccgcccgttccatcacctcgccgcctgtcgccgtcgccatgcgccgcgcgccgccgctgccgctcgcccgtcgcgtcgctcgcgccacgcagccgtcgcgtcgcctcgctccgcgcgcccccacctcgcgccccgcgccgccgtcgcctctcccctcttcccctctcctatataaacccctattcccactctttccctccatcctcacctcctctcctctacccactccaccacgccgccgcctccacgccgccgcgtcgtcgcatagagccgccgcgccgccgttgtcgtgccgccgcgccgccaccttcgaagccgccgcgccgtcgccccggagccgccgcgccgtgcgtcgccgccttgcgctgccgtcgccgtcgtcgccgccaccgccgccgccggtgagccgtctcccccccttcacctcgcgcccaccgccgtcgccgcccggggaggcaaagagccgggagagaaaagagagaaaaagaaaaagaggagaggaaaagagggaaaatagaaacaaaggaaaggagaaaatagaagggaaattgggggagaaattaggaggatttaggaaataaaaatggtcggggttaatcatagattatttttggaaattcctcgaacgtaatagtatttcggtcgaaattccgagttaactataaaaatatgtttcttgatcagattagattaaaattggtagtaatttagatataattaataactaaacaattagatgaattcttatagattattatagattatttttggtaatctctatgagccatcggttcacggtagaaattcggatttaattactaggaattttagccgtgtattatatttaatcatttagtcatagactaaattaaattgtataataattctaggatttcgtccgatatttagctcgtaatagaaatttctaacctattatatggatataatgctcgggaagagtaaattaaaaacttatgacaacaaaataattatacccgcaaaatagtttaaatcgaaattgggtttgccgtagtttgcagatggtaaagttaataaaaagtaatcgactttcgcattcgactttcatttggatttatttggatttttatttgaattctaaccgaattcaaatcaatttttgcacgtaactatagagcccgagggagttgcggatccaagcgaaggccaagacccgcaagactttgagcaaggcaagtcatcactattccttggccatgttgatcctaattgcgaaattgttttgtttacgaataaagttgcatgcaatgatgaacatcatacttgtgattatgccatgccttgattattatttacccttaaatctttgtaaccatgtttagtatgagtccctagtcaactatgacaattgcttagaaatgctattctagaatcatgcacactcatatttatcaaatgctatatgcttgggcaattacctttgggaaggtaattgagatgcggcatgtggagacatgagcgccacattgccatgttgttgatgacatgatttgtgaaaggagaaataaaattaaacaactgttttcgactggggcggacggaggatttgggtggtatctggaaaaggctagtaccgtccccagtcaattaaggaccgagccatgaagttaagcatgaaacgacccccgtacaaccgtacttctcgaatgggtatagacttagcggattagatagccgagcggaggcagtatccctgcatagatggttcacccctgagtgaggcaggtgcgctacgatgggacagccgttgaggtagggccgagaagcgtgccctacatcggtgtcgccattagtaggactgccatgaatgtgtgagagagagaacttaacttgaaccataacttaatatgcgtgtaagacttctctttccccgggagcgccagaactcctctcactgctagaaacatggacgcctagagtgcatgaggatttaagttcatggagcgggtactgccaatgcaaggttatcgaaaagctttgccgtgacgcgtctcatgtgttgggacgaggctcatgtgttgggcagtcgcggagtgcgggtaaagtgtacatccactgcagtgtgagtaaaccaaatctattcgaatagccgtgctcacggttattgagcaccgggacatgtattacacttggctagactctaaattctttaacttgtgtgggatgggatattgcatgatgatttttatgctgatggagccacttcctgagaggcaggaatgtggacgtcctcagaaaaccataacgactcaatgacgggaaactatccttgggatcacaatggatggtggacagaaccgtcattgtttaatatgaacactggtattaaaaacttgatcagtctatactaggtcttaggcttgtgaaaagaattacaaaacttgctttgtgcaaaagaaccatagccatcctttgaattcctctgtcatgtgcatcattgctatgatggcttgctgagtacggttggtactcacccttgcaaatataaaattaatcagaagcgggagatgaagcctcggaggatccctatgcctactaccaggagggagatgaagacgatggcgctcagtaggtcttagtacggtcgttgcctgtggcaatggcatgccgctgcctgaattccgctgccttatctatttctgcttttgggatgtattccggaccgctcggtccgatgatttaagactatgcctgcgggcttatgatgtaataattcgtattagacactcgtgtatgtgcacttgttatttcagctatgaattcgtgtgtaccagactacttgatccagggaaatggtactgtttacacgattgattcctgttataaaaacgggggtccacatttctattgtgccccttagggtggacagagttgcaaacttgcaattcatgttactgtctcatttgagtaggaaaatactcagaaacgtcatgagatgaatatgagcaaatgctccatccatttaacctgttacctcttcaccctggatattattgcagggcaaatctattctttattttcgttccccatcacttttgcaaaaaaaacaaacaatggaagaactgaaatatactatagagcatcatggtcatagttatgtagcccaactgaacacaaaagaatgaaggaatctatctatctatctactatgtatactaaaagttcactaaactttaaacgctttcaatccgtcacgtgagactcctaaaaacactcctaaatcgctatgtgacatctaactatcaattttcgttaaataaggtggacccactaaatttataaaaaagaaaagtttccctcttgtacgtgatactggtgcacgtcgtacgtacgtttgtcctcagcctcacgctcaacctcccctcctatttatctctctcacatatttatgtcgtattagaaagaaatcaaaaacatattttatgataataaacaaaacaactaaaagatctaaatcatatgactaatttgttttccacatacattattagattctttacaacagatttacgatttacgatcaaaattaactatatttaccaagtaaaagaaatgcattactttcgacaatctatttgacactcacaacacatttttatggaaaaatcatatacattttgaaaccacctgattaaaaacacatatcataaataaaaataataggaaacccataaaattaattaataaaattaatataataagtaccttaattagaaaatatttagcaagtaaaagaaatacattattttagatttctaatattatatcaaaatatagataactcaagctggtaaacatatttgaaagtcagtacatgcgcacatctccctgggaaacttctctcaccaccccactaactcaattttcctcctctcctaagtccattaaacttccaataaacatgctctcaagttgctaagtggaaccataataaataagagaaatccaaccatctatttttatttaaatcgatggacccattgtttaggatagttagatcaattttgaaaaaaaaaacatccggaaccaacatccggatccaatgtatacaaacaaacaaaattaatagttcgcatcataggaacgtacttactgtatgtccttctcctctattccttcctatgttattttctatttcatgagaaattaaaatcaaaattattttttagaggcaaaaaaaaatcacagatagaccaactactaggtctagcggctctccctccaacactttaaacatcctataaacgcttataagtcactacgtggtgctattaaattagagaaaatactagaaaatcttttaaaaaatacaaagcaaccgaccattgatacattgttttggattgttagatcttttttaataaaaaaaattccaaaacctctctccctccctccccacccccatgcggtgttaaaattcattaaatatattataaacatgtcacagcctgaatttcgtttcaggatttataaattatttaataaattattaatagaatttatattaaatgttgattaatttacaagtgaagttaaatgtgggaaataaaattttctaaatataaagcatggatggatttaatttttattaaattctccatgattaattatactctctggaattttctcggatttttcagagctcaattcctaattttaataatacaaagaatatttcagtaattatttaattaataaattaatcattaaatggtctggttttaatattcttaaatactttgagtgtccaagtatgttcaagatttttcttcgaattatttgagcgttgaaagtatttttaacaattgaaagatcatctcattggttaatttatgtggaaaagtaataaaaatcctcctcctcagcttgggccgaattcagcccattctctcccttcctctcagcccagccaaagtctgatttacctcccttccgctacagtactccatcttcttcctccagacagagccgagccagccgtgctcgtgcacagtgccgtcgcctcctcccaccaatccgacctccccgttgctcctctttccgaattagttgtgggaatggaatcctctcaatctcctcttccttttccccaataaatccccaaaatcttatatggaaattctttccaatttcgcggatcaaatccttcctttttccggcgagaaccctagactttcccgatttttttctcgtcgatttgggcctggacctgagcttccgtgccgatataaaggaccccctaatcgtcctctacccatcccctcaagtcccgtccgccgccgtcgccggaaacgctctccccgcgctcaccttctctctccaccgccgccaccaattccagccgccgtttgtcgtcgcctcggccgtcgctctcctgcgccgccacctctctcggctccgcaaggtcaagctccaccctggccgccgttccccttgcgccgaaacctcgccggaagccgtcctcgctatgaaccagtgggttgccgtcatgttccgatctacagccgcgccgttcgtcgtcgtctatggtcgccttcggtcgtcgctgccaccgttgtgttcgcgaggaggagaagaagatcgtcctccacttccccgaagctgaaatccaccggagctccatcgtcgccgtcaacccgaagttcgccgtcgcgttttgatctccggcgaggccctgctgctcctcccgtcatcgccaagcttcgccgcagcctccctcggcatcgcagctgcgaggagaaccccatccacccctcggttgtcgtctcccgtcactgaaaagccgtcaccaccgtggacagtacctcgtcgccgtcccgatctcgtcgccggccatcttccgtcgccatctgtcatcgcgtaagtgttggtaaggaccggcgcctcgcgctctttctcccggtgccctccgtttgcatatttgtgccgtggttcgccggcaaccgccgctcccatgccgtttaccggcgaaggtttttccctggggccttaatccaatctaacctaacccgttgtctatctagcgtcgttgtcgtctcatgtcacgccccgaactagtcccgaccggaactagtttggggcgtgacaagaaatggtatcagagccgactctcgcggtttcacaggcgcgtgtgtcgcagttgcgcaggcatggtgcgcatggctggtgtagaccgggagtggttacatagcatggcacatgcgttggcactggacacatggacgtggccaagagaggacgttcctggcctggggttgatcgacgggggcgtcgatctctcttaagggggtgagggtgtaacatcccggcctagggcttaataagattaatagaatactcatatcaacaagttgcaacttcttttccggaagccaatctccaaagaactccagggttaagcgtgcttggcctggagcaatttgggatgggtgaccgaccggaaaattcttcccgggtgcacacgagtgaggacaaagtgttgcagaaaagacatgtgttagtttgtgagggcagtctatgacctatgaaagctgccagatgtaagtgggcccggtctgggagaggcgggtcgttacaaaatggtatcagagccttgtccactgcgacacacgcgcccgtgaactccttgtcagcgggatccgcttcatcttcttcagcaactgggtggggaaatatttatatagagcaagggtgagtaaaggagtactcagcaagccatgggaaataagtgtttaatgccggcttcaaggaaaggctgttgtttttgcaattgattttatttgaactcttttgtgaaacaactaagtgagtgcttctcaaacgacacggatgagacagtgcgtctcgtccggttggagtatgtgcaatgtatcagtcttttaaattgatcaagattggcacccggccaacagctttcaaacggccacccgggcctggctgatcccatcagccgcagattttccaaacatcaaacccattccacaacagcaatttcacaaggcagaaaacaaaactacgctaggaatcaccgtgggcacggctgttcgaatagttttaataacctctacagagggggtacactttacccacacgacattactaacccggatcatccagcccttgcagaatggccacgactagagaccttagggctttcatgacaaggcatttcgagagccgacacaggttcaccatatgccaacgagaggggtcccagaccaacaccagactaggtcctagaccatactgtgccaggatgccaaggggtcctccccgacaccaccctggcgaatccacatgtctcttagcatcatggctcccccgataagctagttactcagccaggggtgtcccattccacccatgtggtcgtacttgtcttatgatcggatgaaattccaaggaaacggtccttaagtgcaagagcgggaaaccgtacacccggtacgttccccggtccgcagttttggaaattcatttagttcgcaagcaccgactcaagtgtcgggttttccaagtcttttgtaaaacccaagtttcacccaagatgtttctcagattttaagtttgaaggcgaccgtcgatacccgtgcagagtgcacgattaccgaggcgcaactaggtgggtacaagggaacatggtatagcaattaacaaaggaaggatcaaatgcaacaaattaggtatgctcaccgatctgcctcgtagatggggcaaacatattaagtgcaatcctagcaatccataatattttgcaagaaatataacttagttaaaatataggctcaagatgttcaaaggtggcttgccttgctcgagatcttgagctttatcctcgaaatcctcgcactgcgggtcttcgggctccgaaactacacgcggctaaaataaagccttattattgacctctaagcgagccattaaatagatctcgagatttgaggaattttggaagttgaacggagtcaaacggacttacggttgggaagatattgaatttctaagattattggaattttttggtctaaaggaaaatgatttatttaaatcctttttgaaaaagaaaagaaaagaaaagaaggagggagggaaattagacttccctcgggcggctagggcgcggcccgagagaaaggggcggctcggccgagcttaatgggccggccggcccaagaaggcggcccagggcgcgcgcgcgggccgggaggagggagagagtcggtgggccgggtccatcccgcgtggtcccgggtgggacccgcttgtcggtgactcggctcaccgtgagcgaggtgcacgcgggttgtcatgcccagaaattcacgaaccagaatttctaagctgaatgtgtattaaacccctgtccaggaccagccagggtacaaaaacgacaattgttgacatacggatccacgtcttacaaaaatataaaagattacgaatgcagcgaaaaaggtaaaagcgagctaagcctgaagacttgactcctgcagcgggcgattccattccacaggcaacccttgacggcagcgacgaaaccaacctcttcaagacatctccaactgagaagaacttcaactctggtgtgggggaaaagagcaagactgagtactacccactgtactcagcaagtcataccggaagaggaggtatgatgcaggatataaccaaaggaggctacggggttcatttgcataaagcaggcatttaaaaccagtagttgaaaacagtaaaaatagttatagtaattaagcaatattaaccagtcactgtccaacgctacgccacgttgcaacaggcctaaccaaccacctgaactacaccagttcattaagctaaactaggggtgagactaatcacggtgaatctggtcgaccgcccataaccgcgggcacggctattcgaatagttttactctgatcagaggagtacaactgtacccacaagacacagccccacgacacgttcccgtgcgccgacatgccaccacgacataccggaaagaggccgtgacaggacccttcgcataaccctctctaaccgatcgcaccacaccttagggttcgcccccgtccccagcaggcaacgggcagcccccctttcgtgccgcggtgaatccggaagccgatcaaccggacaccccggccgacccaactccatcacgcccaccctcgcctgggtacgtcggctagagaaaagctacactacaagcccagccgttgcccacgctggcttgtggtaagtacgataagttcttccagggcatcccgcgaaccggtccttaatcaccatgggcacgactagcaaaaccatgcacccacagcccaccatgtagtgtactttaattaaccaacaccattgcggtggcactaatccaaagctattaccaataatcaaagtctatgctttagtgtgatccccttttgtgcattagttgaactaagcatggctaagcatctcctaaaccaacatctagtcattttaatacccaagttatcaatggcgtaagggaaacaacatatagctgagtaataggacccatcccacatgatattgtaaaacaatgcaatatttaatagaaatgcgggacatttgtaaattgggtacaatatgatcaattgcaatgtatgacttgccttgctctcgcactgatggaaccacagcaacgtcttcgaaaaaccacgaatcgacgaaacgggcgaaatctacgcgacaaacaaagcacacaagcaaaacatgctataagactactgaaacaggaaacaaaaccatttttagtggattctatacatttttatgaatttactgagacttgaatggacttaatcggagctcggatgaattagttatgatttttagaagattatctatgtttttactaataaagaaaaagccttaatcaatttattgcgcaataattcatcccagggctgacgtcagcacaaggaggggtggcgccgacacgcgggacccgcgggttagtgactcaaggagagagaggggcggctggcaagcgggctccaccgagcggcggctcatggggaggaggagacgcccggtcggctcggctcggcctcaaaccggccgaccggttatggcgagggcggtggcgcgcatgcacggtcgccggcgacggcaaccggaggcgcgggaagcggcggcggatgacggcggcgcaaaggcggcggcacacagccgaagcggcggctcggcccggcacggcgctaggagggagaggaaggggaaaagagggggaggggcgcctcaccgcgagttggccggcgtggggggaagacgacggcgaacggcgacggcgagcgaccggggaacagcgacgataggcggacgagctccgagacctcctagggaacaagatgggagggattagagggagaggggtagttaacggcgagcggattcgccggtcgaaggcggcagccatgggggtactcatcggcgcgcgaggagaagcaagctccggcgacgggattgaccggggaaacggccggacgggtgggcacacaggcttaggagctcggcggtgtcgacggtctggtacggccacggctctagcggtggcggagtgcggccggagcttggcggcaagcggcggatggcgggatgagaggcgcgggagcgatggagagctcgggagggctcggccgagaaaggaaaaagagagaggaaggtgtgggcgtgcttaaataggaggggggggcggcgagtcgtggccgggaacgacgcaatttcgccggagtagtggaggaggtggaggaggagagagagagagaggcgggattcaaatttgaatcccggccatctcgcaggcgcgggggtgagcgggagtggggcgtgggcgcggggagggcggggcatgcgggagagtgggcgacgtggcccggggcggcagggagtgcggggcggttgggaggagggaggccgcccctccggctagaggttggggaaggtgctgacaggtgggccccacctgtcagcgcccgagggagaatgggggaggcgacctggacttcgggagggggcgggagagatgggccggcggcccaaaggaggaaaagaggggaaaaaggaaagataaaaaggaaaaaggattttcccagggatttaatattgcactttgcttattttaattggttaaaattatttccaaggctctgaaaattccactaaaaatcctgttagcatattttgacatgtagaatccaagaaaaattccacatgccgattccgattattatttgcattgatttaaaagggtttactcttgctttgcaccggtattttcttagggtcatttataaattaaatttaggcttgggaggagaacttcggggtgtgacacgggtcgtgctatggtttggggagggaggcgcggcgcatgcgcgcagttcgcggaggacgcggtgcggcgagcccacgcgcagcctcacggctcaccgcggaccatgcgcacggggggggggggggaacggagggagcggctggccgggtcagccgatccggtcgcggccgaggtggcgctgacgtggcgcttacgtggctgccacgtgggccggcgggaggtagacgacgacgtcggccggaacggacggcggacgacggcggcgagcggcggagcgaaccatggcgatacaggcgaaggcgagcacaccgggatgttgcacaggacgaggggagacgagccaacggctcggattcgccggagggagctcgacggcgccggattgcggcggcggcaaccggcgacgaggtcacgaggggccgattcccggcggcgagagcatctacgcagctacgggaacccattgctagcgtcggattgggcggagctacgccgagcgaggccggcgacgagcgggcgctacggagcatgggcggcgacagcggcgagcacacggtgagcgacggcagcagtcggggcggcgccggctagctacggggaggctacacatgctactacccgagtctaaggggaggagatggaacgaggagggagaacggagggatgcactaccgtgtgggacggggcgcagtgacaagaggccgacagcacgggagtgatctctccggccttgggccggggaagaggaagaaggcgagcgcccggagtccccttccgcgtccacgaacgcatcggctctcccggtgtttggcgatgaacgtcggaggcaagacagaggggcggcaatggcgcggtggcggcgagcgaaacgggaggaggaatcgatgggagggcgccttggtttataggacgacgatgtcggtttggaaaccgaccttgggcggtcaaggcgcgagctggcgctcggcgctcgcggccaaaacggcgacagaggcggatgacgccggcgggaaggggaaaaggaaaaaggaagggagaaagggagcttgctccttgccactttgggaaaaagaggagggagcgggggcgacgcggcagagggaggaggagctctgcctccgtcccttggaggctagcgcgtggagtggcgggggccgggtcgtgacgacgtctatgacggcgggggtggtgtggagcggagtggcgacacgggcggcaggcgcgggcagacgcggtagataatgacggcggcagcgaccaggcggttggccaccaaggcgcgcgcgcgcgggaagcaacgggaggcgcggcgattttggcggcgtcggcgggaagcggcagcgagggcggagggcgcttggctcagcgcggctcacttgcacgcgtgagcagcgcacgggcagagcgggggagagggagagagagagagagagatgggagggagggggagatgggccgagagggattcggcccatcgagggaggccaaatagacttttgcggagggatttgatttgggaagaatttggattcgggattgaactcgacaatagatcggggatttgagatctgagatggcacggacactagacaacaagcaaagaaacggatttcgcaaatagggttttcaagagatagttttcccgctaggcgccacgacggaacgggcgctacatctcagtgtgttgccgctggatcatcgtcgtcgtctctccctctccgatcgttttggtccagtgagacgtctatccgtgtctctttggtttagatttcaacccatcggccacgcttgccaagccgctttgtcgcagccgcagccgtgcctgttgcgttgttcctcgccgcgctgctgctctagcccgtgcaccgtcgctaccggttgtgtcgtcgtttctgtgccgtcgccctaaccctagccgcgtgtctctgtcgagccgccgccgccgcctagccgagccaagtcaccctagtgccgccgtgtcgcagcagtgtgccgctttaacctagccgccgctttagccgttgctcggtagccaagttgtctagccgtaggtgcatccctaggtttctaccggcctatcgtttgcagtaccggggctttaccgtgaatcgtttgagcatgttgatcctatatttaaattctctatttatttcaactatgcatttatttttggaatgtcaccgggtggtgtgaaccaattccttttgttatgaccactttgcattgcttactctattctttgataccttaggtaacaatttgactagtgggacttatatattggttcagctagatattagatataattgcttagccatgcttacaaacattagcacatgattgggataactaatgtttcactatcacttaatgatggatatttaatgatagctcacgatggtttatcgtgattggttaattaattaatgtgccaactaaaacttgataatggtgggttgtgagcacatggttttgatggtagtgctcatgacaattaaggaccggttcacgattttcggttgtgaaacattaaccgtgccaaccacaagccagcatgggcaacagctttaccttttgcatagcatgattcattgcggggcaccagactgagaagtggcggagataagcccacaggggtcgttggggagtccatgccttgttttataagggggtgattatgatccaggaatggtgcgctatggtggattgtgttgtgcgaggggtactgtcacagctcctttccgaggtaccatggtggtatcgaggcgcatggtgacatgttgtggcactgtgtcttgtgggtacagtggtacacctctggccagagtaaaactattcgaatagccgtgcccacggttatgggcgggtctaacaatgtctttcgtgattagtctcacacttctcaccataataaatgatgctataactggtaataacctgcttagctcctggtttggaatgctaaattcctggtttggagatagatctgtacagccgggtatggttgttcaggatggttgggcctgtgcagcatg

SEQ ID NO: 23128 - DNA, 21835 bp, Oryza sativa
  unsure (1)..(21835): unsure at all n locations
gtggtgattcgctaaaaatactatgaccattagttcaatatttcatgagagaaaatttagaatgtgtgcctttaccccaaaccacgttacatgcacttatattttcatcccaaattgcaaagatgaaatcatttcaaggatgattcatagaatgaaaatatcaaaaaaagaataaataaaatggacatgaaacaaattgaatattaatagatgttgctggatttaaaacccattcaaaatagaaaaattcaaacattttacgaagactgttagaatgaaaaaaatataaaaaaataaatacaataaaaatgatattattggatttctttgttggttgtaagatactccctccatttcgaaatataggacacaatacttttcaaagttgtttcataatataagacgtgcatgcatgcatgcaattaattagcatctcatctcccctaaattattactttttaaaaacttacacttacaagatctttaattatgccggttgcatgtattttattagttggggtgattaacaagaaagatgataataattaattgtttcttggtcattgggttaaggatgattatgcgttatattttgcaatggtgggagtatccttctggggagttaaaattcctaaattttctcataggaaccacctccattgttttgatccattttttctcgtcaattcaaaaccgcatgatctcaactaaattttattttagaacttatatgttcaatgttcaaagcacacaaataagtttaattttttattagaatataacaaaagttattttactaaaaagtcacccgcacataaatattcataataaaattttactcacatttatataagaaggtgcccgcatatctgcgcgggctacattactagttggcaaaaatgatagttcagaggtactccaaaacataggagtattgtgcttcacttaagtaagaagaagagaaactgttcatcaaccaaagtgatccaaattaaaggacccctccgaaaacaaaaaaaaacaaaaagaatcatgaaacgtgacacgcgaccgaaacaccccttaggattaacaggctgtccaaggggagcagcccagaccgaaattcacgaagtgtcttagctacagcaatacaccaaagagaactctttctagccaccgtatgcaaaacagcctgcttaggcaggcacaattgaagaaatgatcattgtggtactttcatatttcccgagccactaaaataattgtttcaatccagataggggtgatgtcctgaacttcacgacatacgatcacaaatcgataactagcctcaatgagatcaagataagcttcaagcaatcaaaggtaacaatgcaacctgacaaccgtagttgccacttcttcaatctcatggggaaatcagaaaagcaaggcggtagagatctctctttgaatttgttagcacacagctaaacataagagttcatattctcattgtcaaaattcttctaatttttatagcatgaggggtattgtaacacccaggtaaccacgtacctagagtgccacaccaaaaaacactcaaaccactaacttccaaaattattagaaatttcggcaaagtctcccctataaatacggacatccacgacagacaattataagttaaactaataacaatattattcccagaattcgatccattcttataattcatggggaagaaactattataaatctaaaagattattacaagaccaaactaggatataatttaagtgtcattatagacctaagctatatagtttgatagtgtgcaagtagatgtgtatataagggtgctacttcccgcccatgcatgtcggtctcaatgcatacgtaaaactaaataaaatacaagagtgagtataaaaatactcagcaagtacaatgtggaactagaaaacacatatacacatcattgacaataaagtatgaacagaaggctttctttgtttgataggaaacacatttccaaacaccaagtcaaagaagatagtagttcccatctcgggcaggcatgaattgaaatagtaatttccatcccagacaatagtgaatacatcctagcatttaccggcatagccgagtaagcgtgatcagcgcttacccataggaacttgaataaagaaccaaattgcactcccatgactacgcatggtacttgaataattgaaaccggaatcaaagaaccaaattgaaacacatccatggcaagcaaggaacttaaattatttaagcagaaccagaatccagaatattaaaacaagaataacatcgtacacataagatcaacttgaaatctaaatggcgtgaacaataatatgaacataagcagttacttatcacgttgaaatatatcagaaataaatagatagagtaaacaatccatgaatcacacaattagttcgtcatgcacttgcctccaacgaaggattggtatcatgcatgatctgatggaccaccacctaatcacaaacaaaaccttagcaaacacattcaaacatgcatataaaacaatgaaaaaggtgaacctactgccccatcccatcaaaactcaataacaaggaacgccgcttggactatacacaagactgttgcttcaaacctttatatcttggaatgtgaaaaggctatgactgaaaatgtgtacattttgaaaatctacagaacaatacctacaacttttatgtagaaagcatatttttattctgccatttaaatagtctaatttgtgcttgaaagcaggctttagaatctgtccagaatttcagactgtccacactaaaacaatcataactggagttctactcgcccaatcagggtgtactttacaatatggaaagctaagaaaacctctacaactttgtctataggcggcctagctgattccactgtgtaacccctccaaaaacagttcaatctactactatccagattatgacacaaaaacaatagtcatactaaaaaaattatatctcctaaaccacttgagataaaatcgcgccctttggtcagaagatatatccaaacattatctacaacttcctagttatatacttagaaaataacatttagagccccgaaacatcaaaacactgaagcactgcaaatctgcccgcatgcataactgcaacgaaccgaaccgcaactactcaaactccttctctagccttccctaaccacgaattaatgcactaaagtcatgctagaacaactgatacaacaaggggataagcctcacctagggtttctttagagaacttctgaggagacaataggggagactccggtctaactcctccttgtactcctctcctcctcctcgttccatttttctacttcgcttcttaatccaagctatgaagatggagatctagagagagcaatttgctgtagatgggagagatgcgaacacaggaggaggggaggaaggaggcaccagccagggagagggatggcggcactatgaggggaggtgggattcggttcccctctctttaggtttttggggagaactagtgggctgggtttatggaccttctcatgttggcccacttctaaagatatttttcttttatttatttctgttaacatctttattttaacaagtcaacccaaactaaaaaaacctaaatatcttttaatatacggggtattacaggtatttatactaggaacatccgtccaaattagatgtgaaatggctgttgagctttggagtaaattggcaagatgaaaggtctccaaaaatcattcgtgagctagtccgctatgccttttcagcttccgtgcaatctccgctgcaataaacattactctgtctttcgaagttgaaacgacgagatgtttaataagtttgaaactagacttgataagatttccaaccatgtttatcatgcatggtaaaacgagactggcttgatcgcacatctcttggaagttgaaccaattgtgtgtaattggtctattcgttagtgtgaaccatctcgacttgagcaatgaccgcttcattttctatgcaattcatgccatactttatatagtcattcgttgttgtagcagtgaaatgatcgtcggacataaaccttaaaagtagaaatgtacactaaagttaatttcagcaagaaacgagttaaccttttgtcttattttattgaatgatgttcggcactcaatccttggctggcacaatctcatggagatgaagtcacaacatggcttagcgtagttggtgcttgatatgctggcactagtccaattgatggtttcacgtttagatgatagcaagtgtaatgcattgttactttgccttggtgtagtggtggtattggtagagtaaacaatgtcatgacccaaggtcatggacaagattggggatagacggggaaaacacccttttcccgcctatcctgagaaatgagcctgaatacaaaatgaacacacactttgactgacaagatttttgtattccaatatgtcatgtctgctacaggctttttgtctgctttatatagttcatagctatacatataagattacaattgtgcccctcattgggcccatgtaagattacaattatgcccctgccatacgagcaatcctgagggcattttagtacatttcaggggtcattatagtcttttggtgccagttagaaggagtggttgagtggccccccgggaatattctcttggcatctttattgctcaaattgccttcttcatgaccaagagctttttccaccaccaagggtcttttccacgaccaagagtcttttccacggaaagtagtcttttccatctcgaccatcctttccggcttacctggtggctgacctgtcattaactcaagaaatactcaaaaatggatgatttagcttaatggaaggaacttgctcaaatagtattttccgactcgaatggtgttttccaactcgaacgacattttaccgtttccctgtttgaataaccctttaccactcggatacttagaataaaatctcaatcttacccagtcttttcctctacaatgttttgggccgaatatggaggggcggtggtgaccccctgctacaacaagcccctcacgggtaagggcaatgtgtgttttcggccgaaaccgtgttcgaatcaaaagctgggggagaaccgccgtcctcctattcggtcgaaaaacactaggatagaaaattttgaagttcgaaggtggttactcttgtcagtcattatgcatttatttgtttattattatatatttttatttattatatgtatatatcttttgtatataagtatgcacatttattatgatgcttgtatgtgtgccacatgtcaactttgtactggatgattggaaagagaagtgccgcttcggggttcgcgcccactcatggccacgaccccccaccccctagacctatataaggtctgtgagggtcgctttctaccggctactgttctgtcctccaccaactcgaatccttgtctttgctcgaaaacacccttttcgctcgaagacacccttttctctcgactactttcttttctccgtgatggggaaagataagcagaaaacaaccaagaagggaaagtcaaaaaaggtcgaaaaatccgagaaaagtggtattgtcttgggtggccatcaaagacaagcatttaaatcaacttgttcaaaatggagttatttcgaactggaaatctctggttcgacctgtcggcgaatcggatccttctcctaaacctttagatttccatgcagctcctttttgatcgatgttttgaagattttcaaacacgagttcccacaactcacccctaacgcgcttgtgcacgtgggtatattcgaatggatgattcgcagctgtggcgggaaccctcatgccgaggattttgcatatttccacagcatccgctgttataacaagcaaaactccaagtttggttgcctcaacttctcctctcattcgaagcatggatgtccttggccaaccatgcccggtattcgaactaaatgggggaacaaatggtagtctacgtggttttatcatcagatccctgccgacctgcttactgacaaagagtgtccccttcactttctcttgcaaaaccactaaggttgtagccgaaccatcagcaggcctaacggcagattttcttgctattcattctcgaggtgaagaacttgtttcgaaatttagtgctcgaggcttggttgaagaatttgtttgtcttggtatccaaccgctcacggccggatggaatatttctctagggcagatgctgagcgaagctacttcgactttgcctccctttgaggttgatttgaacagtaagttttcttcttctttctttttttttgttaacacatttatgtcatttattaagttcgaacaattttgttcgagtactttgtacttatgtatgccttttgttttctatagttgttatccctgcaaacattgtccgcccctgccaaacatatcttggtccttataccaaagatgagcacgcgaagtaccaaaccttgcaaaatggttcaaggatgaacagagtgatgtctgcccttggactcgagatccctgctcgagttcatcctgagattgttcttgactcgggcaagaaaaagaagaaaaagaagaaggctacgaggaaatcgtcctctgatgaagacgatgttgaagttgaagaaaacaaagaaaatacagataatgaaggtaatgatgggaacgaagagctcgggagaatgaagaaaatgaggggaatgaatctggcgaagacagctcgagcagtgatggtgactcaagtgacagctcgagcagtttttgatccatgttttgaagattttcaaactcgagtgacagtctgtcggatgttccaattggtgttggtcaacatggtttaggcattggagctggtgtcccccaagatggtgtcgctcaagattttgcttcattgaatgaatggatcacgctatctgccttaagcaccaagggactaccgtaaaaatttttttcactttttcactgaccctctcttttatctacaattttgccctttttttttctttttatttgtatctaacttgaaatctaacttgttcctctctttgtttcattntgtctcagtttccaacaagcttaaaatatattattgagaagcacagtaccatgtggcaggatgagtttgtttcagcatatgacaacttcaagagggacatgattgatttgcatgcaaaaagaacatgtgatatgatttctgacataagcaaggtgctagctgatagcaacactgcagtgtgcatttccgaggctgtttcaaacccaccaagcactgaggggggcagctgaggccgtttcaaaaccatcaaacactgagggggcagctgaggctacagatgttgatggaccaagcaaggaagcttcaggtggttatgtgccaagcagcccagctgttgatgattatattttggcttaccgctctgatatctcaaatctagattatgcatgtgatgcaccgtcattcagcctcttcaatgaatctgatcctgaattcattagaactcaggacttggctgctgagatgctctccttgcgtgttttaaatgttcctcagtcggcaatggatgcaaggacaccttctccatcacctcagtcacctgtttctgcaaggatacccactgcaaagacaccttctccagcccccccttcacccactgcaacaaaaacatgaacttcagtagtactctctctagcagcagtaagggaaacatccccagctacatcttcaccgccacgtgctaagggctcgccacctctaggtaaaatcaccacttttttgttccttctctccctctcacatttttttcggtgtggttaaagtaactatgaacaacactcctccccctccctaatgttttttcctctatagtaggtactggtagtagtggtccaagcatgcatgagaagaaaaataggaagaaaatggcgcggaaaggtgattgtgatgtagagacgaagaagttgaagatttgtcattgattatgtgccaaacaggtcaaggaaggtagatgccaaagagttgtaagtgttttcacacttttctttttgcgcaaaatatgtttcaacctttttattattaatatgtttcagtgtagtttcccctgttgtttcatcagtcactatgacatatctcactaaacgcaacacatttgtttcagaacagctttatctgaattttttcccaaccttttttttttggaaaaacaggccaactccattcttaaggattggaggattccatgtctcacttgagtatttccgtgaagcaatgaaacctagaggagagttgaacaacgaagttacgtcgtgttggattgagatgttcaatgcaaactgcagggaagattctaagatgaaatcaagcataaaaaattttgttttcccccctggcttgacggtaacatgttttaaccaccccctcccttttattacatctgttttgtttttgttttttttgcttttaattcacttgttccctttttttcctaggataaattgatttgcaattccgagaagtttgtgtctgaaagctgtgtaaaatgggtgaaatcaatcaacaaggagcaaaaacttcctaaactagatctggtactagttctcccatccctctgatttttttcatgttttggttagtctgctgatatatttcacaacataccaatacagtgtttcagctatttttaactctatgttccaatgatcatttatttgtttcaatagttagtttcaccatattctaacatattgtttcatccataactgttccttgttccagttctcatttaacataagttactttttttttgcctcccaccccatcaagttgttcttcccaattgtacgtgacaagcattgggtgctgacttgcatcaaccttttgtgggaacaaataaattactttgattcaatcaagaggggtgatatttctcagtggttcatactgtctcagaacctggtaagatgttcacgggaacaccatgtgttccattataatttttttattgtttcattgagttttaagttcttttttttcccaatgccgatgtgccgtgcaggtcacaaatttcaccaaggttgcagtggatgctaaaattccaatcaaagatatatcaaagtttcaaacttgctctcctccacagtatccagtacaaagcaatttgtatgttttatttacaaatttttgtttcttttttctttttttttgtgcacaagtgtgtcattttaatttatcacttgcttttccatgcactaggtttgattgcggtttcttcagcttgagatacattgagaattgggatgggaaaaacctgcaatcattcaatgaaggggacatgcctaactaccaaaaattcatgacacacatgatggtttcttcgcatctggctaaagttgaccatgatcaacttcaagcaaattagtgttgggggcagttgtgtcactgaagttgtgctttttctgttcttttgttaggattgaatttgtgcactgaagtatgctgtgtttttctgttttttgtttgtgcactgatgttacgctatcaagttgaactactactctttatataatgttgcatctactgtgagatatttgtttcagcctgttctgaatgattgttcatattcaaatgttctttttcagagtaaaacaatgtttcaccttctagtacttatatgttcagcttgttatcaatgattgtttcatagttctagatgttctgtttcataagaagcaatgtttcacttactgttacataattgttatagcctgttcttaatgttgtttgacagctccacatgttttgttccataaaagcaaatgtttcacctactgttatacagttgtctcaccctacacttcatgaatgtttcacaagctctacatattctttttccactgtaatcagtagtgcagagatgtaattttcttttttggcattcccttcgttccactaaacaatcattcacataaatcataagaaagactcatttcacataatcatccaacattctacccatatgtgaattaaaagaaaatatgtctattgcatctcacaacataatgtgtttcacctaacacaagatagtttcatattgtaatatggcaattaccactatattttctaaaagtatagtgcatcgcatctaaatctacagctcctggaactcttttctcagattgtcaactccgtctcttgcaccattttttggtttagtagagcgtctcgcatgttcgctatcttgagatactggcatattgaaacattgtgtgtctcatcaaagcaatatgagcatgagctcttcttttttgtcctcctcttcttgctgctttcagttatttgttcccctattggcttcatcctgtgagttttttctgctggcctccctgttcttttctttgttggtggattcttagctgaacttgatggggcttgttgactaggcaaaataccttgctgatgttgtgtctcaacagtgtgtggtgttgcaaccattgtttgtaggttctgaatcccagccgaaacaatcaagtatttttcctcattaatacatgcatctgaagcaaggcttgtcgtcgccctgcataacgcgttgaaccttagcttgcttgttgccaggactccaattgatggtgctggaccattgtactcatcacatttttgcaatgtcgcttgctctgaccaccgtttcagcaagtacttactcggtatctcatggatgttaaggacagccatcaccctcaagatgtgtgagcaaagaagtccatctctttcaaatttgtggcacgagcaggagtatgttgagtgtgttgcatcaaatgtgaccatatattttttacctgttctttctctgtcacttggcataacattatacatgatgttgggtacttcttgtgttttttctgcatccagccctgttgcttcatatatttcatactggaatttgtctgcaaacatacttgtagtgtaaaactgcgatgcttgtttctcaatcagtgacctgcataattcaatgtttcaacccattaatgtcaattgttccacacttgcacagtttatgttgcacagtatagatattatttgtttcatcaatttttcgaattacaaacagaaagcacatctttttcaaattgtttcaagacagcagatcacattaccttgaatacattctaggttctgttgtctctgctctgtagccctccctgtcctctctgtcaagccttgtctcaattatgtgctcatattttttgacaaagatccacaccgaatcttgcgggtgtacaaataatttgaatagctgtaacagccctaaaatttgacaactttttaaaaccgatttagtttgctttgattctctaaaaatataaccgtcgagttagacatttatttaaaattttattttccaagtttgtttccggtgtttcttttctcgtttaattttttgtcacaaagtgcatatcatccctcaaacaattcctttgaatccgatttaattctatcccgaatgtcggactgtctaaattccacaccaattcaaatcctatctattttaatcttccccacatttttcttttctctatttccaccctaattttccttttctatatttttttcctttctctgtttttcttccccctccttccctttctctgttttttctctttcttcttcctctctctgtttttccttttctttctttctctacttggctagaccaacccaggccgagccagcgcccgtgttgccttgcgccgatccctcaccatgctcgcgccaagctcgtgccgacccgcgcacgccacacgcccgcacgtgcgcacacgaggacgaacgacgaacgaatgcctggacgacacctccagcttcccgcttccgtaactccttcgttcctcaactagaaggctgaagaatggaggcgaaagaaccgcaatttcgacctctttcaccttctcaagtctgcccctactccaactaactcaatcgtcgtcagcggaggaaaattcccagaaaccctaataccggcaccattgattgaacttcaaaattcgtcgcatacatcgtcaatcctctgaaatcgaaggtaaaatcggattctccatgccgagtactcccattcccctctctttacccatccaatccatcgctggaacgttgccggcaccgcctcccggcgtcgctgctctgttcggccgccgccagccgcatggcgcgccgccgctccagggcgccctagctttggccgtcgccaccctgggactcctctcgcctcagtgaacctcatcaagccaccgccctccccggagttcgccggagtcgccgccgccatggccgcctccacctcctattactgcctgccgccgccagcctcgccaccggtgcttctctcgctgccgaccacaaaaacggaatcgcctcgacctctagatcacaaaaccggtgcccccttaccgaaaaccggcctcctcggctgccagcaatgtgggattccggccagttcctgtgcagagaacgagaagaacagaaaatctgattttcctgttgaaaaataaatcagaaaataccctttttcttttcctatcaagttgaccatccgtttgacctcaaaatcgaaattcaagacctattccaaactcctagaattattccgaatccatccgtgtcagttttgttgcaatccgagcacccgttgtagcaaccctaattttagccatagggttcgccgttcaccgaaattccaaaaatccctaaaattatttccttaaatcctttccacccattgttgcactttgtgatactatttgttttggttatctttgtttttctattatttattgtagtgatgattgttgcgtaaatagaaaacgctgacgttggttcggtagtcgaagcgagtgaaatctccgcgccaggaggagacggtttgtacgactacatcgaacccgaggttgcaagacatgcaccctcctttgaacaatttaatcctagtagatagggagctattttagtagtgtacttgtcctttggagtacgatagattgagcgaattcttttaaattaattatattgctattattgcattatattttatgttgttatggacgccttaatgagccttagagtctaaccaacttaggataaaatttgagaaacatttaaacaaactgttaattatttaacatgctatctatttaatatggatattattactgcatatgaaaacatgcttatggaactatttatggctatatgctaagaactgttgacaccgcttgtgagcgggtggtacacatgatagagttcatgtgtttggtttcatggacctgtttatggtcgtgatggatatgtggatatatttatggttatttcttatttaaaattgatataataatcaacccccttgtgtcaataagaatgacatagtttcgcccatccacacgatcgatttgtcaaacctagccgtatattgctccaattgattgaacttctacaggcctttcggtgtactggccattagctttcaagtgtgtgaagcaaagtgacatggttcatgtttatatgatttatatatgtgggctcgatgggccccgagagttcaaaactaccctatgggtccacgaagttctgggctgcccatcgagtaacgaacaatggtaagtggatgcggaggtaggttggcacacacctcggaccggatcactccgagcaacatcccgagcatcctttaacttactaggcagaagggagagatatatgtagcaatattacaccttgttacttttcagcccggccagctgtgggtatcatgtgggtcaagctgcgcagacgctacagagtcgttgagtattcaaatatgccgtgctcccggttaatggagatgtgtctatgggtgattccagattatgggcacaagttaaactaaatggctattaattaatatagttaacttatttatattactttatgttctattcaagttatttataagtaacatttatacttttatgctcattattattgtttaaattaaatgttcaatagtgttgtttatatcaaatgtttattaagttaggctctatgaaataactgttaaggttagggtttaaaccttccagctctcgatactgcaagttttatattgcaattattgtatttattatcataagcatgtcttgctgagtaccttttgtactcataaatgggatcagatcatgaggaggaagatgcttgtggagaacctgttgatctgttagagtgggacagctatggtttctaggtcatcatatgcttaggcagttcctgtggtgaagtctagcagtttatttgtttgtagaaataaagctttataggccatatatgtaatggtttgtatttatgtgtgttgtgaactaagtgacttaagtattgtataatcgaaggttatgcttttatatcatttcatgcgtaactgaacatcctgggcagttacttattcgtggggcaccatgactttatcgggtgtccccacaatagcccttttagaccttccgatctccctgtcatccaagtaaaagggaaaaaacttgtgttaaagtataccggagcccacatttcttttgcttcccacaagttattcaaagtttggtttccatggaggtcatattcatctagcatttttttcaaatatgatagaagctgatctattgtttcaatcatatatgcatctacacagagcttcaaggaagcctttctttgaagtatacacgggtaggagttgctgatctgcttttgttgtcacgtgccaaaagcaacatctatgaattgtaccggggaacacctttttaatcattgctctcattgctttatctcggtctatcatcactgaacctgacatctgtccattcattgctcgcatccatgtttcaaagacccatatgaatgtttcagttgtttcatcacaaatcaaagcatatccaagcaatattgtttgcaggtggttattaattccaacaatgggtgcaaatggcatgttgtaacggttagtcataaaggttgtgtcaaagaagacacagtctttatagctttgatacagttttcgtgttctgccatccacctgttaacaaccaaatttggtaacatctgtgtcaggaaagaaggttggatcaaagcaaagttagaggcagagatcaagttcggaaatagagcaggaatcggctggagtccagatcggctatgattagaatcggctaggtctgagtcgggctgagtaagccgatacagctgattccgacaatacgacttgtacgcgacatcgggttcaagttaatgtacttcaagatgattgccacgcacggatagagtcctgggaaggcaattgtatctattaattaggatatttttatgtaaattccttatagataaatgtgggcaaaagtctgtcgcaaagacttatggtatcttagagtttgttagagataatagtcgtgtccggtgtgggcatatcttgtaattctcgggtataaatagaccccgagccctatgtaattaacaacacacacgttcaatacaacttcagcgcatcgccactcttttgctttagttttgtttcgacaagttcttgctttcgggttgagctgcatcggtttcgatattcaacaagaggtaaaacttgttatgacggattgtgttctcaagattagtgtttccatctttatgatactctaatctcgtttatgtaattcgtcgagttatcatatatcttacataatcttgggcaatattgatatctaacctactatcggctaacatctgttagcagagggcaaccgattaggttagattttgacgttgatctagattatataagatatctaccaccctatgaaatttctagcggcttgattgtctagatatcgtttttcttttcatacttaatgttgtatcatttaagtttgatctatcaagtcgtgcttagaatatcgatctctagcctgccttctagttgccgattagaatagcatcggagtttcagccgatcttatctgatttaactacatttgttctatatgcttcattgacatgttaaactgtcctttatatcaagatattgctatatctaagcatgttaggcctttgtttgacatattatacttaccttaatatcctgatatagagtagtatcggagtattagccgatacacgctagatctatctgatcggctatgctataaacatatatagtcctgttattgatatatatttcaatctaagtgatttatactgtctcggcatggtgaccgatctatcccaatcacttggtttaagtatatatccatataaggagtatatatcgttaatgtccacagccgatcgagtagatttagttcttctttacttattcatgaccgccgatcgatacacaggtaacatcggctcaaagataaatgatatgtcatcggcatctagccaatcggctatcatttatagatttaaccacggtttctttgcttgtatttcttaatgattacaggatcaaatcaactggcacgctaacatacctgaaggcaagctttggacctgcactggagttaagcagatctcccaggccacgtgttttctgtcaacacgcttttggcacgcccggtgggacctgtaagaagtcagacgtcagttcttcctcatggccgagaaacaaccaccaccatctagcccaggttccgttaatggcaaggtgttgggattgactgacatcattgaagaaaacgtcatgccgattgatccagagaagttcacgcctgagcagaaggaagagtttgaagcaacgttgcagcatgcatgggatcagttcctgaactcattcatgcagacccgcaaggggacacttgtttagaagtataaaataaaagtggttcctgatagtcctgggaccggttcttctaaagatggagaagtgaaacaagctcctggcggctcagctcagccgagttctaaaggtgttaccgacggctctccgagcgatcaaggcgacaattctcaaggagttcatggcgttcaaggtgatggtgctcaggagccacaaggaggaaatcttaatcagaatagtgaagtagcacaagattttttcaataacttccaagatcgggttgattatgctgtgcatcatgctttgatcatcaggcaatagccgggttgatcatcagtccagggtattagtcaataccttgtcaaacatgatgaagacaatagccgatggttcgatagctgagcatcaggctgctggcccagttggtgtcttcccaaattatcgatctttgatcaccgatgtttagccatctgttcaagcagttccctctattgcacccacaactcagccgacggcgccagcgtcgagtcctttacctgctacactagctatgacgccgggacagccggtgaaccctcggttgttaacaagggaatagccacagcatggcgggcaggctgcgaatcggctaactcaagatcaagttgctgccatgtttctgccacctccacctgttgtcgatccagtacagcaacagccgattcagcaggcacccccaatccagccggttgtacaaccaatccaacaacaggtcgtacaaccagctcagcaaacaccaccaaggcagcagcctctgcaaccgattcagcatacaccaccaaggcagcagcccctgcagccgatccaacagactccgttgaggcagcagatcgttcagccgatttagcacccggggtcagtaaatgcatcggccgggttagcagtacctggtggtcagcctgtacagcagtttgtaaatcaggtcatcccagagcatttggttcaccatgcacagccggatggcacagtgatgcctcagatgattcctgagcacttggtgcgcaatatccagccaaatcttcataattaccaagggggtaacttgagttatcaatatcagcctccttccccgcaagcccaatatcagccagggggatcggctcagccccagttcgcatctcagtatggtcagtttgagcccatgcaacaacagccacaaggagcagctcagcaacgaccgtgggccgatgtgattgccgatgtaatgagagaacagtttgggcttaatccaaaagagactggaagcttgtatcgacagccttatcctgagtggtttgaaagagtccctcttcccaatcggtttaaagttccagatttctccaagttttcgggacaagacggcgtgtcgacttatgagcacatcagccgattccttgctcagtgtggtgaagcatcggctatagacgctctaaaagttaggttattccggttatctctgtctggatcagcttttacttggttttcctccttgccatatgggtcgatcaatagttgggccgatttggagaagcaattccacagctatttctacagtgaggtttatgagatgaagttgtccgacttgacggcgattaagtagtggcatgatgaacccgtgcacgagtatattcagaggttcagggagatgaggaacaaatgctttagcttgagtttgactgatgctcagttagccgatttggccttccagggtatgattcctcctatcagggagaaattctcgtccgaagactttgatagcttatcgcatctgatacagaaggtaaccttgcatgagcataggtcggggaagtcaggaaaagctttaagaaagttaatcatgtttgtccatacatgtatgggtcggatgacgaagaagatgattctgaaatagctgcagccgaatgggtgaggagcaagaaggtcataccatgccaatgggtaaaaagtcctggaaaagaggaaaagtatgactttgacattaccaaagctgacaagatctttgatttactactccaagaaaagcaaattcagcttcctgctggtcatacaatcccatcgcctgaggaattaggcaagaagggatattgcaaatggcattattctggatctcattctactaacgattgcaaggtttttagacagcaaattcaggttgccattgaggggggcaagattaggtttgatgattccaaaaagctgacgaaggtcgatagtaagctggtcaagcagccgatggggtccgtgcaaagggttttcaagtaaattcggctaagattatcaacaaatatcagagaaagtatgacaagcagcaggagaagcattacaaaaaatacgatgatggtttcgatcctcattggggttgcgagttctttagattctgctggaatgaagggatgaggttgctatctatcgaaaattgccctaggtgcagtgaaatcatcgagagctcgagccggccatatagtaggggcaatcggccgaggcaggcgagactttctgttcatcaaagactgggttcggtgaatcaggatcgtggccaagaagatgaggcaatcaggaagaatcaatggtgtccttctggtattttcacaaaaaatcagaagagaagggtccaaagattgaggaacagggagcgcctttaggaggttgaacaagaaatcaatcatcggctgcggaaacaaaaacaagacaggagtggcatgttaagaatctggttcctgtagctgatgatgctgcagccgatgaggcgaagaggttggcaaaaggaaagagtgttgtagcggcaccaattaacatggtctttacattgccagctgaattcgggatagatcaggccgatgtcgatgaagtggaagaggaatcggctaagttgnnnnnnnnnnnnnnnnnnnnnnnnnnngataaacacgaggggacagagaatcggcatcttaaaccattgtatataaacggctatgtcaatgggaagccgatgtctaagatgatggtcgatggtggggtcgcggtaaatttgatgccttatgctacgttcaggaagttgggtaggaacgccgaggatctcatcaagacaaatatggtgctcaaagactttggtggtaatccatcggaaaccaaaggtgttctgaatgtggagctaacagtcggcagtaagactattcctaccacgttttttgtcatcgatgggaagggttcgtacagcttgttgcttggaagggattgaattcacgccaattgttgcattccttcgactatgaatcaatgcttgattcaatggcaaggcgacaagatagagattgtgccagccgatagatcagttaatgttgccagtgccgatttagccctttgggagatggatggccttgattgtttatctggaaaagtctgggatggagattttttaaaagtgtccgattctgatatacagccaattgaagatggagaacccaagctattactttaagggcgtcgtggagggttcaaatgtctacgccaaagatacggtagatgatctcgatgacaagcaaggtcaaggtttcatgtcggccgatgagttggaagaaatagacataggtccaggtgatcggccaaggccgacatttattagcaagaatttgtctccagagtttagaaccaagctgatagagttcttaaaagagtttagagattgcttcgcttgggagtattatgagatgcctggactcagccgatcgattgtcgaacatcggctacctatcaagccaggggttagaccacgccagcaacctccgagaagatgtaaagccaatatgctcgaacctgttaaagctgagatcaaacgattgtatgatgctggttttattcgtccctgccgatatgctgaatgggtttctaggatagttccagttattaaaaagaatggcaaggtcagggtgtgcattgattttcgagatctgaataaagctacaccaaaggacgaatatccaatgccagtagccgatcaattggtcgatgctgcgtcggggaacaaaattttgagttttatggatgggaacgcaggatataatcagatctttatggctggggaggatatccataagacagcttttggatgccctggtgcaaccggcatgtttgaatgggtcgtcatgactttcggcttgaagagtgctggagcaacgtatcaaatggccatgaattatatatatcatgatttaatcggctggttggttgaagtttatattgacgatgtggttgtcaaatctaaagaagtggaggaccacatagccgatttaaggaaagttttcgagagaaccagaaaatatggcttgaatatgaatccgacaaaatctacttttggtgtgtcggctggccagtttttggaatatcttgttcatgaaagggggatctaggtaattcaaaggagcgttaatgcgaacaagaagattcagcccccggaaaataagacagagctaaaagagatgatcggcaagataaattttgttaaaaggtttatttctcatttgtttggaaggttggaaccttttacacctttattgaagttgaaagccgatcagcaatttacttggggggcagagcagcaaaaggctttggataatattaaggagtatctcagctctcctcctgttttgattcctccacagaaaggaataccgtttaggttatatttatcggctggtgagaagtcaatcggctcggttttgattcaagagttggaagggaaggaacaagttgtattttatcttagtcgacggctcttggatgctgagactcggtattcccctgtggaaaagttatgcttgtgcctgtatttttcgtgtataaggttgaggcattatctattatctaatgagtgcactcttatatgcaaagccgacgtagtcaggtatatgctatcggctccaat

SEQ ID NO: 23129 - DNA, 9734 bp, Oryza sativa
taaaactagggggacacatatatatcaaaatgcaatgaaaaattgttgatcaaaatgcaatgcaaaatttttgagcaaatttcaaagtcatattaatcggcacaaaggattgttaagacagtacagtattagaatgtcttagctgattacaaaagtttctaagtcctattacataaagattattgagataagtatcgctggatagccgatatggccttctgcctaatctgttctacttcctctatggcttgggcatcttgagcgtcggttctagggataactttcagagacttggtcagatcagcaacatgcttgatagccgatttgagtcttgctttctgttcttcaatagactttgggagatcagctaactttgtgtgctccatatccagctcagcattgcattcttcgagttgtgctaacaggtcaatcttgcgagcctcgagccgatcaatgttagacttgattgggccttcagatagttgatcaagcttggacttctcttcatgtacgagttgtcagttagcttggatagtggcctcaatgtccttgcgttctcgccgttcggccaatcttaacctggctttctccagtttgaattgatgttgctcaagataaacggctagagtaaggatgtcggctaactcatctgggattagagcctgaatctcatgtagccgagctctgattgagccacaatcaaccaccaagctatctagtgatgatgcttctagccaatccaagatacttcctagagttttcttcacatcatcagataaaggggctaaggctttgcttgtggtgtcttcttctccttcatcaaggtagtctccgatgtcgaaagagaaaagatcagctaagacctgcaacaatgatttagaagcagttagaggttaaacgggcatagccgatctgcgtgtctgttgtcaagggagaacttactgggatagcaggaacagctggttgaatttcttcctctatatggtgactccctacagctgatggagtctggtcactagatgattgatgttcagagggaggaggaggctaaaaagaaacaagtgttagaccgaatcgactggaaattaactaatgaaggttaaaactatcttactggtggagctggtttagatattgtcgcagtcgatttcttcttcaccgcagtcttctttttatgcaattataaaacttgggagtgatcggctataagacaaaataattatgaaagggattaaagaaagttgcctactcttgaaaagtggtccggagcagaaggtgttggaggggtttgcttgggcgaagtagatggtgttctttcagtatctcttacttcggctgcagcctgatcaacttcgtcttatattatctcttcatccagagcttgttcaatggaaggatctagggtaggcaggtcatcggctggcttggttttctttgtcttcttcttcttggttggggctgcgatgtttatagccgatgatctggtttttctctttttgccggcatcggctggttctctgatgagcccttgaagaagagctgaggtcttgggggcatcatagccaataaccggaggagatagcccacctctgttaggaattaaacctggggcatattggatatccctgccactgttgctttgatgaggaggagaagattctgttgtctgcaaattaaaaggaggattagttgaggttaatcggctaaacagctatttaaacgaaatcaagtagagttaaagacttacttgagggacaacatctggaaaaaggtctgtcatatacattgaagctggttggtgaaataaatgcagcttccattcgccccaccacctgtcaaagtttttgcttctgaacgttgccagttctatgttgtcaatactacccatagggggtccttggaggttgagcagccgatccatcatcaaggttgatgaaatttctcctcggcattggatcttgttggcaaagaataagtcgattgggagttggcccattccaagttgtctagctgagcttattggatgatagaattcataagaagattggatgtttcttccttgatgaatgccaacaggaaggatgcatgggctgattgcagctgagaaaatctccctagacaattggtatatttcgtggttgatgtcttcaaatctgaagtccaatgggtgctcaagttctgcagaatcttcataaagaaaccaaactcgagtatctttttgaaagctttcatagaagctatagaaccaatctttgagcagttcagccgatagttttaccccagcatcggttggtgtagaggcgtactctccatatgatgtgcatctccgatgagtgagttcctctccgtcgtcattaacgattggctctagtcttgggaactcagcctctgatacggatggccgattgacaaccttcataactattaggtttaaccaagtttgtagcagccaccagggtctacctgctccaactactgagccgacagctatcttggccgatgcattgttcaacatctggtatagatagccgaggaggattttacccaaggggaattgtatctttgtttctagggcttcagctagaaattgccagttggttgtgggaccgcaacttgatccatagaaaagaaattgttctagccacattaacaagaaagccacatgttcccgaggggtgaccgagccctggcccatatatgctgctacgtagcttgaccagcctcctatgcttttggtcttgaaatcatattggttttttgtgttcaaactcataggattggccgatgaggtgacatccaggcccatgatcatactgatatctatgagagttggagtcatcggccttgattaaacaaaaaggcattaatggtgtttgaccagaagtaagaagcagctaccatcaggggttcatctttggccgaatttgctatagtaaggtcaagtgcttggccgattccaatttcatcccaatgaaccctcttgctggctgatacacgtttgaaccatgtagtgcaactcttttttggtggaactttctctagagacggccaggacttgaaagtattcttccagtgacctagatctgggttggttaatctgaaggggatcctattgatttcaccaatgatgaactcggtggggtcaggattgccgactgggccgagaaagtagtggttttcatgcgactggctgggaatcgcaactaggttggagaggtgctacaaatccaaagcgatccagaggaagagagcaatatgagatatgagaaaaacgatccgctgctaaagaaggggagttagccgatgagaacttacatcggcatattctgctgatggcgcaccagatgggctggcggaagacgacattgctgcgggcggaaatctcatcgaaggagaggtcgcctggaaatcgcctttgtgccggaggagtcgccagaggagagagagaagaggtttcgcttgagcggtgaaaacggaagtcacggcgtgagatttctcgggggtaacggttagtatttaaagcgctggaataacggtcaaaagcgtcggagtgcgaaacttgctcggagtcggtatacggcaaatccggaacattatcaaatatcccggacttggggggcatgtattaacaaccaaatttggtaacatctgtgtcaggaaagaaggttggatcaaagtaaagttggaggcggagatcgagttcggaaacagagcagtaatcagctggagtccagatcggctacgattaggatcggctgggtctgagtcgggctgagtaagccgatacagccgattccgacaatacgacttgtacgcgacatcgggttcaagttaatgtacttcaagatgattgccacgcacggatagagtcctgggaaggcaattgtatctattaatttggatattttatgtaaattccttatagataaatgtgggcaaaagtctgccgcaaagacttatggtatcttagagtttgttagagataatagtcgtgtctggtgtgggcatgtcttgtaattccagggtataaatagaccccgagccctatgtaattaacaacacacacgttcaatgcaactttggtgcatcgctactcttttgctttagttttgtttcgacaagttcttgctttcgggttgagctgcatcggtttcgatcttcaacaagaggtaaaacttgttatgacggattgtgttctcaggattagtgcttccatctttatgatactctaatctcatttatgtaattcgtcgagttatcatatatcttacataatcttgggcaatattgatatctaacctactattggctaacatctgttagcagagggcaaccgattaggttagattttgacgttgatctagattaataagatatctaccactctatgaaacttctagcgggttgattgtctagatatcgttcttcttttcatacttaatgccgtatcagttgagtttgatctattaagtcgtgcttagaatatcgatctctagcctgccttctagttgccgattagaatagtatcggagtttcagccgatgttatctgatttaactatatttgttctatatgcttcattgacatgttaaatctgccctttatatcaagatattgctatatctaagcatgttaggcctttgtttgacatattatacttaccttaatatcctgatatagagtagtatcgaagtattagccgatacacactagatctatctgatcggctatgctataaacatatatagtcctgttattgatatatatttcgatctaagtgatttatactgtctcggcatggtgaccgatctatcccaatcacttggtttaagtatatatcaatataaggagtatatatcattaatgtccccagccgatcgagtagatttagttcttctttacttattcatgaccgttgatcgacacacaggtaacatcggctcaaagataaatgatatgtcatcggcatctagccgatcggctatcatttatagatttaaccacggtttctttgcttgtatttcttgttgattacatgatcaaatcaactggcacgctaacatacccgaaggcgagctttggacctgcactagagttaagcagatctcccaggccacgtgttttctgtcaacaccacccaaaacagtgccttcaacacgttgtcctcatcatatcttgcagcatagaagagggaggggttatctgcttgagttttttgaaaataatcaatagtcattgcaacatctttgagtgaaacttgttgtctcagttttgtcctcaaatttgagacatctttaacagtgaaagttagattcctcacaccaccgtgcaaatctcctaacaacgccaaaatctgcgatgttgcaatgtttcgatcatgcaaagtctttagaaattcatagtattcatttgagatgtgcctgtgagatctataatatctccttcttctaaggcgcttcaccatcggatgcgtgtgttctggttggaaagcaataactctccactttttgtccctaagccctacagccatatgagctttgcaatcatactttgcaacctttggttgtttcctcttcccttccaccaacaagggagccttctttttgtgaccttcaagcaggggttgattttccttattcccttcagaaatgaagctactgccaccagcactatcttttgtggtatttttttggcttacatgcataaacacactcaaattctctccttatcaacttcggttcatcattatgattgtctccattttcatatactttacatttcttcgatgccttttttcccctgatgatgccaggctgtttctagatgatgcaattcttgttccaaatcctaactttcatgcccaatgaattcggataatagcacatcaaggaagccaccagatgagcttggtgcttggacatcaatctgtaacattttgttttgtttcattaacttgtacagttatgtttcagcaagttaatgattattggtcaagtcaaattccagtccaaatttatacaaaagttaaaattaaaaataagacatgaatataaatgttgcatgagagaagacattgtttcacagatctgtgcttcaattttttattgaaactttctcaaaaaaaaagtgaaacaagctaaaccctagaaattcgttgcattatgaattggggttgttcccccatttgcactagatgaactcggcggaaaatccctctcaacttggtgtatcaaatgtgccatggcggcggtggcggcgtgtggtgtggaggcacgtcggcgtttttgccggcttcgccggcgtcgcgaggaggataggggcgtgggggatagggtcgccggcgccggagagaatcgccggtggcagcgcagcgccatgccgcgcagcgccagtcgcgccaccgaaatctcccctcgagctatcggtcaacgggcggacacattgaatgaaacagttaacgtgtacgggtgttgcaacggcgggagcgtcgggcgcgagttgtttctccaatcggacggctggcgcgcgcgtgctgtatcggacggtcgcgcgaggcgtccgatttttttgtctcgcgccgtacgtccaacgcgtagagctctcgagtgaactgcatgtcccacgaggctaccgtatgtccattatcgatcttgccagtttgctcgtttattaattgcctgccgacagctcaacagctatacatatgagaaaaatggagatgataataaattttatgtccgctcaagaaaacaaacggaacgtatctagctaattcaaggcccataatctcatgacaaatataaaaatgcagataatgatttccagaacaggagttaattaagcactatatatcggtatattttaccgacgagccagatctccttccgttcagtttcattagcatttgtgattgtgtggaaaaaaaaagtatacagtgattatattttctacatgtgactgtatttccctaaggatgttaggatattaagtgttatatgtaggtctcaagtagatgggatattatagtagggcaaaatgacaaattaggctttgggtttttgtagcaaagtaattaaaaaaatttaggtcatatacttattaattaactaggaacagaaggagaaataattagaccagatgagctagtttccctttgtgtgttatcatttgtgtttgtgtgtgtggttcgggttgtctcgttttaacaaatatcttttttattcgtgttctaacatgttcgattattatttgtatttcaaataagattttcttttgctacagatgtgaaaacaaacatgacatgcacattattcgtctgtatatatccgcgctgtttggtttcaccccggcccgtgctacagccactaaacaagaactctaattgtttagtttttcgagcatttgtcttgggttattttttacaggccagtacgttgttccctgtcagtttacacaccctttgtctttctctgatatatctaatactccatcaggtaaaaactattggtttctatctcgtgttcaaattttaatgttttatttgtaacataatgtattggccaaatctaaagaattatattattatcaaaatgttctattagtaatagaaatattctacgctattattttttgctgaaatatttgatgctcaaagcttcaaatgtttggtggttgggtaaaataatgatgcgttttaataatttcacatgactatatatatatcaggtcacattcatgggccaacttctcgctatgcttgtctttctatgcatatcgtcacgctagttgttgtaaacgaatgatgatatgtctgcaactgtccatgaatgttttcgattggtttgagcagattgtgtccacacatccaccaatcagtcatacacgcatatcttagcttgtatattactcactccgtttcacaatataatgtaagtcattctaacatttcccacatttatattgatgttaatgaatctagatatacattcatattgatgttaatgaatctagatatttagattcattaacatcaatatgaatgtggaaaatgctagaatgacttacattgcgaaacggaggaagtatatcatatttttgtaacctattagctttatattatatcatatttaagtaatacctataagcgattatttataattttcctcatcatttgaaaagaaggtaggtagacttattttctttagaaaacatgtcagctaaagtaaaagtaaggtgttttttttttgtctagttgcatttgtatggtcatagtttattaaagggtgaaatgggtgggacatgcagctccactaaatatatgggtttataaagcttaatatgattgatgtagtttgagaggtgatccatctacaaacaattcatgttgagtgggtgagaggctccatgcatgtagtctaacatgaatacgataacgattagatataattgtgcggtgattaatataattgtactatgttcctaaaaaaattcagtaaagaatttaacattattgattgtttctctgttagtttaatagctaaaaattggtgtcgtgtgcatgtgagtgtgataaggaggtggaggagattttatttttctatttctaaaaataatttaagtgaaagccaatcatgagatgttttattttccttagaatttctaagattcctcctttttttacatgtgatgcatggcgatttatggtttttcaaaacataaagatctgatagttaaaaataatggatacatcaatttaatttgattttttttaaaattctacgacatgatacgcggtgacttatgagcgctctggtggggtttaattgatttttttagtacaatgatttagtataaaataatacatattttcaattaatctttcgttgttatttagttaccatgcaaatgattgggtctacctttaaatgttatattttgaaaaatatagctaatgtgatcttgatttacttatttaattataaatagaagaatagctatgactgtttttatattatgttagttgaaaaaaaatataagatgagataattgaattggtgaaagaggatgggagagttgagcgggagggtcggaggtatacgtaaggcagcaggatgggaggatgattcttatctattttcataaatacaattaatcttagttccactaggaaataatttgggtattgtattttctaattagactacttaaattgtttcaaaattttctaatttaattgcacgttattaatcagaagatttaaaaaatctattggatcagtgaaaatttatatagtgatatagttaatttggatatttcaatttctaattttatcttaagtaatctaatgttgtgcaccagtaaaaatatagcaatatgatttagataatatagttgtttaaaatttgttatcataatttatttttccatataactaaaagaggaaagtcggagagaaagaaaataggtggggaggtacctactggatggaggggttgagacttgcaatcttttctttatcctttttctatctggataagtaaatctaatggtagaaaacaatgagtcaatcgtatattattgaaaatcaatggttgtatgttttgtttattctagatggcacgtgatggcgtactagcatttgtaggacgaaaattattatattgctctattagctctctatgaatcggaaaatgtttgaaattaaaggactgttggatctcttttgtttttggaat

SEQ ID NO: 23130 - DNA, 10582 bp, Oryza sativa
tcgcagtttacaggcggaatctgtaatttgttttgttattagtctacgtttaatacttcaagtgtgtgtccgtatatctgatgtgacacgctaaaattttacatctctgaatctaaacacagccttactctggcgatctatatatagttgcatacattgtaatattattgctgaattcatattcccatctgagccaaccatgcattggtgttttgcataatggaggtacccattgctgccatgacttttgcccacccagccaatgttatgactctggcttcaaggcagccaaagagtaaaaggtcccatatctcccctgctaccacggctcaccgtaatctacagactcgcctggctcaccaccaccatgcaacaccagcttcattgcctatggcaatctgcaacacagtagacaaagtgatcaataggttcattgacctgccggagcagcgaccaacggtggatccgcggcgtgtgctctctggcaacttcgctcctgttgatgagctgcccccgacaagctgccatgtcatccgcggctccatcccaagctgcctcgccggtggggtctacatccgcaatggtcccaacccacagcaccggcttccccagcgaacacaccacctcttcgatggtgatggcatgctccactcccttctcattccctcggcctcgtcaacactgttgtcggagcctgtgctttgttcacgctatgtgcacacgtacaagtatctcttggagcgtgagaccggaggaccggttttaccaaacttcttcgctggcttccatggagtggccggcttggctcgtgcagtggtcatgatcgcaagagtgcttgctggtcaaattaacctgaacaagggcttcgggctggccaacactagcatcactctttttgcagattgcctatatgcgctatgcgaatctgaccttccctactccatgcacatcaacccagccaacggagaagtcaccacacttggtcgatgtgactttggtggtgatctttcttttaggatgacagcacaccccaagaaggacccggtcaccatggagttgtttgcttttcgctacaatgtcttccaaccattcataacatacttctggttcgatcgagcaggcagcaaggtcgcagatgtgcccatcttgtccttgcagaaaccatcggtgatgcatgactttgcaataacagagagatatgcaatctttccagagtcacaactcatcgttaatcccatggacatggtcatgcgggggagctcgttggtaggattggaccgtaccatggtgccacggattggcgtgcttccaaggtacgccaaggatgagtcagacatgagatggtttgaggtgcctagatttaatatgttgcacacgacgaatggttgggaagaggctgatggagaggagattgtgctcgtggcacccaatatcctatctatcgaacacatgctaggaaacatggagctcatgcgagctcgtgtcgacatggtacgtatcaacctctgcaccggtgacgtgtcgtgcactgcactctcaccggagagccttgagttcggtgtcatccaccaaggttatgttggtcgcaaaaatcgctatggctactttggtgtaagtggtccgttgcccaagatcaaggggataagaaagcttgactttgatctcgtcggctctggtgattgcacggttggacgtcgtgactttggtctagggtgctttgctggggaaccattttttgttccagacaacatcgacgggtatggaaacgaggatagtggttatgtggtgtgctacacccatgaagaggacaccggagagagttggtttgtggtgatggatgcaaagtctccagagctagacattgttgcagaagtgcaacttcctagtcgtatcccctatggctttcatggtatttttgtcaaacaggccgaacttctcgcacaacaataagcatgtttgtgaaaaaccttacccactactctacgtataaagataatacttcataacttcataagcgagatctgctacaaatgtactttccagcatttgatttagaatggtcataagagaagtattatagtctggttgtcatttcacatctatctatatatcttttattatatactaaaagtccattaaacttcctacaaacgctcctaagccgccacgtgttctcctacaaacgctcctaagacgccaagtgccagtctaaaaatctaaccgttgatttttctttaaattggtgggtccaacacttttaaccattagatcaaataaaataaataaaatcctcctctcaacatcggtccccaccacctgtacgttcctcctctcatctccagttggcatattatatggcaccttaaataattctacagatatgtttcgctaaattatatcgatgatatccaatctatctattatatagtaaaagtctgtgaaaatttttataaatgcttctaagctgtcacatgatgcttatataaatgctcctataatgccacgtgacactccaataaattagcaaaaatctaagaaaaaaaacctagcctttgatttcactaaaattaataggcccatcactccaagccgttggatacttggattagattgatttttctatttcttacaaagaggcatcccctcttcccgtgcatacgcatgtacataactcctctccatttctcttttaaggaagtttttttttttttgctatcggatgaaattacatgttctatttgtgtcattattatgactaaaatcacaaattagaatttaatacacctcttaactataatttagcttgtaaaaattatgaaaagaaagtgacattattatattgtttcatgctatataataacttcactggcatgtaactaaaatagttctacaatgtcagaaaaatgtagtttacaccagtataattttacttgtagaaatatattccctaaagaaacatgtagatatatattaggcacatttcgacaacttgtatgccatatctatccattatatgctaaaagttaactaaaattcctacaaaatactctcaaaccaccatgcgggactcctacgaacacacctaagccaccatgtgacactaccactggtggacgaatggtctttcctcccaatttgtaaccccatgttctcctagttttgaaataaccgggacaaaaagaaatcaatttttagtcctggttgatgttactaaccgagactaaaaatgctagagccagaaacggcagttggcagtttttttaattgtttttttttcatattgatttcactaatcattacatcccctaatagagaaatccccaaatcatctccaaatcacagatcaaattcatcataaattctaaaaaaaattacatcacaaattttgaaaaaccatcacaaaaaaattagaacgatagtattaagtaaattaaaacaatatgaattcatccgattataacttaataaagataaaagaatactgaacctcgacaaagaactctactaaggcctggtttagttcccaaaaaattttattttggggtgtcacatcggatatatgaacacacgtttgaaatattaaacattgtctaataacaaaacaaattatagattccgctaggaaactgcgagacaaatttattaatcctaattaccatcattagcaaatgtttactttagtaccatattgtcaaatcatggcacaattaggcttaaaagatttgtctcgcaatttacacgcaaactgtgtaattggtttttttcccacatttaatcacataacatttaatcatcacaaatcctcaaaaaaagaaaatcaattccgaaggccgccgcgtgcgattccccagcccggccagccggccgccgccgccgccgacctcgacaggccgccgctgacccagagaggccgtggtaggaggaggaggcggggagggggaggagaggggaagtgggagaaaggggagaggagaaggggatcggaccgaggaggccgatcgagaaggagaacgcctgagattgagatgggatcgaagaggctggagagtggagatggtttctaatgagagaggaagtgtagatggtttttatcggtcttatcgataagaccgagagagaggactcgacatgcgctcgggaggatttttggtcccggttggtatgaagaaccagaactaagatctaagataattggggcctaactcgacccaataaattctttgaaccgagactaaaaatgatctttagtcccgattgataacatcaactaggactaaagatcaaaaagtttttaaccaggactaaaaataatctttagtcccggtttctattcgaattaggactattgtggttttaggcgaccgaccaaagatggtttctccagtagtgtacaataaatcatagaaattctaaagaaattacataatacacctaaccatcaattattttaacttaaacatggtgtacctattattttctactgctatcttaacaatataaaaatggaaaagacacacttcccaccccttcatacgtcatgtatgtgttcaagtgacatctccatacgtacattatctctgcttctctcccttcacatcctctctttttttcaatggacaacattacgtaaaaatacaataattagaaagattaatgattataattttaaaagttgtatcttatttttagtttgtttcaattgttgttttatttataactaataaataattcaagttccatgttatccatatttttattataaatttaaatacatcatttgaacattggcacctatgttttgcatggaaaccaaataggaatgagacatttcgaaaaggttgactatatgcattatgttatattaaatcagtctacttgataaaatttgattaaacgtcccatattgcacttgtaagtaaccatgtatcatgtctcaaaaaatagaaaacgatccaacttaactcaatggatttcattattttcatcaattagatcaatttttgaaagaaccataagtacacatgtcatctatttttagaaaaaaaaaaacataagacaacacgtgtcatgtcttacaagttataaaaacaataaaagaaatgctgagaaaaaagaaacatctctcatcggttttcactaaaatccttccacctcctcctccatctcacatgtagagaacactgccctcccattccttatttttgtaacatgtagaggacaactacaatttttttataagctatacatgtctgatttctatctaattattctctatttataattaaactaacaatgtaatatttatatatgcatatattttgctgtatagaattatagcacttgggcacagtccacccatgcactttgcaccacatctatataccttaaaattttgacaataaatattatgtcattatgaaaaattctacaaacatgcatagctaaattaaatcaatagtaccagaataaaattttcatatttaatttgccaaaagaaaaagaaataactcaacaacatagagtcgcaccatgctatgttttgaaacatgtatagctaaattaaaggtacacttcgtaaaaaaaataactaactgaaatatgaattgtctgagccactgcataaaacatcgagttcctttaattagagataatagtccaattacttaatgcttttttctgaatgtgctcaaataatccaaataaataaaatgatcttttatacgttcagattaatatttcatcattataagttctcaaacatagtctacgatgcatgcccgtgcgaatgcacgggctaccttcctagtttttttaattgatacaatggctctgtttttttttacaaagtgactttgattgtttacgccacatacagtactagaatatttctcttcaatggccacgtgactagagtagtttttgcgtgtatttccttgagctgtaagtctgtaggctggcttgggtctcatccctctttgaggctatgcactttgttgagttcgtgcggttttagacacgtagccagttgtcagggccaagaaaaagaacaaaaatgattgattatgctgtagcgctaatcgacgcgctgcgcgtggaatattaattcaagcgccgcacaatgctccatccttccggtttttcccttttttaccacctcacctttactccgcctcccacctttccttcactactagaaaaaagatttttccgggtggcccaaaaccattttcgtaggcgggggaaaggaccgccggtaccatctcgcctgcgaaaatagaccattttcgcaatcgggcctgtggcccgcctgtgaaattcatctcagaaaaataaaaaaaaaccacagggcgccgccaccggcctcacgagcgccgccggccaaggctcccctccgtccgctgccgtcggcgccgtcatcatcgtcgtcgcgtcgacgaggatagccggcggccggatgcgagccgtcgtcgtcgcccgtcgtggccggtggaggaggcggcgaggagggaagcatgtggcggaggaggcgagccatcatcgtcattcgttgtggatggtggcggagggggcgaggaggggaagcggccggcagagacggcgaggagggaagccagcagcgaagagggcgaggaggggaagcgggcggcgcaagcggcgaggaggaagccgacggcgcagggatctggagtgccagcgtcgtcgctcgtcgtgggtgacggcgcgtggacataggagaggagcgagcaggcggcgccgtggtcgtcgtcgtcgtcgtggccggcggcgcagatgtgggagaggagggagctgtcggcggagggaaggagtcgccggcgaggagggagacggcggcgtcgcggtcgtcatcgtcgtcatggccggcagcggagggagccagcggcgcgcagacgtgggagaggagggagccatcggcagcgaggagggagcccgccggcgacgaggagggagccggcggcgcgcgcgcggacgttggagaggagggagccggcgattttttctaagtgtgtgtgtgagagagagaggagggggagggaaatgagtggtggagaggagaggataaggatggtggaggagaggataaggatgactagatttttttttgttggtactattttggcaggcggaccacataaggtgcgcctgggaaaatagattttcgctagcgtccgtctgtgaaaataagacccccacgccgggtaaatgcttttttctagtagtgcttaatttgtttttttcgtttttttaccaccccaccttccatgttccttttttctcttttgcatcttacccatggttcatcaaagggcccagtaaaatattaaccatctagatttttcccttttttttccttctctccagtttttctgttttctcatttagtaaaatatttactgtctagtttttctttctgggttttctatttttctagtgtctccccacgtttcaaaagtaacgaatttacccagtgaagttttcgtttaactcccagcctcccacttccgctccttcaaaagtaacaaatttactcgcatgaatacccccttcaaaagtaacaaatttactttcgtgaatgcccccgcatcctatagcactattccttgatggtcataaaagaattactaccagcttacaacgctagtaattctttcaccagtgtatggtctgcgagtaaaacaattaccacattcctctcaatatagcgcatgatcttagccactttgtagtaatatgtttactgagactacgtggtctacacgtaaaaaaattatcaccttcctctcgatatagcccgtgatctcgtagcaaccatgtagtaatatatttaagaatgtgttcaatacatagtataagagtaaaaactgatactaagagtatttttaatctgtatcacaaaatggacatacgaatcaaaaaattacagactcaatcacatagaagtgataaaaattactcacaggtgtatcaaactagaaaagaaaaaaatgattcagccaaaaatccatcgtgaaactaggatcctgatggctttgctggatcttgctataaggatggagaggctggtctgtgtcttatcacacgtagtggagagggaaaccgggtggcgagcagtagtcgacgatgaaatcatgtaagggtgtagtggcgtggtatagagatgggctcgacattgcgcagtagcagccatccatcttctagcaagcacgaaaaaaatgcaaaagcattctcgttcatgtcatagagacgacaagcaaaagaaaaatagcaaacaacctctatcactggaggactccaccctatcctctgaggctagctacatggagcaccatgtgcaaatgtaggacctgtgcatcctatcaattcagataaagtaatatttgagattgcagtaatttgtaaaaagaaataggttcttcatgcgtgaaggtaaaggatgcaaattggagtgccaattccttacttgcttgttctgtcaatgtcgccaacatggagcagccgctagttgttgctcttagcccaggtgaacacctccttgctggctaaggtgccgcccgacgtctcgcagcgaggcccaaagcagcgccttcgcctcaaccgccaccagccaccgctcgccggccaccgccatcaaccaccacggtgtcgtcgtcttcctgcatggtgcgtcaccgatcagtggtctggatggtggatcgattcaaatctaaaaaaaaagggaaaaatgaagttggagcaagagtggttggttgggtaccggaaaaataaaatatatacgtaccggaatcaaggaaagttgttttttatttactccggtaatagtgggagcaggatgacggggcgtggggtgggatcagaagtagggaagttgtttttattatcgaagtaaatcgtttactctaataatgatgggagcgggatgataggacatggggtgaggtgggcctggactaatacatgtttggcgctcagaatactaaggaacacattgcgctcctaacagtagtactattgattatgtacattttgttttgtttgttagatgtaccagtgactagtaaatttttttttgccaactcatgcactcctgctatgtagtaccaataaccacaacactgttatataatgagcgacaaaaagttttatatagatgcgcatgcgaattagtcgatatcttttggaagtatggatcctccaaattaaattaaactaaaacaagttagacagcaatcttctgagcaagttagaaatacatatctactgagctgctttgtttgcacatccaccaatttagtagccacacaaaaccctatgcatgctcatctctcatatattatagtatcattttgcttttttccctcggctactcctaatcaaaatctgatgagaagctttcggtcgtgccccagggtggacagagttgcaaacatgcagttcatgttactgtctcaactgattaggaaaaaactccgaaacgttatgtgatgaatcctatatatatatctatatggtttgatccccacttagtgtagttaatagcaattctcagctttgtggttaagccacatcagcaacaaaatgttggccgtctgatttgatctgaatggctctgtactctacaaggctaaactggttgcatatgaaaaagccccagttcacaccctggcccaccataccatccgacccttcatctccttcccaggacggagcagcccgccgctcaatgcctctgcttcttcctccagcgccagcggcgcctcccctcccctccccggctcccccgccctattgttgcttcctccagcagcacctcttgccgcctcccctccaggatcctctcggttgctttacgccggcagggagcatatccgccgcgctaacggtgtggttgcgcttcccctgcccccaccacacccccgcgggaaagccggaaaccgatgattcccttcataacggtcatcatgtgctaccgacaacccttccctccatggctccattgattcgtctcctgcatcttctttcacctcccgtatgttctctccttcacctgtaaccaccggcctcgtccactttgaagaaatttcaaggacatctaggccttgtttagttcccaactttttcttcaaactttcaacttttccatcacatcaaaactttcttactcacatcagcttccaacttttttcttcaaacttctaatttcagtcaaactttcaattttggtgcggaactaaacacagccctactgaaggaactcctttctttggcttcaacaggcaacagcgcgccaaaaactgatctattcaccggtggccacgttcccgcccataggtatgcttcctcgtgatcttttcctcattttctgttttgacgccttccagtcggaccaaattgattttttttttatctactgaccctcagagtatcgactaacaaaaaaaaaagtccctgctcttctccagcttattgaaaaaggcatttctcccgtctatttagccgggtactgaaattgatttcttttgtaaattttactggtactcttaagatgagaggcagggctgcagga

SEQ ID NO: 23131 - DNA, 32005 bp, Oryza sativa
  unsure (1)..(32005): unsure at all n locations
tttctccaaggtttatttacctaaacctttgatagcatgcattccctattcaaatatgtgtttcactcttcctttatcattccctgtgggcaatttgattgcttcgtaatctgttcagttgagaagatgttagctgtgcaatcctatattgcgattcactcttttatcatcccttatagcagttgtataactttacgtctttctaatccatgaatcttttatttctctcacaaacaaagaggtattgacacttcagtgttgacgactcatttaggtaagacttcaatccatacaaattcagctcctcagttgtccagtaactttgttccatccaagtttccacctgtacgaggtactacattttcatctatgctgcataggtgccacctgcaataatcccctgtattatttgattgattaactgttgtaggcatctgttagcttacttgccgctctttcatatgtacaactgcttccaaatgtggtgtgctgctcctgtcaatcttcaatccgcaaaaataaggctggtgtgtaatcactttcccttatatatttattttggacatggccaagccagtaacggggtttgaggctatctttttcatactccgatagttgaaatccctgcctcgacaaccatcgatttattttagagttttatcgtccaaatacatgaatctgcaacagctggacagcagtgccgttcgacccaaagcattatagaggaagccgtcacagttaaagctctactaaaatgaatatcgaaagaaaaaactacaaaacttaaagccaggagcttaagactactctctctaaagggtttaatgtatgtaaaagcaaaagaagatattattcatgagagatctccaagattgcacagaaagagctatattatcttcatattattttttatattttactcattctttctttcttttttatcacttgctggcctgctagctgggtttaatcttcctgtgttttcccctcaacagatagccaaaggtttgtttggaagattcagtattctccgtaagcagaagttctcaaagctaccttctacctagatggccactagaaggttggactccctttttatgctactagatcatacatccttacattttttctttggattttcatggcacatattttcgctaatggcgaacaagtttatgatcccctatctttccatcttcctatttcatttgtttgtcactaatgaaaattaggatggtgatttcagaactttttgagggattcaccctattttccagttctttcagctcaatatcgttccttttgatcgtaatgatataatgtcatcaagtgatttgatcaagcagaaagagtgcaaccaataaccatttgcatcagtacacaggtatatatatttgatttttggtatgtttagaactgataaccaatttctatgttctgagaatttttcttaccatcattcagaatcgagtcactgaatttcacttccctttactaaaatgttaatttgaatacaacaatttgttaaaccattaaagttttccttgccctaatattacaatcgcgtgtatttctttactattttcaggccatcttgcaatgccatctcctatataggtcagcttgcgcaaatacgctgttgctccattgatcacgttgtttgctggttgtagatgaagatgcttgatgcttaatcaaataatgtacggactgctgcttaaagcagttaaattagtatgtttaaaaagaatgaacctaataatcagttccattcttgatgaacttgccgtaagttaaaaacatatttggcatgcttttctaattgtttgagtttatattgtagacaatcccatatcaattgactttacgggctataaaagaggtgcacatgtcaatatgtaatattgctctgctccacaagtacatatcctaaaatatatgttatttagttgagagtcccaactacaactccgaactttcttctatccttgagtttatcactctctcactattaattcttaagctttcttattgtccatatattttttttaacaaaaatccccgcagcaacacgtggggaattatctagtgctctataaaaggttgctgtggggacttcagctcctaaagcaagtcagaagtgaaatctccaagattcagtaaggttggagaacgactctatgaaggcttgtcgaaacaagatttcggcaatactaaaaggggtggctatcaagttagaaaagtggatgggtttagagacaaggaattttatacaggttcaggccttcttaatcaagaagtaataacctactcctgtccggggattgattcgccgagtgtattattgatcgtatgatctgggagaaaatcgtgcccctagaagcacccagacctctccttatataggggaaggggtccgtattacaaaatacagtccatatccttaatggaatatatagttacagataaaatacaatcgtaaccgactaggatctcggatatttccttgacatacaagtttaaaacttaacccgagtcttctcgaagatattctatctatgcatggcaccccatacccagtcggactatacatgccgtgtagatatgtggtatccataatctccacagtagcccctgagaccttttcagtcgacgaaatagccttctcttgaaacataaagtaataatccgagtgcttcaatttcttctgtattgatctccctagtaccaaaatcaaagactgtgaaggtctaaaaatagaaaaaactgggtgcatcgactagatgcacctaattagatgtagcccccgactgtatgattagttaaaaactaaacatatagtcaagatgtaaactacatccaaccgagtgatcagacaaccatatagcaaagcatatgcggcgttcaacaaaacagccagccgactgctttcagctttaatataccaaaaatgaagatatggaaaggcctgagtgaaaaacactctaaaggtccataaattcacacatttgataagaatccgagtaaaaactctcaaaaagatccatcaaatgtgatataaatgtgataatcataacaagtgataaccttgatgcacgggaaaaaggggggctcccatggtggactgctaggcgactggctccgctcttgcgtcggcggcctctccggccacggcgttctcttcccaaccagctttagcgatgtcgcctttctctggagcatcgctggctaggtctctaagcccagacactcacccccgtcaccataggcttcgcccttctccaaatccaccgcttcttcccctacccccagatccaccagcttccctagcctctccaaccctcgagttcttccctcctgttggtccttcccgtcagccccctactcttcctagcctgggcgtccctgcttcagatccagctttcgtcagcagaagatatcgggttccggggacgggctgccctttccggtctgcggtatcctcgccagatctgcagaatccgatgctggattcgagttctgctccaaatcctcgcctgtcttctcgatgtcaaggttcgccgaaaggtgaactgccgggattcaagcgtctttactccgatgtagttactgctcctcctcaacctccagctgccaagtcttcagatttcattgcagtgcagcctccctcaagattttcaggggcagtagcaaaggacataaggatcctgcagagtggacgtctgctcgatttgtctacccaaaatctctctgcatcagcgcaaggtacaggagacattcaagttggagagaatccttggaaagaggtcaaaggaaaacgcaggtggagaaaccactccgcattcactacaccaaacaacctggagcaaatgcattcaagaaaagcaagatttcttcaacacatggaaggcaagtgtttccgttgtttgagtacaaagcataagatcgtcgactgcagggagccgtttcgatgttggcgctgcttaaaatttggtcatctggcttccagctgtagcaagaagtttgcctataagtccaccttgcctcctctgaagactcacactgaagcttttcctgctcttgctcctctttgttttcccccacgatcgtttccatcccctcccaagtccccgatcatggacgacctcacagctcgtcccctcctcgactcggtggtgatctcggccacaggggagatcgagaggaaccgggaacgcttctcggcccattccttggtggcatggcaagtgggtgcccaagaaggaagggtcgagctcaacacgtttgcagatgacgtcccctcagccttcaacatcagaagagctgacatccaattcaccaagttccacccagaagacttcttcatcacttgctccaaccagggtgatcgagacgcaatacttcgccagccaagacttgccacggcttccgggagggtgtatgtttttcgtccttgggacgaaagcctgcacggcgtcgaggcaaggttccggtaccgagcacgagtatgcattgaggggatcccaatgcatgtgtgaactgatgaagcagcggctaaggtgataggccggaagtgctccattcactatgttgaagagtactctcgccgccgcaactacaaccggaccttcgatttgtggatttggacggatgagccgagagctatcccgcgtggaggtaccttcgctattacctctgctgatgaagaaggactggccacagacattcctctgccagaccttgaaccactccgcaacccgccgccgtctgagccgaagaaagggtggacatacaatgtcttggttcatgttgacaccttggaagatctcctctctcgcaaagctcgagcttacaagtgggattatgatgttcaagacgatggcactctctacaaagaatatccactgccctgcagggcagaacctgacccaacaagaggaccggcagatgatgatgaagacaaggacagagacaatcattccaggagtcgccacaggagccgctcgctgtgggaccggttgaggaggcgatcttcaagccgcagtagggagccggacagaagagacggccactgccaagacaatgaaaacagggggcgtccgcgcaaccgggaacgctccgagcatagaagcagaagctgtcgttctcgtgatcctagcgaggtgagaccgcctttctcttcgcgctccatctctcaagatgactctgttcaggctactcttccactttcctctactccgtctgcttcaccttgcaagctacagaattccctacgtagtccgagccctgatgggggcgctgccgcaagcccttctctcaactagcacatccctgatcagtccatccttcaagctgattcttgcttctcctcgcaggggagcgaggaggttcttaccctcctggagagccatctcgaccctatgcttcatgaggcaaccgtacagcactccatctattcgccagacacatcctctccgcgtgctgtttcccctgtttttgtgccttcttttgcagtacagggaacctcgcaagaggagttggcggcaacccaggcaagccctgtccaggagttcattgctgctctgtcaacaccagtgcagccgcctctcctgcctgctccggaaacacaagctcgccgtccgggaagagcaaaggtgacaatcccggcgctttcttcagctcagcgtcacagcgaacgcctgcttcgcaagcgacgagcaggggcaaagcttgaatcttttgctcaggaaatcctatctaaaaattttggtataatggacgaaagatcttcctttgatcataacatcaaaaagatttatttgcagcgctacaagaagcctctgtctccagcgtccctgaagacaattgcagaattggtggagaagggaggctgcaaaagcattcgcctgaaggcttccaagaaggcgacggtggcgcccctgtaagcggttgactgccaagcttgaagcgctcagcattggccatggaaaggaacaacctgagaagatttagctcatctctcctctctctgtcttttcttagtccgtgtcaaagatgtaaggttcccctttgcctgtgtttcttccaactgtgttggtcgtgtttcggcaaaggagcaatgaacttctcctccaagctagttagtgccagttgctgcttgtgttcccatcaaagatgtaaagttcccctttgcctttgtttcttccaactgtgttggtcgtgtttcggcaaaggagcaatgaacttctccaagctagttagtgccagctgtttgcttttgttcccatgtcacaagaaaatgtctatctgtttaattggaatgtgagaggtttaaattccaaagcaaagcaggattctgtgagatgtattttacaacagcatggtgcaaccatcgtatgtctacaggaaactaagttgtcttctatcagtgatcgcattattctcaatactctgggccagagatttcttcggcactgtgtttctctaccggccaccggcacaaggggtggcgttctgcttgcttgtgatgagaattacttctccatttcagatgtactccttggcacctactctgtatctgcagtgttaacaatgaggggagaggggcttcaatggtctatcacggtggtttataggccacagttagagccagataaaatcaattttctttctgaacttgaagctctgcagacctctatgaaatctgcttggctcattattggagatttcaacctaatatataaagcttcagacaagaacaacgaccgacataatagaaggatgatgcaacgttttcgtggcctcattgacaaattgcaggtgaaagaactgtacctcccagggcgtaggtttagctgggcgggagagggcataaacccaactcaaacaaaaattgatcgcgcctttgttacaactgattgggacatgatgtttgactgctcgaatctttaccctctgtcatccgcatgctctgatcatgctccccttcttctggttggaaatgagaaaatgaatagatttccaagtttcagatttgaagctttttggctgaaaattcctggctttcttgacattgtgacagattcctggacaaatccaatcttgtcaaccaacagattagccatcatccgtttaaagctccggcgtctagctcaagatctcaaaagatggagtcgcaatcacgtgggtgacatcaagctgcaactcgctgttgcaacagaagtgatctttcaattagaggattggctgatggagagcgggctttattgtcaaaccttaaaaatagaattcttgctctgtcagtgttaaacaaaatccaaatcaggcagcggtcaaggcttacctggattaaagaaggagatgtaaactcaaaatttttccatatcaaagctaattctaggagaaggaagaatttcattcaatctttacaaacgccatcgggcatcgcaatttcagcacaagacaaagagaacgagctctatcgtttttttaaagagaggctggcaagtgcctcggcacccaacgacgccggactgcgactacgtagctcgtagccgcactccagtcctcaccgcgaggttttgcccctctgctggtggcttgtgcctagtggagagagagattaggaatgacaatctattagctgcctttccaacgagactgattacatgattatatggccactggcctaaccaaatatagaaggctatccttaattctagggacaccaaaagtagcagcagatttcttctttcctttcttcagcctctggacatcgtcgtcgtgtgctcggccgctcggcgcatgtcacgcctgcgcctgtatgtgcggccgtacatgacatctccccctccgtcgaagtccagctcatcctcgagctgaaacgctgggtacctggcgcggaagtcgtcgaggtcttcccaagtggccgactcgcaggctcgtcacgccactggacgagcacctgccgaacgccgcgagtcagacggccgcgtgtgacgcgtgcaggttctggaaccaccgccccatggagagtaggaggcagggccggggtggaagtgggcggcgtgcccacaaacttcttgagcactcctacatggaagacatcatgaagacgggcacccggcggaagttgcagccgcacggccacatcgttgatgacttcggtgacgcggtagggcccgacgtatcgaggcttcagtttccctgtagtggtgcacggcagggacgaggctgctctctggcggagacgaaggagcgcccagtcatccacctgataggacaccggccggtgaagccggtcgtagtgcttcttttgcacttcttgcgcttgctcgagtcggtagcggacgtcggcgaggaaggcctcgcgagcttctatctccagggcgacagcggcgacgcgggtctcgccaggctcgtaagagcggatggagggcgggtcgcggccatagaccactcggaacggcgtctcgtggagcgaagattggtatgcggtgttgtagatgtactccgcccacggtagccagcgcagccactgtcgggggcgatcgccggtgaagcagcgtaggtacatgacgatgacacgattagccgcctccgtttggccgtccgtctgggggtggaatgccgacgacatgagtagcttggtgcccatgaggcgcatgagctcgcgccagaaccccgaggtgaacactgggtcgcgatcggacacgatcgactggtgtattccatggaggcgcacgatgtcgatgaagaaggcctgcgccacggactcggcggtgtacgggtgcgccaaggggatgaagtggcaatacttgctgaagcggtccacgacggagaggatgatcgtcttcgcgtgcacccggggaagcgcctccacaaagtcaaggccgatgttggcccacacaatggacggaactggaaggggctgtagcaggccagccgggtagagatgttccgacttgtagcgctggcaggtcacacacgccttcacaaagtcctgcaccaaacgacgcatgtggggaaaatggaagtcgcggtggaggcggtggagtgtgcggtggacgccctcgtggccatcgtcatggaccgcggccacgatctcctgtagtagcggcgaggccgacggaatgtaaagccgcccgtcgtaggtgaccatgtccgtgaccacggcccacggcgccgcgcgcgtgcctgcacggacctcatcgtggatggcgaccaggctcggatccgtggcctgggcatggcgcagccgctcgatgaaatcgaaacgaggcgcggagatggccaggagctcgccctcctcgatgtcgcggcgggagagggcgtcggcgacggtgttcgtggcacctgatctgtactccaccgagaaatcgaagcccaagagcttcccgacccagtggtgttgcggaatcatcgctaggcgctagtcgaggaggtacttgaggctgtagtggtccgtcttgacggcgaaacgacgtccccataagtacggccgccagtgccgcatagcctagacgaggccgatgagctcacactcgtatgcggcgagggcgcggtgatgaggggcgacggggcggctgaagaaggcgaccggatggccctcctgagtgagcactgcaccgaaaccatgggacgacgcgtcgcactcgacgatgaagagcttggcgaagtccggtattgcgagtactggggctgtagtgaccgcggtcttgagggccgcaagtgccaccgccgccgcttcaacccaagagaagccatctttctttaggagggcagtgagcggcgcggcgaccgtgccgtagttgtggacgaacttgcggtagtagcccgccaagccgaggaagccgcgcactgcccgaggcgaacggcgagcaggccagtcgcggatggcctgcaccttggacggatccatggcaacgcccgccgccgatatcacgtggccgaggtaggcgaccgagggggcgctgaaggagcacttagtgcgcttgacaaagaggtggtgtcggcggaggtcggtgaggacggcacgaaggtgacggagatggtctgcctacgtcttgctgtagatcaaaatgtcgtcaaaaaagacaaggacgaaccggcgcaggaaggggcggatgacgtcgttcatgagggcctggaacatggccggggcgttgcagagtccgaacgccatcaccaagaactcatataggccgtcgtgagtgtggaacgcggtcttgtgcacatcctctgggcgcatacgcacctagtggtacccggaccgaaggtcgagcttgcagaagaaccgcgccccgtggagctcgtctaggagctcgtcgaccacggggatggaaacgcatccttgacggtgagcgcgttcagggcgcggtagtcgacgcagaagcgccaagtcccgtcgggcttcctgacgaggaggaccggcgacgagaacggggagtcgctgcggcggatgatgccttgctcgatcatggcggcacattgccgctccagctcgtccttgtgggccgccgggtatctgtacgggcggacagccaccggctgcgcgtccggcttgaggatgatgcagtgatcgtgcgcacgctggggaggcagacccgtgggctcggcgaagaggtccccaaatgtcgccaagagcccatccaggaggggctcgccgtcggtggtggcggcgagggccggggcgccgggggtgggcacaccggaccagcagacggtccgcccttggcgctggaacgacatccggtggctggccaagtcccagacgatgggccccagggtgcccagccaacaggtgcccagtacgacgtcgaagcccaccagcggcatcacgaagaggtcggccgggaacagggcgccgtcgatggtgagcggcgcggccttgaggacgcccgcgcaggtgacgcgctcgccgttggcgaccatggccgtgagccgggggcgtgtgtgcaggggcatgccggagcgccgtgccgccgcctccgagatgaagttgtgcgtgctgccggagtccaagaaggcgacgagcgacgccggcccaagcgcgaccgcgacctacatggtgtcggcggcgggtaccccggccagggcctgcagggagaagacaggcgcctcggcgtcctggtccgcggcagcctgggcgtcgtcggcgtcggcgagttccaccccatcgatgaagaagacgcggcggcagacgcggttgtggccgcgcgtatacctctcatcgaagttgtagcagaggccaaggcgacgccgttccgcctggtccgcctgggaaagacgtttcaccgggttcccagccaccggcgcggccggcgcggcggctcgttcaggggccggcagggcgaggcgtggcggaggcgccagaagaagagcgcgcggagcaggccgggcggttggcagcgccggcgtggactgcttgatcaactccagttgccgcgccaagctcatcgcggcggccagcgactgagggttgtgcacgcggacggcgtggctgagcgggggcagcagaccgcccgtgaagagctggacccgctgtgcttcctccaagggtccggtgcgagggagcagcgcctggaagcggtcttgatactccgtgaccgtccccgtgcgtcggcagtcggcgagctcgaagagcggcgtggatcggagcgggggcccataccggaggttgaggaggtcgacgaagcggcgccagggcgggatgccctcgtccctttggacttgaatccactacatctgggcaccatcttccaagttgtaccccgccatccaaacttgctcctccgccatgattttctgctgatggaagtatgattcacagcgattaatgaatacgagcggatcggacttgccatcatacttgggaaaatcaagtttctggaagcgcggaggtggccggtcggtgttggtctcccccgtgcctgccttgggacccgaggacaacgacttgtcggcggagagtgcgaggattgccttggtgttggccgccgcggtcgcctggagggccttgacggtttcggcgagctgcgcgatggtggtcttgaggtcgtcggtgtcgctcatggcagcagcgcagcaagcggatgaagacgaggtaggggacgtcggcacggcgggcggtgtaggggaggtggtgcgggaaggagaggatcgccgggatcgttataccaggttggcaagtgcctcggcacccaacgacgccggaccgcgactacgtagctcgtagccgcgctccagtcctcaccgcgaggttttgcccctctgctagtggcttgtgattagtggagagagagattaggaatgacaatctattagctgcctttccaaagagactgattacatgattatatggccactggcctaaccaaatatagaaggctatccttaattctagggacaccaaaagtagcagcagatttcttctttcctttcttcagcctctggacgttgccgtcgcgcgctcggccgctcggcgcatgtcacgcctgcgcctgtatgtgcggccgtacatgacagaggctaggatcaggttttcaaagagaggctgcattaaattgggattccctgcatttgccaagcctagacttgtcagacttaagaagaggatgtaacagaggaagaacttaaagcgactattttctccatgccagctgaaaaggcgtcggggccggacgggttcataggagttttcttcagagcagcatgggatgtgatcaaggctgaccttctagcggcagtaaagtctttcttcgacctaaacacttctcaattacatgatctaaactcggcttatatctgcctcctgcccaagaaagaagatgctacttatagcagagcactaccgccctataagcttgatccatagcttctccaagataatttccaaacttatggcaaacagattagcgcccaggctaaatgagcttgtctcccaaaatcaaagtgcttttatccgtaaaagggctatacacgacaatttcctttacgttcagaatatggtacagctcctgcacagaacgaaaaaacaaagtttgttcatcaaagttgacatagccaaagcttttgacacggtgtgttggccatatctcctcaatgttcttcacaactttgggtttggaattcgctggttagattggctatcaaatatcctggcaacctcttcttcccaagttctgcttaatggatccccgggccagccaattcatcatgttaggggccttcggcagggggacccgctttccccgatgctatttattctagcaatggaaccttttcatcgtatccttaaagcggctgaaaatgcagccatcttatcaccgattggcgggagatgtgaaaggttcaggtgttcgttatatgctgatgatgttgcggtcttcgcaaggcctcagaatagtgatatatctactttggcccagcttctatccttctttgctcaagtgtcgggtctgcatacgaatattaacaaaacagaattcttcccgataagatgtgaagagattgatgtaagctctcttttggcaaacttcccaggcacagttaagcaattcccttgtcgctatctcgggctgcctcttcacttcagaaaacttagaaagattgactatctgcctctcatcgaaaaaataggggccaagataccaggatggaaaggaagatttttcacttcatcggggcgtcaaacgctggtacaatcagtactgccctccaaacgctgcccattcatcatcttactgccctccaaacgcctaaatgggtgataaaaagaattgatcgattccgaagatccctcctctggaaaggtgaggatcctgatcacaccaatccgggacgtagcctagtcagctggcaaatggtgtgctaaccgaaatctttgggaggcgccggtcttccagacctagaaagattttcgagagcgctccgtctacgttggttatggctaaactagaaagaggaaggcaaaccgtgggctggtatgaatgttccctgtgacgattccgacaaaagattatttcaatcagcgacgactattactcttggaaatggagcaaaatcaagtttttggcacgacaactggcttcaaggcagatgcccaaaagacatcgctcccttgtgtttcagactggcaaagagaaaacagaggaatgtccaatacgagcttcacaacaatgcatggatcatctcctttcgacagataactacagtggaggaattgaacgaactagtgcatctggggggaatgatacagaatgttcaactccatcaaaatccagacgacatcacttggaattggtctgaatcaggtgtttactcatgcaagagtgcctacttgtaccaatttgaaggctcatttacctcaattaattttaaatcaatttggaaaacaccagctgaaccaaaaatgaaatttttggggtggttgattcttcatcaaaaaactcttatagcacaaaaccttctcataagacactggccgtgtgattggatttgttgcctctgctcgagtgcgttcgaagacacaaatcagtgaatgtgactttgttcgggaggtgtggaacctggttcatgcttggctaaacttatcaatttctacctccaatccgcaagctggaactgcaaactggtagtccaaggtaaatctgactgtttcaaaggttgataagatcgcgacaagaggagccttgctcacaatgtggtggaatatttggttagaaagaaatagaaggatttttaatcataaaagcctttcggaaagagaagtggctcacttagtgaaacaggactgagacttacgttgctgggtgtttaagcctccttgagctatgttttttatcttttgtaatcaaggatctgtttgtattctgttttccttcttaatcaaattccgacagagctcctgccgtcgtcttcctcaaaaaaataacaagtgacaagtctaaatagcctaggctatgactcacaccagaagaataaacatataatatgccgagtgaataactgttcaaaaaccagttatctcaacaaaacccgaacagcttttgcagcctaaaaagacttacaaaattagtataacacttttctgttgggcacctttttatttgcatcatagtaattccaaagaatcatccaactgcatcaaaaaggattttaacagcattgggccatactgttgtgagcaaaaattaccaaagcaaaaatgcctaagtccctaaggatcacaactagccacgctggtaatagaattgggctaaagtactgtataggcccaggcccatcaacacccctgaaaccctagcgaaataaacgccgaagtcaaggcgtcgtttcgtcttcccagccgaaactctcgcccctttccccattctctggtacagtgcaaaaccacaccggcaaaagctagggttaacaaatccacttcgatccagcctcatgagctccacaaaaacctttcgcgcaaccactgcatcgattccccatccatttccagccacatcccgaaccaaatcacatcatccagtttatattcatggcggaagagagagaaagcttcgagagtcaatgggcgccctctgacgttacggaggagagcttgaaggaaatggtagcgcacggtgttcttccggcgaaggaaatcatcgggtggcgtccgacgtgcggcaaagcgtttccaacccctgatacacatgaagtcgtggtattttctcatttcttctatggcggattttctcttccaacctcaagattcttccggggaattttggatttctacgggattagtttacatcatctaaacccaaactccatagttcatattgccaacttcatacacgcctgcgaagctgttttgggcatcgtaccacattttgccctattccgtcgcatcttcttccttaagccccaaccaaacaaaagcaagccatgcgtagttgggggagctggattccaactgaggggaactctgagccaaaagtatttctccatgcccttcaaaacctcaaacaaaggctggcatgcaaattggttctatgtacaaaaccccgagcctgctctccccgagtactcctgtcttcctccagttttcgatggaaaacttgaatcatcatgcccaggaattcgccttgatgaagtcagaccctccaattgctcaacgccgatcacctcgccggcagactggtcaggcgagtggaggaccaaaaattcggtctaatactcaaccaaacacctcaaaatcagccagccagtcaaactcccgcaagaggaaattggttctgagtgatgatgagggcgatgatgctggaaaaatctggcgataaagaggtgactggaaaacaaccaaggcataccaatccgaagaagaaaacgtctagtcatcccatgccaaaaatcaggaaatcttctaggtatgaatcatttggccatcttcctcgtattgctgctcacccactgttgaaataacactgatggcataactcaaattcataggaagccatctgatatagatccttccggaaaagactcggagccgactgacatggagacaggcccttcaaaagaaaccgggccaacaacagaggattgttcgagtgacaaacaaccgacaaccaacaatgtagaagctagcaacgagcccccgactgggaactagtcagccgaagctggagctgatgctaatcaggagcccccgactggaaaccagtcgtgtacagaaccaaatagagatattcccgaagtagaagctcaaacgaacagccctcctagaaagaatgccagtgctgatccagtgcccagctctcctgtcaaagtacaagagcctgcttgtcctcgaccggaaattattacaggtaaacacatcctccgaacccgttttgatctgacagactttcttcaattgtttcacctttattcatgaatgcccaaggcccaatgatcggcgacgaagaagagatcctccggatatagtcagctgaggattctcgcccacccattttagtcaagtggtgggatgacgacatgcaacctcagggaattgtaataaacaagcaaaaggaagacgaggaagtatgcctgctgaataaggcactcagccaagccactcgcatcgtaaatataagtctcctcatgcacagcttcaaccatcctgtttactactttgctcaaataccaacaaattctcgtattacagagaatccatctcaggaacgaagcgaagactgcgactcttgagaggttagttctccatcttggaacccttgaggccaccagaaatcagctgcacgaagctaaggagcttgccagaaaaactgagcatgatctacgggaccgaatcgccgagcttcaagattctaactttgagctgagcggttcgtcaaaaggtaaatacaatctctatcaactaacttatgctgccactcttgtaatattaattaacaagaagcaatacagtgcaagctgctgagatatctgaattggaaaaacgaatccaagctctggagaatgacaaggccgaattggcgagacaaagggactcggctctaaaagacgtcgaaggtactagtgactaatactccagaaactattcctttccttatgcccactcgttgatataaatatatttttgcagatcgcaaaatcaagtctcaggctcaattcgatgtcttggtcaacaaaattaagaggcttgaaggggttagggatgaagtcgccatccctactacaccactcgtgcaagccatgttcttcaataacaatggtccaagtacatttgatgcttccgaaatcttcgacaagctgagaattgctccggatacatactttaagaatatcaaagaggctggaagtatgggagcaagcctgacgttagcaatgaccaagtctttatacccgaagatcgacattgatgccattgatggctttgcagacggaacgagcgaagaggccgcccttgacctcatcaacgatgcgcagaaagccgccgataagattgccgttgatgtagttgagagattccaggacaacgatcttcggccgactggatctaataactccgatgatgaaaaaactgatactgattgatgtcatatcataacaatgattctgatgatgatgatgatggaggcacaatttgtacaatactgatgaatttatgctgtgattgatatttcaaacttagctcctgatttcttaaaagcttttgtcaaaccttattgagcctaaaacccacaaaagttattaaaaaactttcagtccttattgactaagccaaaaaatcaagtagggcaatgataaatcaagtaagcaaattgaattgataaaaatcatactccataattattatagtagccccctactgataactcaaggagaaacttgatgttagcagtcaaagagggaaatacaaagtaatgcctaagtataaaaacgacgaagatgttcaatattccaagagttgttaataggggtaccgtcttcacgcttgagttggtaagaacctggttgagtgacttcggaaattatgaatgatccttcccacaagggagataacttgtgccgatcccgtgtagtttgaatttttctcagaaccaggtcaccgaataaaaaagctcgtgatcgaacgttgtgattatgataacggcgcaacccttgcaagtaccgagccgactgaattaaggctgcttcgcgggcttcttccagtcggttcagattatctactcggtcttctccgtagcgctcctcgctgaagttgcgaaaacgtaaagattcaaattccacctcactgggcaacattgcttccgctccatagactaggaaaaacgtcgactggcccgtggcccgactggtagtggtgcgcaaggaccaaagtacagacggcagctgttctacccacttgccggcatagggattcagtcggtcaaaaactcgtgcctttattccttggagcaccatgccattggcgcgctcgacttgtccattgctcatagggtgcgctacgcgcgccacggaggcataacaaattttaatgccaaagtcttcacaaaagtctttaaatactctgccagtgaattgagtgccattatcagtgatgatccgattaggtaccccaaatcggtgcacaatgttgatgaaaaaatttctagctttgtctgccgtgattgtgatgaccggtttagcttcaatccacttggaaaatttgtcaacagccacaaagaggtgagtataaccaccgactgcctttttaaacgggccgaccatgtcaagcccccaaaccgcaaacggccaagacaacgggatggtctgcaactcttgagctagtagatgagtttgtctggcaaaaaattgacaacctttacatgtccgcacaatcttgtcagcgtcggacacagctgtgggccagaaaaaaccttgccggtaagccttgccaacaatggttcgtgcggcagcgtgattgccacagatgcctgaatgtatatcctttaacaattgtctcccctcctccaaagatacacagcgttgcaggattcctgatggacttttcttgtacagctcagtctcatgaatgatatagagcctgctgcgcctggagatccactcggcttcatctttatcttagatgagttcttgtttggtcaaaaatcttatgaggggctctctccagtcagcttcaatcatacttacgtcttgagtgtccgtggcttcagttgtttctttccttggtaaagttggctcgtaaagatgttcaacaaatacgtcagaaggagctgcttctcattttgaaccaaaattggctagtctgtcggctgcctcattattatgtcggagaacatgggtgagctcaagtccgtcgaatttgtcttccaacttgcgtacctcctgcttgtaagcggtcatgttatcatcaaggcaggaccactctttcatgacttgattaacaacgaactgagaatctccacgaactatcagacgctggattcccaaggagatcgcgatccttaatccgtgaagtagcgcctcgtattccgccacgttatgggatgcagaaaaatgtatccacaatacgtagctcaatctttccccagtcgggaaaattagaacaacacccgctccagtgcctgagagcctcttcgacccgtcaaaatgcatggtccagtactccatcttctcctcgggcatgtcttcttggcactcagtccactcggcgacgaagtcagctaaagcttgggacatgatcgaagttcgcggcttgaaagatatgtccaaggacatcaattctagggcccactttgtgatccgcacatttgcttcgcgattatgaagtatgttcccgagtggaaacgatgtgaccaccgtgaccgagtggccttggaagtagtgagatagtttcctgacggtaatcaaaacaccatataatagcttttggacctgaggatatcttgtcttggagtcggccagaacctcgctaacgaagtagattggtcgttggactttttgaatatggccttcttcttcacgctcaacaaccaggactgtgcttacgacctggaaagtcgccgatacatataacaacagcggctcttgagggtgtggtgaagctaagaccggtggagtggtgagaagttttttgaagtcttcaaaggctttttgttcttcgggtccccactagaaattgtctgttttcttcaacagcttgaaaaagggcatcccccgctcgccgagtcgcgaaacaaaccggctaagcgccgccatgcaaccagtcagcttttgaacatctttctgggaacttagcggcttcatgttgaggatggcattgattttctccgggttggcttgtatgcctcgatgagacaccataaatccaagcagcttccctgacggtactccgaagatgcacttttcaaggtttagtttcatcctgaaagcgcggatgctcgcaaaaggatcttctagatctgtgatctaatcatccttctgcttggtcttgacgactacatcatctacataagcttcaatgttgtggccgatctgagttgaaaagcatctctggatcatgcgttgataagttgctcctgcgttctttaatccgaagggcatgatgaatgaagtctttaagcaatcggattcctttagtcggatctgatgatatcctgaatagcaatccaaaaagctcagtagctcgcagccggcggtagagtcaactacctggtcattgcaaggcaacttgaagggatctttgggacaagacttgttgaggtcggtgtaatcaacacacacacgccattgtcccgttttcttctgaaccaggactgggttagccagccagtcgggatgaaggacttccttaatgaagcctgctgctaacagcttggtcaattcctccttgatcgcatccttcctatcctgtgtgaagcggcggagtcattgcttgattggtttagcgtcttccgtaacatctaaagagtgctcaatcacctctctaggaatagtaggcatatcagatggtttccatgcaaagatatctttattattttgaagaaaggtgatgagcacgctttcctatttacaatctaactcagcgcctattacagcagtcttagtaggatcagaaggatctagaggaattttcttggtcttggcgtcgctttctccgctctttggcatcttggttacaggcacttctccttcgtttgctgtggacgcagctagtcggatttcttctcgagcgagcgtgatctcgcgggtctgggccatctcgcatctttccttgtcgcatgtgacggcttgcttgatgttgctccacagggatatgactcctcgaggaccaggcatcttcatcatcatgtaggtatagtgcgggacagccataaacttggctaacgccgggcatccgagtatggcatgatacgctgtctcgaaatcagcaacttcgaagcaaacgttttctgtgcggaagttctcccgagtgccgaaggtaaccggaagagtgatctggccgagtagtgtagcggatagacctcgaatgactccgtgaaagggcgcattactcggctttaattccgtgcgagggatctgcatatcatccatggttttagcgaaaaggatattgagtgcattgccaccatccatgagagatctgcgaagcttgatgttgcgaaccactgggtctagtaccagggggtaccgccccgggtggaccactcggtcaggatgatccgagcggtcaaacttgattgttgtctccgaccaccgaagatattggggcgtgtcgagctgaacagtgttaatctcccattcggtcagcttttgctttctcttagattcataagtcaggggtccgccaaagatgtgattgagttccttgcgatggtcttgaaaacctgtcggggcatcatcgtcatcgtccttctttgacgtgctttgatctccgtcggaggcctttcgtgcgttcttggcgtattgttctgcaaattgtttgtagacgaagcaatctttggccgcgtgattggaattgggatgatgcggacattgggagttcatgatcttgtcaaaagtgttgacgcgcgaacgttgtcgggaggaaggtatagtagttgcaacaagttcctcgggcttacgcttacggtccttgtgattggtacttccactccctcctgtagtcggcgtatatttcttctgcttctaagtggtgcccgactgcttggacacgataatggcatcttcggctttggcatactcgttggctttttcgaacatctgtttgaccgtcttggggggtttgcgcccgaacttgccgactagatcttcgtgacgaattcccttggtgaaagcagcaatgatgacgtcatcggtaatgtcggagatctcaaagggattctccagacttctgaatgacgttgtagagatcaaactgtgtaccagggcgttcaaaggtgacctggaagttggcgatgaagtggtcgcgaagttccgcccataatctgattgtgccacggggtaacccatgaagccagaaccaggcaaaatccgctaaagccacaggcaagtagtttgccatggctttgctgtctcctcctgctgcgcgaattgcgagaccgtagacggtgagccaagactccgggttagtggtgccgtcatacttctcgattctagttggcttgaagtcagctggccaatccactcgacgcaggtcgcttgtaattgcagcgactccatccacatcgtcatcgtagcgatccggtgaatggtggggggcgtaacctcgtgccgcgcagcgctggttgattgtatcacgaaaatcgacggggcgcctgcgaggtggggagcgtggccgttcaacttggcgctccctgtgtcattcgggaggcgagtgaacaaatcgctcgtcgtgaggcgatgctgaggctcggctagtgatagtcttgagattgaagatggggaactcggctgctagtcggcgtgcggacgcttgcggagttaaccgggactgaggcggcgatcatggtctttgtctggttcaagatgttgacgacgtgattagcttagtttagtatgtcttccttgaggagggtgtcgaggagggtgatcgctgcaaccgcgttctgttgaggggtgcgaaagaccgcagttcccttgacgtctagctgcccgataagttctcgtgctcgtcgcccggcgtccaaggcccgttgtcatcggtcctcagcctcctttgcagcccgctcgcgttcctggtgctcatgctgcagccgttctcgctcttgtgcttggcgctcctcttccaattggcgtcgtttggcttcctgttgtacgcgtagctcttctgcttctcgggctttgtgttgttcctccgtctcgttgtcagccatgaagacgccgaagtagagaggggtgtagttatctttaaagccctcgtcgaagtcgtcgaggttgcggttgttgtagcgatagccgaagtcatcgtactccacgatctctgttggtcgtgagtcaacgccgggggagctgaggtagccgtccagttggtccgtcgaaaccgtgccaagtggctggagtatgacgccgacttccctagagctaggccggaccggggctgaagccggatcctgcctaggcctacggggagaagacgcccttgtagtgaagacagcagccaaatcatcggggagtttcatcaggattggcggataggccccatcatcttgatcgggtcatgttggagtagattggatctcgtccgagtggtttgaagccaattcggcggagatgaccttagggtagacctcggccgagttcgggatcccgaacagagcggagatctagcctctttccgactggttcgaatccgagtcgaggagagaaatcttgccaaagtcgttggtgatgaagtcgaggctgccgaaccggaacgcctgcccgggagggaagacgaagtcgtcgatgccggagacggaacccatcgcactagtcggcgaagaacttgatgctgtgatatgcactagggttcccgatcttccgaaaggttctgataaacaacgatttggatagagtcgcaacacaaatcgatccggcttcttgaacgcgcacgctcttgagccccgcaatcgtagcaccacgtctcctctagttatcacccgtgtcgaaacgcggatgacctcgccgagaaggctaattcctgtttgccaatcgaagaacacaaacaagaacgggatagaaaaataaccaaaattgcagatgaatgattaagctcacgagttggggtcttagaaaccgatctagcggcgaaactgttctcaacagattaatctaagcaaaatccaactctaaacgttgacggctactgaataaatgtgattagggacgtcctagggtttcccaagggcgcacacccccttaggctaagcccacgacacaattacaaagcccaaaacccaaatcggattcggattggatgagatacgtggcttgttttgcagattcccggtagctcagttggaattttaacgtgggaccaaaaccatctgaaagtagactccataagctttccaacaagtattcatgggccccgaaatttgtcacgcccggaaattcacaagtaatttctaaactaatttgtgcattaaatcctcgtccaggaatcagccgaagtacacagattgacaatttaatatacagattcatcaaattaactaaaacgataaattgaggcacttagtcctcaccatgaagaaaactgcagcggaaaataaaatctagcgaagctccggctccactcccacaggcagctcaactgaggtataagccaaacgtcttctccatcgcaacttttcttcaactgaggtttgattgattattgcaaggtgagcatatgacatactcagcaagccacacaccaaatatgcaagtgcacaaggataccaaagaatggcataatataggctcatttgcaaaagcagcatttagcaaacatttgagaattgtaaaacaatagagtaattaatcatcaatattaatcaacactgaacagcatacccatactgcacaggcccaaccatcctgaacaaccatacccggttgtacagatctatctccaaaccaggaatgtaccattccaaaccaggagctaatgaaattattatcagttatagcatcatttattatggtgagaagtgtgagactaatcacgaaagacattgttagacccgcccataaccgcgggcacggctattcgaatagttttactctggccagaggtgtaccactgtacccataagacacaaccccacgacatgtcaccatgcgcctcaataccaccacggtacctcggaaaagagctgtgacagtaccccttgcacaacacaatccaccacagcgcaccgttcctggatcataatcaccccattataaacaaggcatggactccccagcgaccccagtaggcttatctccaccacttctcagtctggtgccgcgcaatgaaccatgctatacaaaaggtaaagccgttgcccacgctggcttgtggttggcacggttaatgtttcacaaccgaaactcatgaaccggtccttaattgtcataagcacgatcatcaaaaccatgtgctcacaacccaccattatcaggttttagttggcacattaattaattaaccaatcacgattagccatcgtgagctatgattaaatatccatcattagataatagtgaaacattagttatcccaatcatttgctaatgtttctaagcatggctaagcaattatatctaatatatctagctgaaccaatatataaatccaactagtcaaattataacctaaggtaatcaagacatagggtaatcaatgcaaattagccataacaaaggaataagttcacaccacccggtgacattcgaaaataaatgcacagttgaaataaatagagaatttaaatataggatcaacatgctcaaaggaattgtgtttgggatctgtgtgacttgcctcgcaatattcggtcttccattaatcttcttggatacttccaacgcactcacgaactttcgaaacgacaagctaacacgcaaaacgagaaaaaagactaataaaaaccaaataaacaatacatataaagtaaacaatcatgtagatcataattttagatgaattatgagacttgaacggcctcattccgatttcatttgaattagttatgaatttttacaagatttaattccaattaaacctattaaagaaaagactattccaaattaattaaaccatttacaaatgatttataacggagagaaaagattaaaacaacctccggaaaaagattagatcatatgtggtagatgacatatattaaaaaggaataatatgccattgaaaagaaaacggatttatatcgattttggacggctaagattaatcttgatcgtgtcgaccaagatcggatgacttggattgatctggcaagcaagcctcacgagataccgactcaacgagtcaattctacgtgacacggaatcacccaaatgatcaaccgaaaccggtgaacggaaccggtggctctgaacggctctaaactaaaggacgactccacacagacgaacgaacgaagcacggggacacctcgtttgaacgaacgagcgaacgactcaacaacggctgcgactaaaccgatgagctagatacgattcacggtaaagccctggtacggcaaacgataggccagtagaaatttagggatatacctacggctagacaacttggctaccgagcaacggctaaagtggcggctaggttaaagcggcacacagctgcaacacggcggcactagggcgacttggctcggctaggcagcggcgactgggcggaggcacgtggctagggttagggcgacggcacagcgacgacgacacacagcaacggcagatggtggctacggtagcgggatggcagcgacttggcacgcacgagcagcagcagcacggctgtagcagggagcggcacagcgacggctaggcggctagtgcagcggcgacgctagggcagcacctaagcatggcacggcagcggctactcgacgacaaaaacgagagattaaaaactaaaccgagggaacacggatagaagtctcaccgaaccaaagcgatcggagagagatagatgacgacggtgaaccggcggcaacacatggagacgatgacgacgctagggccaaacaagattagattagattagataggattaagaccctagggaaaacctcacagatgaacggcataggagcggtggttgccggcgaaccacgacacaataatgcaaacggagggcaccgggaggtagagaaggcgacggcgattcttaccaacacttacgcgacgacggacagcgatggaagatggccggtgacgagcttcgaagggcggcgaggtactgtccacggtggcgacgactttccggctacgaacggcggcaacagaggggtggacgtccttcggcttggcgctgcgatgccgaaggagggagcagctctgaccagggacagctgggacgacggcgaacggcggctgtagaacaaaagacggcggcaacccactggttcacggcgaggatggcttctggcgagatttcggcgcaagggaaccggctgccgggcttctcctcctccttgcgaatccaacggcggcggcggcgaccgaaggagacgatggacgacgacgaacggcgcggctggagcggtgcctgcgcttggagagagaaggagagcgcggggagagaaggtttccggcgacggcggaagacgggacttgaggagataggtagaggacgactagggggtcctttatataggcacgggagctcgggtccgggcccaaatcgacgggaaaaactcgggaaattctagggttctcgccggaggaaggaaagattgaaccgcgaaattggaaaggatttccatagaaacttttggggatttcttggggaaaaagaagaggagattgagaggattccattcctgcaactaatttggaaataggagcaacgggtaggtcggattggtgggaggaggcggcggcactgtgcacggcacgggagacagtcggctctgtctagagctggaagatgaacagtggcgcagggacacaaaacagactttcggccgggctaagaggaagggagagaatgggctcaattcggcccaagctgagaggaaaattcttattacttttccaaatagagatgatctttcaattgttaaaaatacttccaaagctcaaataattccaagaaaaatcttgaacatacttggacactctaattatttaaaaaaattgaaaccagctcatttaatgattaatttaatatgtgaacaattacagaaatattctttgtattattaaaattaagaattgagctccgaaaaatccgagaaaattccagagagtataattaatcatggagaatttaataaaaattaaatccaaccatgctttatatttaggaaattttatttcccacatttaacttcacttgtaaattaatgaacatttaatataaattctattaataatttattaaataatttataaatcctgaaatgaaaatcaggctgtgacaaaattccttctagatcagcggctaggtccgtttgaagttgatgctgtcaggaggcccgaatccgaattcaaaacgtgcacaacttaatctctagtcttctatgggccaaaagtgatgtggagagatgaaagaagacttggagatggtcttggtttggtccccaatcaacttcttcaatcatccatgcattccttatgttcggtttcttttctttcgcccaagcaagtaactctgcaaacaaaaacatacaaaactcatcgtgtagcaatgtttgttcaaatatataccaagtaaatctaatatacaacatatgcacctttggttgattaatacataaagtagccatggttatatccgagctagttgtgttctcatcatcctccccttcttgattggaaaccgtcctcggtttcaccttgtcatggagcgtattgaacttatctttatctatcacatccggtgaggaacatttcttgatggtcatatgattggatccagaaatctttgtagtcgaaaaaccactacactccccttcttgcaaaccaacctgtaactcatttaaacaactagaggaactagatagagaataacttatacgcatgttgtgctctacacaatacatttcatcatgaaaaggaggtatggtcaaatttgaacaaatatatactcgatgcacattatattctcctttactatcataattgccaataacatgaaaaatcacatcagaagggcatggcaattcaaatctagcaaataatttcttccctaaacagttgagtggacaaagatcatcaaattgaatatatccccaagtatttaaagaagatagcaatttaagctcttcattctcgctagcaatgtgaataacatgtttaaactcaacacatagtggctctactaaagaactaagatgtcaattcattagatgtgacatggatataagtgaagcatcgcacaactcttctttatcacaagaaatatcaaccaaattattttgtgacaaaggtatctcagcaattgtttccactatgggttgctctaatgtagcataagtagtggacatagttggcacatcataactatgcataccttgagcagttgtagcaccattatctttaccttttttctcatcttcagaaattgtaggcgcttggtcaattaaacattcctcaagcatgcatggagctatggatagatcttttggctcttgtttttcttctcttcctcctcattaccttggttgttctcagatgcctgcaagatattagtatgcaaagcaatagtcacaacaatacattcgttttgtaattcagacttggttgaatacatcacaatnacatctttcctggtatctctgaaaatctcatcgattccattgttcatcctttgaaaattatcttcgaaaatttcagtaaaactcatgggtaccaatttcattttccgaccattatgtctaaatgtgtatgtgttagcaacaaaattatgtgatccattattatcatatacccatggttgaccaaacaacaaagaacatgcttgcatagggacaagatcaaaattggcagtatcatggtaatttccaatcgaaaagtttattctcacaattctatttaccttgaacttactacaagagttgaaccatttgatgtaatatggatgaggatgcggttgtgtaggcaactcaagtttcttaaccaaatctgatctcacaaagttattgcaactctcactatcgattatactatgacatgttctatccttaaccacaaactttgtttcaaataattcgtggtactgccattgctccgctttctccatttgagaacttagcacttgttgcaccaaagtacggtcatcacgtgcaccttgttggtatcgctgattttgagcgccactcatacttgtcattgcaaacataaaaataacagcaaacaatgaaggttatccctaataatctgctacgcggtgtagtagtgcccctcaacaactcagccaaatggagcaccttaccaagctcttacaaatgtcttaccatcaatactaaggacggtacaaccggtggctggtccgtgacaccttgaagaacgtgatgtggcgattgcaaggatcaaagcggtgctgactagaagtatatatgtggagcttgggaggcacagtatatagtagcaaagggacgcaattgtgctaatcaaaaaatgcaaagttgaataatagttcaaagtactagtcaatgtgctggcctagcctagactcaactctagctcaagcaagcaaccgacaacactaaggactagatatgaatcaatgcacaactctgcactctgaaaacatactcaaaggatgaatgattttttttatttcttggtgcggcttttttttaagcacctttctacctttttttttctttttttgtgcggctttttctttgcacctttctgccttttctttttttttatttttttactttttttttcaacaagaactgaccactgacctcgaacagggactcaaatgtaaatatgaatattacagggactcaaatgcatagtgcaaaattaaaattagatcacctaaaaaatggaatgcttacatcacgtaggttacgtttttataaaaatatctcaaatccgctacttaacaattttagtgctacggacgggagagacgggagtattcacggcatagatccgatctcctctccctcacacgcgcattatgacggcaatacaggaactttagaaatcgagcaaatcccaaaccgcctgatgaaaacttctccaaactacaaaaacagaaacccgacgacgagacgattcaattattcaaggtcccggcaacaaccgacgagatgaaaaactagacccaaaactgacgtacaactcacacacttgagtgatg

SEQ ID NO: 23132 - DNA, 9411 bp, Oryza sativa
gcaatactcaaaactaaaaattaaatctaaaactaaaccagcactcgacacgatgatgcaatctagaattcaataaagcaaaatctaatagaacaatgcaacggctcaaattgtctaggtaaacaataaatatttttgtgtggtaattttctggttatggaagataaattacctaacgggcaaccgcactctgataccaactgatgagggatgtaggtcttgatcttccgaaaggttctgataaacaacgatttggacggagtcgcgacacaaatcgatccggcttcttaaacgcgcacgctcttgagccccgcaatcgcagcaccacgtctactctggttatcacccgtgtcgaaacgcggatgaccttgccgagaaggctaatccctattttccaatcgaagaacacaaaaaagaacgagatagaaaaacaaccaaaattgtagatgaatgattaagctcacgagttggggtcttacaaaccgatctagcggtgaaactgttctcgacagattaatctaagcaaaacccaactctaaacgttgacggctactgaataaatgtgattagggacgtcctagggttgcccaagggtgcacacccccttgggctaagcccacgatacaattacaaggcccaaaacccaaatcaaattcggactggatgagatacgtggcttgttttgcagattcccggcagctcagtaggaattttaacgtggaaccaaaaccatcagaaagtagactccataagctttccaacaagtattcatgggccccgaaattccttctagatcagtggctaggtccgtttgaagttgatgctgtcagcaggcccgaatccgaatccaaaacgtgcacaacttaatctcttgtcttctatgggccaaaagtgatgtggagagatgaaagaagacttggagatggccttggtttggtccccaatcaacttcttcaatcatccatgcattccttatgttcggtctctttttttcgcccaagcaagtacctctgcaaacaaaaacacacaaaactcatcgtgtagcaatgtttgttcaaatatataacaagtatatctaatatagaatatatgcacctttggttgattaatacataaagtagccatgattatatctgagctagttgtgttctcatcatgctgcccctacctggcacgccaactgtcgaaacaagatttcggcaatactaaaagggggtggctatcaagttggaaaagtggatgggtttagagacaaggaattttatacaggttcaggccttcttaatcaagaagtaataccctactcctgtccggggattgatccgtcgagtgtattattgatcgtatgatctgagagaaaatcgtgcccctagaggcacccggacccctccttatataggggaaggggtccgtattacaaaatacagtccatatccttaacggaatatgtagttacagataaaatacaatcgtaactgactaagacatacaagtttaaaacttaacccgagtcttctcgaagatattctatctatgcatggcaccccatacccagtcagactatacatgccgtgtaggtatggggtatccataatctccacaaggctggatagtgcatgataaatgtaagatcaacgtgtgttttgattcttattctgtgatgaacaattggcatttgtgactgttggttttgatatttggagattactgttgaagtggttttggagataattgattttcaggtgatgaacagggtttgctgttttgtcgggaccggtcagaccgggcggtggttgctggtcagaccggcttgtgttgagcggtcagaccggctagcccgcggtctgaccggccgccgccgtgtcggtttcggtttcgggttgtttctttggatatccatgattgtttcatggttatggcttctagatggatactatacatatgtaatactgttgtttgctaacaatgagtcaagttggtgatagcttgatcttggaatatggtttttttgtttgtttcttgtgtaggtgactcgatgcctcgggagagtatttgcggtgatggaccgggagtcggcttggtggtaagacgatgtatgtggtggtcagatattatgcgggataattaggctagagttgatgcacgtggttggtgaagatttcatatggcatacgatggaggtattgtgtgagtatgggatgcggagtcgaatttggaaggagtccaaatttggtatgattggttatgtgaagtttgtttcttgtactagagggtttcctaaggtgtttaggacttctagtatgagtttggtttgtggctttaggctgcctacctcacgtataaatagagggggagcgtgatgcttccctgtatcgcttttgagagcaattgagttgctagtttagctagggtttcgagtttagtcgacatttttgtaaggagtgctgttggtgcactttgtaaacatagagagaagcaataaagttgtcatctactttgagagttcttcgatttgtgtttcaccgggtttcggcggactaaccggcatctctccggcggtcagaccggcggcatcacggcggtcagaccggcggcgtaagggcggttagaccggcggcggcttcaggccacggcaactgatcaggtggtcagaccggagttccaatctcggtcagaccggtggcttccaggcggtcagaccggcacgactacttcggtcagaccgcaatccgtcgaattcatgggtaacttttatttccgctaaaagttttcggtttttaggtatatcaaccattcacccccctctggttggcttagttcttgtgtttcgatcctataagtggtatcagagccttgttttcttttttggatttttatcgatctagagtttttgccacggctgctcctgttaggtttttaactaagcctcatgttttcaatggaacggatttttctcattgatgtagtaggatgcaatcttacattatggctgaagattatgatatttggagaaaagtttctcatctttatgtgattcctaaagtaattaatactgctgctgcaaaaactgactttgaacaaaattaaaaagctcgcaatattcttttgagtgggatttctcgttcggattatgatcgtgttgctcatcttcaaactgctcatgagatttggattgctttgagtaattttcatcgaggaacaaataacattaaagaacttcatcgagatcttttcaaaaaggagtatattaaattggagatgaaacctggataagctttggatgattatctttctaggttcaacaaaattttgagtgatcttaggtctgttgattcttcttatgatgttaattactcacaatctgaggtttctcattgctttttgaatggtcttgacatgtctgtttgggagatgaaagttacatcaattcaggagtctgttgatatgtctactttgactttggattcgctttacacaaaactgaaaacacatgagatgaatattctttctcgtaaagttgattctaagtctagtgctttggtttcgtcttcaacttctttggatgttggtgcttcttcatcgaagtcttctgtccttgctttatttaatgccatgtccgatgatcaactcgaatagttcgaggaggaggactgggttttgctatctaacaatttttctcgggctatgaataatgttaggaacaggaaaagaggaggaccgaatcattgttttgagtgtggtgcacttgatcatcttcgttcacattgtcctaagcttgggagaggcaagaaggaagatgatggtagagtcaaggaagatgacgtgaacaagaagaagatcacaaaggagaagaagaagaattgcgtgcaatggctaatccaagaattaataaaagcttgtgatgaatcagaggatgaagatgagagcaaaggtaagcagaaagcttgtgatgaatcagaggatgaagatgagagcaaaggtaagcaaattgttgatttagcttttattgctcgtaatacaagttctgatattgatgaatctaatagtgatagtgaagaaaaagcttagttatgatcaattagaacatgctgcttacaaatttgctaagaaatttcaaacatgttctattgtgcttgatgagaaggatcacactattgagattctaaatgctgaaattgatagattaaaatctttgattcttaatgatgatgaatgtgaatcttgtgaagttttattttctgaaaattaatgctttgcgagatgtcaattcaattaattgcaagaagttggaatttgagattgaaaaatctaaaaagttggagtcttcttttgctcttggatttgctttacatgctcgtgttgttgatgaattgattttgacaaagaatgttttgaaaaaatacaaagttgctttttgtgcaagttctttggtcaatgcttcatgtgcaaataaggcaaaacaaaacaaagatgttttgatttctcaagattgttcaaagtgtattttgaatgagttgaagttgaaagatgctttagggcgtgttaaacacatggaagaaattgttaaacaagatgaggtattttcttgctcaacttgtagaaaaagtgtgctattcttactccggaggtttcttatttgaaaagttctttgcaaaggttttctgatggtaaaaagaacctcaacatgattcttgatcaatccaaggttagcacaaataatcgtggtttaggttttgattcttatgcttatcatgctagacatcctcctactgtttttggtgctgctaggagaggtgaaattttgattgaaactgagcctaagaacactgtgtttaaatctgctggcatcatgtcttctttaaatgcatcttcttcaaaatctaatgttgtgcctgcaaaactttctgttgatgcaaaaccatcaatttcaaatccatctacttcacaaacttatcgtgagaagtacacttattcttttttggaaaagatggacatttggttggtttttgttttagacttgcccataaacagaaaaaggaaaaagaaattgcttttgcaaaatgacgttggcaaaaatcgggttttaattcgaggagcactgttagaccgacgttgtcgagtcagtcagaccggccagcggttagaccgcaggtgaaccgacggtcagaccggttgccaggcctgctcagaccgcaggcacaacgttcaagattcaatcgaagatacaaattccggaagtgttcaaaaggctcatccttagttgccataaagaacacccaagaatattgagaaattcgtcaacaataaccaacacaaaccactttcctccaatggattgcacactagctggaccaacagtgtccatgtgtagtagttttcctggtgcatccgtcgtcatagaaataataagagcatgtgaagaagcaaccatcttagcatgatgacatggtgtacaaaccaaatcaagacctttcctaagtataggcgaaccacaaacaagatccaaaccacttaacttcgtcagatgatcaaaaccaacatatacaagtctacgatgccaaaacatcaaatcttaaatgaatttagcaactaaacatgtgaccacgggtgaaacaggattttcaaaaccagctttaaaaactcctccatagcaagaaatattaaacacataatcaacaatttgtgaaactaaaagtaaattatacattaagtcctataccaaagctacgtctttgaattcaaacttgtcacttaccaagacagataccgtagcaagaaagatagttgaagcatctccaaagataatcgattctgtcttggatgcttgtttgagggaggagaaccaatttttatcactggtcatgtaccgcgaacaactggaatccacgatccacatgttctccttcctcgccaccaaatcctacacacaagaagacataggattggagaggtacaactcctcctttttatattagtatagataaactagcgtatgaggcatatttagggtttatgtctaatttatgcatcaatccatagccgatctagtccaactacatcggatgggatcactaacgatacgtcatcagcctcggccgatcggcaatctaactttccttgttgtttccttgctggtcgtagaatcgaaccagctggcacgctcttagcacactcgaggcaagccttggacctgcgctggagttaagcagatctcccaggccgccgtgtttctcgtcaacacgcttttggcatgcccggtgggacaaagttttcattgtttaattatgttgttggaaagagattggattcacaccagttatcatattccctcatgaggtgacgactgttggtatttcttagtgacactactggaaatataattcccagcaatagcactagaaataatcctagtatattatggttacagatatgatccacaagcgcacggatatacaattgtagcatttcaccagggagtattctaagttatcgtatttattttatcccaagggaagatatgataagagagtactaagatatatctaatttcgttgttttgatgtttgtccagaaattgtttgcctgcttacacctaaaaaaggtcagttacatatatatatcatggtttcttctgcaatccttataggaattctgtttaacacattcgtgatctacgattttgattaaaacaatgaatcgcgtttttcccctattaaatgagttgttttattgataagtttgacagcaaaaacccatataatttatttaaagaatactgagcattaatcataattttggggcactggcagagaacaaatattatcaaaaaaatttcttaatacaaactagcagctaatgattaattattcatgccctgtctctgtaaatccgtatatactgtatgtactctacagcatatacatattattgatcaatgccattcgattttgatcattatgttaattttctaatcacaagtaatgccaaataaacatcccccatactttgtccaaatacatttcttggaatgactacatgattctgttcacatatgtatatataatttatcagcctaatccatagttcttcttaattatcaacgtagaattttaacacaatggcatgtcttatggttaaattttttcacattgagaaggaaatatggaaagtcaatgtgcaagcaattagactttaggacaacataatccaaacagcaacgtatatgcacacataaaagtgattctaggtcccttttagagattaaggataagcgtataaaccaagatgtccgtcactaaataaggagtagttggagagggcaagggtgattggatttaaggctgagagaaaattaaataaatggtccaattgggaaagtagcactccaaatcccttataattgtggataaattacgagccttaaaatccattatactccctccaaattttaatagatgacttaattgacttttgaagacatgtttgataattcatcttattcaaaaaaaatactaatgtataatatataaatcatgcttaaagtactttgagtgataaaacaactcagaataaaataaattatagttatgtaaatttttttaataagataaatggtcaaatgtgtgataaaaagtcaatggtgtgatctattaataaacggatgtagatttgtgcatagagggagtacttattacctcaatgtcatactttattagcgtaaatattttttcatgtatggatagtgtttatgtttaatgtcttcttgcttatattacttgtctcatatcccatgttaaaaaaattttaggcccattaatagcaaatggtgaaaatgtacatgataacagatctcaaggtttcatttgcagcattatattgtccaactgtcaaccataattcagtcaacttcttaaacattaccaaacttagcaaaattagaacaaacatttatattttcaagcattgagagtgtttccaaagaaagcatacttttatggtaagatgtcaatatgaaaaaatataagtcatatttataatatgttaataacaaaacaaaccataataaaataaataatacttacgcaaatttttaataagacaaatgtcaaatgcatgtcaacaagtcagcaacatcaaacattataaaaagcggaagaactatattgtaagatgaactcaaacacaagtttcgatctgatatattaaattaactaagaatggacagaccctatctgagaaagaagagctaaaataatcgagctatatagatagaaactataaattgacttggtacaagcctccaaagctttcctcttgatacaaaatgtttcaaactataaaaccttcattttattttgctacaagccattgctacaaaaacataacagtctgaagtttcgtattaagcatctctaaccttagcaagaggtgatatatccatgacactatgctccaaactgtgtaagtttaattaatatcatttaatccatataagtattggcaacagtttatttgaaattttagcatatgcacagttgagacaatttgaagcacactatatatggagtgacaagaaggggacattggaaaatattttatttaactcacgagcaaatgtatattttgatataattactgacaaaaataaacttatgtataatgtttaaaagtattattcataccttgatttgtttatatatgtagattttgcaatccatgggatgatatacgatgacataatttatattttcaaccttttccataatcttcatgactatttagaaggcatgcaaataatcaacaataatgtttcatttccatttctcataatttgaaggaaaattacaaagtaaataatgaattcagtcgaggaacatcatggaaattgcatgtaaattaattagggtgtataagaaaaatgtcatattaataaaagaaatggcctggccattattctaacagttatcttagatagattgtagtatcgtgaccactcaacgttaaatcatatcaatagctcatattaaataaaacaagcaaattcaaattttttggacgatggatttaatatttgttaatttaatttcaaattaataattgtaaaattatagcaaacatgtccctgtataataaattcgaaattgtaggtaatttgaaaaataaccaacatttagcctataataaaaaatttactatatataaaagaatatgcccccatataaaagcccgtgcaacacacgggttggcgaccagtaactctaactctctattcagtgaccaggtttactctggtatacgattttccggacaagaatgtgatcccatctgtgcatccgcaattttacatacacggacaaggttgttaacagatgtataatgccaaaatagaatgtttgactgatagtttttgtc

SEQ ID NO: 23133 - DNA, 22320 bp, Oryza sativa
aagacaaacggttaaacatgttttaaaacgtcaacgacgtcaaatatttagtgacggatggggtattaaacaagtgaatcaagatcgctacttgttcatacagattctttgacagattatactgatgatatttgcttaattgacacattgttgtactcctgtacatttttgcgataagactttgagaccaaccaaatgctcctatgatcgaagtattctgctaccttgtccatatgttattcgctaataccaagtagaaataaagcgtcatccgtgagagtagagtgatccctatgtcttgctctctgatgcatcccactctcattgtagatagtcaacaagttcatctcttcatcagttttcagtgtgtcagcatatggcttggctgtggatgcatttatgcgaatgcgcggtgagaattggggggggggggggggcaagaatgcgggacgaggcatctagtgggttgtgttgctggacggatggatgggaggtcaccagacagagctttgtgaatcgcgattttatatttacaaccatgatttacaaggactatatactggactctacaatcttgtgcatttgggttgtttgaacggataggcagatgttgaattttaataaacatggatggagaaattatattgttgttttaatgcatttacttctatggtcgcaattcagatgcatctacaattctacatggttgctaaaatatgtcaaacatatcatattacctactactctgtccaaacaataataagttccattcagagcatatatatatatatatatatatatagctaaaaatgcttatatttgcgggtggatgtagtacgtgatgtccacccaagtcttatcacatttttttttcttttactcatcacttcttgtcctttgtcaaaagtaactagtaaacacttgttagctgttatgaaaatagaaacgacgttgtttgcccaagttacgtccagttcccctctctttgcagtctagatgagccccggccatggcttgttgctgcatgatgaccatgagatgacaaggcaaacatgaagatatataaatcaagcgcatagtttttattgaaactggggatgggttaaagttatctccaggatgatgtcattttataatttctgggtatcataatggactattatgatttttggagagggtcgcttgcttttatgacgactgaaattcagtcttattaatagtatttctcccttttttttattacaagagatggatgtgcacacgctgaaggagctggtgaaaaattcacgaagctcataaatttccaaccaactgcacctcgctccattaattggtttcttcttttttttaatcaggttttaatctaaaaattaactgtccttaatgggaaagactcggctgctacatatatttatcctttatttgaattgaacgtatttaaaattattatttcacatcacatggttttcttgacattatattgtattggatgttttaccatattttttccttctaattcaatgtgtttacatttttatacatttacaattgtaccatgaagcaaaaaatagaaacactttactgagtaatggatgttgaatggatttttgtagggaaatcatcaactatgaatgttcgttgataatttaacgaaattatgacccgaatacgcaagagaacggcataatgcattcaaaagaagaagaagaggacgaggtttgaatatttacaagacacccacagtggatgatggaaagggaaaggaaaaaccaccaaaatcttccgaaaccaataaaaaacctgaaatattgtaaatttaagtttcctagctagttcttattgggaacgtggactttgaatatcgaaactgcagagtcatacttaatcacggaaaatataagaatttaattttattgtttgctaagaaatgatttagtttatgaacgatcacagctgcgaaaagcctctttagtcccggtttgtaacccctttagtcctagttggtaagaccaaccgggactaaagatccctggcacactgacaacccctgactagggttaaactttttggtttggcagatttgatcgggcatcaccaaaataccaaaatttccaaaattttgaacaaaacttagttgaatttgaacaaatattaccaaaattcatgaaaaaattataaaaatgaaaaatttcagccgaaataatatcgtatcggagaggttcgaaatgactgaaatttcggaaatttcagtccgaaatttccaaccctgcccctgacagaaagtgaaccgggaccaaaaattataaagtcccattgcgattttaaaccggcagtaaaaatgatctttagtcccgtttcctattcgaaccaggactaatatcatttttgcatggcccacaaaagatgagttctccagtagtaaattcaaattaggtgtagtgtcaactgtatagttttttactgatgtggcaacatatatccatgttgttcttgcagtacagctcttactttcaatccggcaaagaaattgtcaggctgaattacttacaagctttagtacttgtgggattgttttcttgtaagaagatagatccagtgtacattggatatcactaaattaggtcatatcatttgtttagatatagggaattacaggatatccattatgtcaaatattgacccgaagttaattatttaaacaagaatatggattaatttatacaagtaactctatctgtaaatagttgaagacattgcaggaagcagcacgaacttttgtaaaaatatgcatcatgcataaacatctcgcaaaaaggggcatattacacttctgcaatgtgtaaccatgggtaagaagaaaccattcaacatattttcttcacttgtccttttgcaaaacagtattcggatttcatttgttcaacaagaaatcaaaatgtcatggtgcaaccggcaattgaagatatcaagatcaagatacatatgactttttatatggaagaaattattgctatggcttggagcatttggataaaaagaaacaacaaaattttcaggggcataggtcctcacaacacaagagtttgcaatggttatccatagggcaaaacatagttattaccctctcattttttttaagggagccccacatcttacaatggttagaaagtttgtaacataaaacctataaatttcgtagctctgtttataaatatataacaatatatatgttatatgaatctttcatacagtttttaccaaaaaaaaacatggccatattataggtagagttgtagtgtatatatcatatatactaaatcaatagcacgactcctttatcttaatatatatatcctttttcgagcgtataaaaaacatttactaagattgctttatctactgaaattatttagttctgtttcaattatgctcttcttaaaaaaaattccaggcaatgaagacttgtgagtgtgggtgtgctaggaaaaagcgctagaaattatgcaagtcaaagtttttttctagaagtacaatgcagatgtataaacttagtacaagtcacaaaaaacacatgcatacatataacttatgtcctttataaatgtcatatctgcgtcaccagcacaactaatagtttagcttcgatttatattattgaactgattattgtcgcaggctatcaacttcattaagtatgattaaatattttaacgattgaacttaacaaatagctcaaactaaaccatgtaagcaatttagtaaaacaacgattttcttactgaatgtattttctttaaagaaagagccaaatttaagaatctatttcaaaaaatccttgtcctgtgcatgtcatagtgtgatggacgacaaataaatagaacagatcctgaaaaacaacaagatcagtgagtccagtgcttagaaactcaataaaaaataccacctcccattctcgccttggtctgacatgagtcactcactgggtcatccacccagcagcggtgctagtgcaaactgcagcatttgtgtacagcgagaatgggatgcatcaggaagcagagagctgcgccgtccaatgccacatgccgacctgtgtctaggttctttaccagagcagacgattcggaacatggtgacatgtactctatattgctcctccacctagctgcaagcctgcaacaagtgtgagaagcttccatgtacgagtagacagctagaggagcatagggtttagagcattcacctgctagaaggatggctgcaatcaaccactttgcatcctgcacccatgagacagagtttcagaactgtgttcatcctcatcgtgtggatggcacggaaggggcggaattcgtgagtcttctctgtttttcgcctgtgacaggatgccaatcatctacgtctcaagaacttttattctccgagagacgcgagaaattaagttgaagttgaaaactttcttttccacatttaaacctattgtctggggagtaaaatgcacgagtcatcaaaagatcctcaaatcttgagtgttgccaaaaaaaaaagaaaagaaaatttccaattaaatgtacaaataatgtgcatacagtactgggaaaatatttttacatgcggtcaataatccagtaatacaaatatttcatgaactaggaaggtggcccgcacgatgggcaagcatttatattgttgaaagatgagattatatttttttagaaattgtcttataggtaacaaacttatgatcgaacaatatcctttggaaattgatttgggggttctattttcttaacgtatctcaaaaagcattcattgactcttcaatagaagatgtatcaagtaaatattatactaccgctagcttaattatcaagcatatcacttgtatacataccattcaaatatggctataagcgaaaattgcgagattaaggaactcaaaatgaatgatcttatgaaggcatatgacaaataaattaaggataaattaaaagttggattacaagttctcaatagctatgaagaactttaaaaggttttggtgcatacagattacctacaccatcgctttgcttggtattgcaaaatatcaacattgtttgaagctaatttctttagttttggcaagtttggttattttcctgaaataatatttgtctaaaataataccatagttgtataaatttaattagtatggtagtttacttataaatttcgaattgttttgtagtaaagtttttctatcatgtagtctggttatatcaataatatagttttgttcaataaattgaatattatttacaacaccagaattaataaaaatttatgaaaccatccatgactacttaattttttttggttttcttatttgtttattttaaattcaaataatcacatattctccttctaactggtatgtttgtcattattcataataaaaaaaattccttgtacaactgacacattgatgttttcactcaatcacatataaatgtaaaatattttttcattattcttggaccgctcattcctcggtggtatcctccactcatctatcatcttgtcatagtcgcatacaccatattttgtctaattttttagtttacatatggggcgacaccacgttcctccaccctcatgcatggaacacagtgtccaaaatgttttttttcgaaagcaagttcttaattaacccgtgtaatttattagaaaattacatgtgtaatatatgtgtatgtgatacatggtaattccaaagcagtgcttgattcttcttctttctacattgcatcttcgtgatttattttcatgttattaaaaaaaataatcgttgtccattgatgatttgataagtcctcactttagcaaggcagtagcgctacaacatcatgatcaccttagctaccttaggtatacgatgcttcatcatgcgtgtagaaggtaaagatgtcacatgtgttgtatagagagacaaagaggacttccaaggctttgtttattttaacaaaagatagatctcatggtctaaataatatatccaccggtttaactaaaaatcaacaaacaaatatttttattaggaaatagtctaagataatatcatataatggtgtaaactatatttttaaatattgtagatctagtttatttacatctgttaagacttatatgctgatattcaatgtttataaagcagctattatttatagtgtctcaaactaaatacatggaaaaatcgaaagcaaaaaagaggaaggttacataccacctgagtggaaggaagggtggaaccgtagtttaatctaacggctcataatattggaccgatcaatttaagtggaaattaaggatatatgtcttgcttttttctcaaattttataggatttggcaacttgagagtgttttgaggaagtttaatcgacatacgtcgtatgatttgtttgagacacttatataacgataatattaagtgaagaacatctaccacgttttctccctaaattgttttcgtcggctttgcttttataattttgtaacctaatagttacctttatactatatcgtatatcgtagttaagtaatacatagaagcaattatttataatgttattcatcgactgtaaagaatggtaggcttattttcctcaaaaaaatatgtctactaaaataagtgttaaagtaaaattaagacttttttaattggatataggttattgttttctattaactagccgccaaccacgtcgactcgcgtattgcacatgtaggtggccggtgcgggagtttcgcaacattcatttgctcgttcccgacgacatgaggcggctagctgttgtacgatgctgattgcacggtgaatgtggtcatggatataacactcaatcgaccacctctgcctccagggaggacagatcctgcaacctccaggcagaagtctcggttcgttctcagaagtctatggtaacagccattgaaaataatcaactttagaaacaaaatactttcccgtttcagaaatttgaaaactcaagttccaccatatttgaaaaacgtgtaccaatctaatgatatcacaagcataacactaaccacgtatatcgttagttcaaactgaatgttaatactaaactcaaatgttaaatctcctaaaaacaagggagccctatattttttgggcggacaaggtagtatttattgctcaaatcaataatatctgaaggtaccaaattcaagacaaggaaaatcgtcgactcggtattaagattacatacatgtgcagcggcgagcggagggcgcctgacggtgcgtgtagttacacacggatgggtcgggcagatgggtggctaggagctctccaggccagggggagctccgggagaatgagggaataccaagtcgacgacccctcattctcgcgactgagtccgggaggatgaggggtcgtcaacttggtatttatttccctgtacgtaaaaaacttggtattaagattaagatgaagatgaagatcaagttgtttcatagttcgtttctcctgaagatgaaaatcaagttttttttacacaaaacgtggtggtatcaatatatgattgattgagttttaattattacgaacttgaaaaatatattaacataatattatagagcaactttcatatagaaacttttcgcacgaaacacaccgtttagcagtttgaaaagcgtgccacgaaaatctttatcttcgtccaactcttgttggagaaatgaacatgacctgattatgcgcataaaccttcagtgatggaagataaaacgatttggttataaaattagacgagtcgtatcatcaatcattaactcccctacccgttgcgattttctcctttttttgaattttttttcggctcctcggggaggtttagcgtgatttgcaattttgcaacaagctcttcgcatttgcacgaaatattacaaatgttcttaaatgaccgataccccgttgtcacttatccggaaaacaccttgtctttcattgaaatacaatggtaagaagagaaaattgcacttgtagggtagcgctgtaaaaaaaacaaaggcgtatttctgataaatgtcctaatctaacccaaaccctaccccattccctccccatctccatcacctcagcgccgccgccggcctgcccccgcccgggcagccccccctcccgtccgccgtccaccgtccaccgtccccctatcgccgcccaccgttcccccattgctgctgccgccgccttcttccctctgccaccccccgggcgccgccgtcctcgccggcgaattcgaccacctggtggaaggggagggtcgcgagccattccctcaccctcccggagctccccctggagcgctcgtatccacccatccgcatgtacctacacgcgccatcgggcgccctccgctcgccggtgcacatggccccgtccccgcccaccgcgcgtgcgccgccgctagagccatctctgcctctggcccaaggaggtgctgttgctcgacacggtctagagcggggccgacaggaacaggctcgctgcggatgagtctatggaggggagaccatgtcagaggggaagctgcactagtggagaaaccatctttgcccggtcgaccaaaaaccagaataggtcccggttgcagtaaaaaccgggactaaagatggtttttactcccggtttatatgcagaacgggactacgtgaccaaccgggactaaatatcatctttagtctcagttcacatgctgtcaggtgttaggcccctccaggatctttagtcccagttggagatacgaaccgggagtaaagatcggatctttaatctcggttcgtaacaccaaccgggactaaagatcacatctttagtcccggttggtgttactaaccgggattaaagatcaaaacacactatataatccctattacttatcatattttcccatccacacaaactcctctctctctctctccatctctaatccttatctcatcccttcttcccttcctccttatctcttttctttcttatcccttcccgtgtgcacagcaggagtgggtgggcgggccggccggcggagggcggcgcggcggcggcgggggaggaggggaggcggcagccggcttagccggccggcggctttgcttccttttttttctttttttttgaagaatttgtgatccatgtatagattgagatgaagaatttgtgattcattgcatggattgagatgtataatttcttttttagaatctcattgcatggatctgagatgtacatgatttgtgtatttgggatatttctttgatttgggttttgatttgggatgtataatttgtggtgtatatgattgatttgtgtatttgggatgttactttgatttcgggtttgatttgggaatatgcatcccacctaacttgggagaaaataaattagagattaagtagtaagtagcaataaatgaaaaaaaaaaactaaccgtgactgcccgctcccatctttagtcccgggtatttgaaccgggactaaagatagagatctttagtcccagattcgtagtcccagtttaaaaaccgggactataggggttatgaactgggacttaaaacgatttcaccaccagtgctggagaccagccaaggcggtggacggtctggtcgaactccaccccgcctgagagagcggtggacggtctggtcgccaaggtggtggtggagtgcgagatgtgtgggaaggcggtgagcatggtggtgacggccggagggcacaaggctggtggagtgtgacgcgcgttgtggcggagctcgccgctgacccagccaaggcggcggcagggagtcgggagggtcgccggtcgggcagagctggacgcactgtacatgaccacgtcactacgacgacgtcctaggacgttacacgtcggtgtgcagggtgagagcaagcctccacggcttcgacttgatccagggctccacatgccgctgaagctcaccgattgtcgcaccagatgtagtggatggaggaggtggcccagagcagcccatggaagcggcacaagcacagaagagcaggggccgatttgggttcatcgccgaggccttgggggtcatgctcaatgtaagtgttgttttctccgaacctatgacaagccacttaatattcaggattgctaaacttttgattaatggatccattgatctgcaaaagatgtttggcaaatggagtgggtgtggaagaactagattgattaggaagcattatcacctcccgtgggaggccgcatgaatatattgattgagccggcaaaacgcggcgagagttacagggagtttgttacataggataagcaacacaaaagataagaagataaccaatctaatcctgaaacttatctctactctaacagcccccctcaatcatgactttgacaagttaagattgtgctgaaattcatgaagtttctgaaaactgagcgatttggtgaagccatcagctacttggtcattagtagaaacaaatctaacctcaagaagcttctgcacaacccgttctctcacaaaatggaaatcaacttcaatgtgctttgtccttgcatgaaatattgggttagcagacaaataagttgcactcaaattatcacaccacaatcttgccatagacgggcattgtataccaagttcctttaacaaagttttcacctagattacttctgctgttgcattggccaaagccttgtattctgcttctgtactagatctagatgcagtagcttgtttgcgtgcactctaggatataagattacttcctagaaatacagcaaacccactagtagatcttctatcatcaacacatcctgcccaatcggcatctgagaatgcacttacaagcatagactgagatttctgtatcttgagtcccataccaagaatatttctcaaatatctgataattgtttaaacagcagaccaatgtgtcaaagtaggagagtgcaagaattggcataccttattaactgaaaaggcaatatcaggtcgagtcaatgtcaggtactagagagctccaacaatactcctgtaattagttgcatctccaggacctaaaagactcccttcctgtacagataatttttctgatgttgacaaaggggttggcgcaggcttacaggtcgacatacccattctcttcaatatatcatgtgtatatttatcttgagacagaactaaaccatcacttatcttctttacttctatcccaaggaagtaattaagatcacccagatctttcaaggcaaaatccatcttaagatcatgaagcaaagagctaacaacatcttgtgacgaacttgcaacaattatatcatcaacatataccaagacaaagatagtcacactaccttttctatagaaaaataataagatatcagcctttgaaggactgaatcctaattgttgcagcttcatgcttaatctagaataccaggctctaggggcttgtttcaaaccatatagggccttgtcaagtttgcaaacatagtgtggcttagatttctcttcatacctaggtggttgtctcatataaacatcctcctcaagaatgccatgtaaaaacgcattcttcacatctagttggcgcaaactccatcctctagacattgctattgaaaaactgttctaatagtggtttcctttaccacaggactaaaagtgtcttcataatctctgccataacattgtttaaaacccttagcaactagccttgctttatatctatctattgtgccatcttcttttcttttaaccttgtacacccacttgcaatcaatgagattactaccatcctcaggtggaactagatgccaggttttattttgtttaggagcatcaaactcactatccatggctaccttccaatccttatgttttaaagcctcttctagactttcaggttctccagtagatgtaaaacaaccatacctgacacagccattagtataaacattgggcttgcgcacaccactttgtagcctagtgtgtggtcgagggatgtttgccgctgtatcctccgccacagaggatcctgaaaccagctcttcctcatcagtgcgcgtaccagatggcgagctcacaatggtcgacgcggcatgcggtgagggaggtggcgatggaggattgggcgacgctggtgcaaaggacggcgaggcgagagaatttccccctgcgctccacacgtcagttgctggatcatcggtcgcggcagacgatgattctgacgtcgattcagcgcctgtagcggagtcaatagcagccgaatcggtctggtgctccgcggcatctgttgctgctgatatttcatgtgaaatctgcaccgaatcatcagcaaaactcgcagaattttctgcattagacatattttcaggcacagtattttgattagcattattaggcacatggtcacccccagaaaaaggaagaaaaagaccgggagtaagatcaatttctttgcgaagaagtgcaccagcattaggatggagctttgcaaaggggaacacattctcataaaaaataacatcccgagaaatgtagatgcgaccggtggatacatgtaaacatttaaatcctttgtagagacggctatagccaagaaacacgcattgcgtggatcggaagacaagtttctttgaattgtagggtctcaaattaggccaacatgcacacccaaatgtgcgaagggaagcatattctggtttttgatgaaagagacgctctaggggcgtatcaaaattaatcgtcttggccggagtacgattaataagataggtcgcggtgcaaaaggcctcatcccaaaactttagtggcatagacgcatgagcaagcaaggctaaacctacttcaacaatgtgtctatgtttgcgctccgcagcaccattttgttgatgtgcgtgagggcaagagaccctgtgagagattcctattttagtaaaaaaggaatttagtttttcatattcaccaccccaatccgtttgcatagcaattatttttcgatctaaaagcctctcaacaaaactcagaaattcttgaaatttttggagtacctcagacttgtacttaaggaaatatatccaagtaaatttgctaaaatcatcaataaaactcacataatagttctttctgccaactgaatcagtggcaggaccccagacatctgagtacacaagttctaaaggaacagaggaaatactgctagacttaggatagggtaattggtgacttttggcttgttgacaagcatcacacacagtttctttgttggactcactagaacacaaaatattatgcttcttaatgacatgttgaagaacaaaagaggacggatgccctagacgactatgccactttgacgttgagggtttgatggcgccatatgcttgcttccctgtatccacggatctgggaggaaagggataaaggccattcctacactttccttgaagaagaggtctcctcgttgttttgtccttaaccaaaaagaatttatcatgaagttccttttggcttgaggaacataaaggacatcattaagattaagtgcccgaattgaagtaggaatctgggtgtgaccaatgtgactaatatgcatacctgagccacttgttgtatagatttgttcgccaccattgtacctctcacgcacggagagcttgtctagctcgccggtgatgtggtctgtcgccgccatatctgcataccagttggtatcggtgttgttgccatggattgctgcagctgcacttttctccggaacaaagtcctcgttgtaacggtaccagcagttgccccccatgtgaccaactttgccgcaaagctggcaagttggacgatttcctcacccgccaccattgctaggtggtctgccgccacgccacggtttccgccaccgcgaccgcgaccgtcgctgccgcgcccttgttggttgcctcctcgtccccgcgaagccacgttcatggagtgttaggccgcccgacgactcaggcgctcctcaaagctgaggagttgagtgtatgcgtcggcgatcgtcactgcttcagtgcgcccagtgatcaccgagaccaccgggtcgtattcttcatcaaggcctgccaagatgtatgcgacaatctcctcgtcgtccattggctttccagccgctgccatctcatcactaaaagacttcatcctgttaatataatatgtaattttcagattacctttcctggttgtggtcatcgccacacgagtattgaaggattgtgcccgcgtctgggagcacagcatgttctccagagtcctccagagctcggctgcagtttctattgacaccacctgtgtcaggatctccctcgtgagggaggaaaggaggtagctcaagacttgttgatctgcaaccacccacttggtgtactctagattggtggctttcaccaccttctcgccttctttgacgtcgatgagacgggccggcggcgctgtggtgccgtccaggtagcccatcatctgtgcgtcgcgaacggccggaagaacttgtgtcttccaaagcaggaagttgtttcttcctagcttttcttccaccggttggccgaatggagaaggggacgccgttgccatgacggaggagctcgccattatcaatctagatgagtttgaggagtaggctctgataccatgtggaagaactagattgattaggaagcgttatcacctcccgtgggaggccgcacgaatatattgattgagccggcaaaacgcggcgagagttacagggagtttgttaaataggataagcaacacaaaagataagaagataaccaatctaatcctgaaacttatctctactctaacagtggggaatcagaattcgaagtcatgggggttcctggatagtgcagaactgcacgtgcatgcccttaattaagacgccttcattttctgaaatttactgaaacaccaagcagtcggcaacccagctctgaattagagtcacgaaagtttctctgtttttcttccagattttcctaaagcaacttgccaacttctaatattggttgcacatgttgcttgaataaggtttagatgatgaagagatttctttgctcaagttggatggggatctcttttagagatctttgatttctacagttttaatacttcctccgtttcatattataagactttctagcattacccacattcatatagatgttaatgattttgtgtctagattcattaacatctatatgaatatgggtaatactagaaagtcttataatatgaaacagatgaagtagcattttttcatcattacagatgtattgggttctagaattagcagtgatgcattacaggcagagtttaccctctatatttgtttgaaccgatgcgttttctgtaaaacttattatattgggccttaggtgaggatcatcgttttaactactatgcatataaccccaactacatgtttttgacatccttaatgatgggaataatagagcccttgtactgattttataagctgtagtgattgtttcaaactgcagatttaactacggactcactattctttgcatattatgatcggtaatagagtacgctcacttttacccaactaaattgaagtaatatttatgtttcttccatctgctggtggtgttcatattattgttgttccagtcgattgtgtcaatgaataatatggtgacttttaatcatcgcatgattcaaaacctgaatttatctcacgtgttaataaaatggagaagggaactattcttcttcacttcctggttctcgctgtgtgatctactgaatcttcttctcgcattttagtttgcatcaagttcctttcgacaagattctatgccgcgcggcaaataatatatgcacctgttttttgctgagattgttttcttctcttctctagcacttactgtcacctttttcttcagatatttacatgggaacaaacttactgtaggaacatgagtaaatttaaaattatgttattcgcacttgtgggcaaaacgaaccgcaaacgtgttctgtatttctgttaatttattatacaacctttttctgtactgtacacccccatatactttcattgtatgcttcttactaactctatgcacatgttagcgtgcgcggcgttacgccgcccttatatttctagtactactagtgttttactaaggctgattctgaaggaaaccagagagcaagtccacaacagatggctaagggtcatccatatatatcactttccattagtttggtaaggctgtgcccttttcctctgtttggagagaaagttcattagtttggagagaggtttttaacgcacgccaaacgagaaagctcaatagtcccacacgtcattcgcacgtcacttagtttagtgcaaactgcagaggagatgagcttgtatcttcattctgtgaaatgagagtgagatgcatcagggagcaaatcaaaggattgctgatgctatggtgtaggccagtgtgatcctaggtagaaccagggaactacagagggcgaagatgaccaatgggttggacaattttatttttatgcgcataagaattcgagcagaattgtctacgagaagatcactttgtcaatcaagcaaagaccaccagaatattccatgaataatgataatccctcaatcctgaagtagtaggcatgtcggtcttcttttgcttggctcagttatatctgttcgtttccaatgaagggctgtttctttgagccacagttatcactgcatgattcatctaatacatgaaatttcgccacttgacatgaattcagttcctgcatgcccattcattcaaacaacccaattgcattcactatgaatgcaatggatcatcttctaaagcacaagatcctcttcagcgatgcgtctcatcagtaccatttcccactcccgtcgtctaggcctcacattctgtcatttatttggcataatgctagtataaacatgcaaaagagaggaactgataggtggaaccgtggaagtgaaacacaacacactgtaatcaagtgttgcttattcttgactcgcacatcgccacgtaaattgcttcgcacaactagtaaagtagtgcagaataaatagctcaagcaaacaccccatgcctcctccctatatacacacttggcccacaattgaatcagaaggagggcttcctgtgaatcagcgatacaaaatagcacatgcaaaggttattcatcactcaaacaaataccctaaactttccattggaagcggctggaaaaagaacgcgtaccataagaatgagaggcactgggaaaagaagaagcagctccaggaaatcgtaaagttaccgagagcattagtgctgtagtgttcagttcaatttcatcgcgatgccgagtgccgacatatttctccactcggattagtgctcagcttaaaacaatagaaggacgactggatgaaattgtttttggtttcctaaattgaaaataggaagtgaaaaaactcctccctccaacaaatagcctaaattcaatccccaaaacttaaaagtggacccttctgttaaactaccaacagaaaattctgtttttttatttcacgcgcagaaagatcgctatctcccacgtgcgggaatgggaggagagaggcgggagtgcgagattgggagcgaatttcacacctacatataaacggagcgaggaatcgggagaaggtaactccaaaaatcgggtaggagagttggggatctgtcggagctgttttttggactaaaatccctcaaaatcagttttgagaattagataggtagactgttggtgatgctcttaggacgctactgcttatgtggtgtggggtcccaaggccgcttctctgatggattcgagctgtcttgatacctataagctcaaattgtacggtgccatgtttagtagattggtgccgtaagtaggtaataattttcttcaattcatcaagaatcactagattacgttgtatgtgtgtagttcgtatatcgaggatatctctctgttaatgtgatttaaacacgagagtgtttctttgcaaacaaacgtatgaaatcagagtgcaatccgcaaattataaggttcaacaaaaagatccaatgaagacatgtactccctccgtttcacaatataagtcattctagcattttctacattcatattgatgtgaataaatctagacatatatatttatctagattcattcacatcgatatgaatgtgggaaatgctaaaatgacttacattgtgaaacggagggactagttaatttgggttcatcatgtttccaagaattttgtgataaatataaataaaaataattttctgaaaaaaacaatcaataatgatttctgtacatgaaacctatcgatctatgaggataaataagggtgcgttcaaccgaccaacgtccttgagctttttagctgcacagaaaatgaggtaagtatttaagatgtgataaataaagttttaattattagaaatttgaaaaaataattatttgattttatttaaaaaactgttatatcaaaagttcttttaaaaacatatcatttagcggattggtgagcatgctaataaaacaggtaacttgcgattgcaaaaggagaagaagagcagggcagagatttaaatcctcttgatatctccaaatataactctatacatgcacaaaatggcttggttatgcccattaatgatctcttacaacttttaagttataaaaataagattatttttacagcccagagataacaccataaaaatgtgtttttttaagtagcctcaaaaagaatatgagtcatctattcacacgacactacgggacagatagttactattggaaagaaattgtattgcagatagctattattggaaataaattgtattgcataagaatacatttcaaggaaaagagtgaatgccaaaatctcgcgacgagacaaacgaggcttggcggcacaaagataatttggttttcctccatcgacacaaatcacaccacgtgggcaccctatctccacgctcgcacaataacaaatctactgacagggaagacagagattgtcagttgtcactggcctcctgttcctctcttttaggaagaattgcagcgagcacaaatttagggtttcatccaattgaaagtaacataatcaaataatggtcaaatagttccaggaaaaatcacaaaagctagaaatggcaaacactcagttccctgttgaagtctgtagtctcctgtggtgaaaacctatagtataggatttgctgaccggatcatggcagcggcaactacctacacacggcattccctttttagaggcctttattacagtccaaacattactatgtttgagtataatgataaagattgtttgtggttataactcgctacggcttgatatctttttgtcacatcattcttccttgttttataattatagattgtgtacgttctaactatgtagagcctatatttggtcctagattaattatatcatcgatatcttgatgttgttttctgagattaataaaaaaattcatttataaatacaatggattttcttcaaatgcaaaatacatactatagagtgttgcccggcctacttaatatcaagtctccatccaccgacctctacgtcctgtaataataaaccattgaaagtatgatagatatggttttccattactttatagccttcgcattgtcatccatcaagccttatatatagccagtgtaatctatggatagaggggaactggttggcattgtacaacgagactagaatgtaccacaagtttgtgactcattccacttagcttgataaactgcttcaataatatgtcttggattctagagaactctaaccgacttgattattccaccagctcgaggacttttgaaaagccacaataaacagttagcacattgaggtcagttcattgaaattaattagaagtcaaatatcctaggaatgagaagctcctggaaaagaaatggttactcaagagtgacgagaagtcaccacgaatactagtgctagtgtctttagttcaacttcatctatgtcacaacatgttagtcagcttccaattcatgtcactatagcttggcattctccaatacctacctggaggaactttgttgtactagagtgcagtattagatcatattgtcctctgaaacgatttcgtacacagaaccatacttcatatatatgtgaagccgtacacaaccgtgggatggattttgatctgcatatatttttcaagtcaagataatccatatttcccttcaacaagagaaggcaaatgttatgtgtagtatggaattgtactcataggcgtcctaatgattacaacgatatcaatttgttaaccatatcggttattacttacagaacctgtgtcgatatggtgcaaacctgtttcgaagggtacaatttgacatggattacacaatgtcacataaacatgtgcatacatgtcctccacatagggttgaaagttgtcagaggcaaaaaggcttcttttagataagtaacatgagaattacatctccagcctctaatgcacataaccaaaagttctaataatttaaaaacatgacacatagccataaaaaggacatgtgtgtactcctaatattgaagctttcgtacccaagaaaacaaggaatacgcaattaaatctccccaaatcactagacggagaaatataaatggcatgtgacacccataactttccatcttacaatcatatccatgcaaagctgtcctcaatgtcgtcacatatattcatagcggactctcacctttctcttatgtctgcatggtatcctacttgcaaggcccgtttagttatacaaactgacacgaatgattgagagcctaaaaatgcctctacaagacaaaattagcaaatacatctagtagatgtcaagagtgcctaaaaaatttctttaacgcagaactattgtagacgattttaaaattgcctctataacttgttaataggttacggaactctatatttcaatatagagatgattcgaaaattgtctctactaatgtatcgctatcgaatatttttgtcgtagtacaacttctcataaattcttggcgtattcatccatcagttagaatgatccatccgctttcattttagatgcacgatattttctgaaaaatatgcaaaacagagtccagtaggctgctcaagaaattgatgcacaccaaggtatttcaattttcaactcacaaataactccatcaacgataggaagctccctttcagcaacaataaaccatgcctcatgtcattcgcattgggccagaaggcagaggtccgtaggcagcccatattatcaattaagttagagataagattattagttaagttagagataaaattagattgaattcttacttaagggtcaagctataccatctatcaattagtctaatctctccctcccagtaatgttcttctctctagcataaatctacatcccttctccaggagccgatgccgcccggctatcttcccggtggtgtttatcctgtcatggtctcgggtcatgacaacttggtatcaaaggcactcaccatagcttccgatgccgaacaagttctccatgtcactatgagcaatctgctctatccagtgacagaggatctactccatcgaggatttacatgtatgagatggaaacacgtgtgaaagcttcggttcaattccaatctcatgaggatgcggagtatggacaaaaaaccttccacggacgcaacttctacaatggctgctatcggatggatatacatcttgagttttcatcgccggctgcaatcagcagcaactccacactgacaacacctttctccctgataatcgaagagttaaggactgacctgaaagaattggcggccacgttacaggaaaagttggtgaatgaggaggagaggcgcaccagggaggcggggctgcccttccggtgaagacagcaaggacaccgctgcttgtgtcactgttgcctcagttttctccattaaaagccagttcctcgcaggaagaggaggcatcaccaacgataaatgccaccatcaagaggcgtcaactattgacctgatgttgcattgctagagtgaaactgcaagagtggaagactgacgttgtaaaatgagatccggaatacatctcacaagttagcactgattattcttgcctcaaac

SEQ ID NO: 23134 - DNA, 646 bp, Oryza sativa
cttccatacaagttctccttctgaaaaatccttggataccactttcttattataatgccgagcaacacgttctttatccttcgtaaccttcgcaagggctcgcaatcgtgactgaaccagatcctccctctcatcggccataaggttataatattcatcggctgttaaatcgttttgtaactccgttcgtctagagccgatttaacctcccatggcaaaacagcctcatgcccataaacaagtttgtaagtaggaacttgaattgatccatgacaaaccatcctataagaccacaacgcttcggccaaccgaatatgccattgccgaggataatcagaaattttctgcttaatcaacttgatcaaacttttattagacgcctcggcttgcccattcgcttgtgcataataaagtgaagaattcaacaacttgatacccacgatatcggcaaattgaacaaactcatcggacacaaagattgaaccctgatccatagtaatagtttgaggaagaccaaatcggtagattatatgctcctaaacgaattgaatagcatccccagaatcaactttcttcaaaggaatcgcctctacacacttggtgaaataatcagttgccaccaatataaatttatgtcctttactcg

SEQ ID NO: 23135 - DNA, 1139 bp, Oryza sativa
tgctttaccatggaacatcttcaaaaaattaatcatgatttgacatgcttattgtaacatgaatgacgtcccagtgtcatttaacatgaatgagttgacagcattgctttactagcatttttttatttggcggaataagatatatttcaatattgaaatgcaaatgctaacacattaaatattccaatgaaaaaaaaaaaactataaccatagaaatcgtctcacctgagccaacctctcgtcacgcctggcaatcttcctctcacgactggccttgctcttggcacgcttaccctcaaactggtcagagagtgtcttctctcttgccttctcagccttagacttgcggatactttccatgagaacacgcttgctcttgaacatgttacccttgaccttcatgtacatgtcatgatacatgtgcttgtcaatcttcttggcctcacgatacttgcgcaacaaacgctgagcacacgcatcctactgatccacaggatcttggtggggagcctagcctccctggtacccctacgcttacctgcaaaatggcagaataaggaatacgcagagacattttcacactaaaataacaatgaacttaattgtacacaacgcaccatagccagagtgacgtcccttctgcttggcctcatgggctctccgtgcacgggacctggagtgaatcttctggggcttcttgataatgaacccatccttgaccaacttacggatgttctgacctgcaagcacaaaggaaaaaaaatcagatagccttccaagaatttcaggcatgtgatatgagtcacagatatatacagggcaacaaacttcagtatctagaacagtaaataattaataggatattttattggttcttgcaggaaatgagttgtgacctattccaataggacattacacaaactcgcttgcagataagctacaccataattcatacgctcagacaggatcataccacagttgtacaaatggtgatgcagaatcaaaatgaaccaatgagctttagaagttggaattgcaattgcaaaactgacaaaaaactgatcctttaatggtaatcatcatttgggcatgaattgccagcatcctaactgatttaggtaacgaataactcaacgaag

SEQ ID NO: 23136 - DNA, 782 bp, Oryza sativa
cgaggcggccggtcggtgaagtcgatgatgcccaacaacagcggcataataggccggccgtgcaagcggaaactccagtcggctgcagacgaagcggccggtcggtgaagacgtagacgcccaacaacggtggcataataggccagccgtgcaggcggagataccagtcggcggcggatgaggcggccggtcggtgaagacgtagacgcccagcaacggcggcataataggccagccgtgcaggcggaaacaccagtcggcggcggacgagggcaagccggtcagtgaagacgtagacacccaacaacagcggcataataggccagccgtgcaggcggtgacaccagtcggcggcggcgaaagcaagccggtggtgatgttctgactgatcccattcctgaagcgtaagagataagcttaaagccatgaatcccttttatgcatatctggatctggatcctgtaaaacaaacatataggatgagtagtatctgatataaatataatactcgagaaaaattcaagtattttaaaatatttataaatatgtatttctcctctactcaattttgatttccccgagcagatgactccgtacgtttaaacactctgtccgactagtcatagcccccgagcatcgggagtcggcctaggcacttcccaaacatgcatatgagtgacatgagttcgtcattaatggaacaaagtttcacgaatcagaatttactactcgggtacttttgcaattgtagagagcagaaaatagcatttatcttatctcta

SEQ ID NO: 23137 - DNA, 637 bp, Oryza sativa
tcgtgcaggataggagaccataccatagcaactaatacattttatagcaatcgactagttagtgtaatgtgagttgatttttacagggttgtaaatggcaatccaaaaaagacgagtataaagcaactatttttttgcttcacaaggggggcaatttacatatcaacaattcagtgttcccattcatctagaaatgcgactaaatgcaacattagagcttcattcagataacaatacaaggacctatgatcagtataagaagctagaatgctagagcaatcccaacaaatggggcaaatgaatcccaattgcacaactactaaccttttcagaggccaaccaatgtctgaaacttttgacttcactaactgtgatccaagttttcatcacccaagtatcacaaaatgtccttgatgaagtcaagattgagcgtgtcgcggacaatcagaaacatgccaaccatgagtaccaccagtatacctgacgacatgatcctctgttgatttcacgggggatcttctgcccaccacgggccgcctcgagaaggatcaacgccaacgtcccaccgtctaatgctggcaatggcaacaagtttattgcagcaaggttgaggtttatcacagccgcaaactgaaac

SEQ ID NO: 23138 - DNA, 667 bp, Oryza sativa
actggcttggggttggtaagtttatttggtaggcaaaagaattggaccggggtgctccagcctaacacagtgcagcctagagatattaagaccagctcatagaaaagcattaaccgttgatgtgcatggagtatttgtcctgtatggtttagaaaatgatcagatggagtgctcgtttttttggtcaaaatggtaattacatataattaatgaataaaaagaaataataggaaggattaaccttttttttttctctttctctctaaggagaacatcagagagcaaatcacagaaaggatctccaatgcatatttaccttgtatttgtttgtcaataagatgctggcagctccattcctgaagatccatgagctgagcatagtgggttgcctctcccaatattaacatgagacatgaattatcatgaagtaaacctattccttgaagattgagcggggatcttgggcctatcaagattgactaaggcgacatcaagcacacatcataagcatctcagttgaaagaacttttttttggtaaacttctcttaaggtaaaactaaatatttaccatttaaacttaaaaagctacttgcacagaggctgtaaaactacaattctcttttattgtaccatatatgttattcatgtgtatgaagagaacacggg

SEQ ID NO: 23139 - DNA, 858 bp, Oryza sativa
ctcacctacagacaatatgatagtagtatgttgggctgtacagagaggcaacagagaggacagcttcttctcgtcctaatcctcctctatgccattggcctacccagtagacagtagaaactcgaaatccacatttaaatcaatgtaatcgcttgaatcacagcccattgatgaaaggggaaaacacagggagctgctaatcacgcacctaaccgccagcggcgacagtgacccgtcgaactcgatgcgtcgtcaccacgtcgaagacctccaaaaaactgttgggagagccgcagcgaccttaaatcgctgggacctccagcagcagccgccgctgccaaacccctgtgctagaggctccgacgccgccgccaggtccccgacctcaaggctatgttgaaaccgccgttgagcccctccatcgagcgcagccaccaccgtacactttagggaagcactgttggaggacgggtaaaacgatggcgctggaaaggccatggaagaggaggaggaggcggcgccgcgtcggaggagcatcggcgcctccggtcaaagaagcgataagcgagatggggattgggatgcgacgtggagagacgagagatcgtggattccacgtctgggtaaggacggaaccatgtacatgggagacgaacgatcacattatgtccacgggtgatatcgaacggctctgattcgatggactcaatcgtaaataccaaaatggtaagggcttttctgcaaaaattaatggcgtggatcaactaggtttgcagatacgtgtcacgatacgattagttgacggagtccaaatcgccctggttgcggcaagctaggagctttaagatatctagtatt

SEQ ID NO: 23140 - DNA, 1047 bp, Oryza sativa
ccattcatattaattcagttgattgatcccgtgcttgcatggacagaaccgatctgatgaccccgcgtaactccggccgttttccccatggcttatgtttttttcaacccgcagtgatcagaagaattcacagcgcggcggcacatgtaaccagagaggaaaaacaacagaaaatcaattgtgattatagatcaatctgataacaatatattgaaacgacaaaccgattaacatttggagtcgtcgaactcgttgagattaatctcaatgcttgaattgattccatcgcactcgtcgacgggaaactcgacgcatcccctgcctggcgcgccagctgtcaaaacatgaattcggcaataataaaacggggtagcgcacgaaacctaaaagtatatggatgcagagacaaggatttagacaggttcaggccctctcaatgagaggtaataccctactcctgtttggggatttgaatccgccgagtgtagtatagatctgacgatctaattgtctcatgccccctagagggcctcctgcccaccttatataggatgggggacatgattacaagatagaaaccttatccaatacggtatcggtttcctaaatctactttacaatcttatcaaaccaggactttaggccgttccgtaatatacaaggaaacgtaatacccaagtcatgatctgttacatatttcatatatataagttatcccctataactagtcggataaccgtgccgtgtgggtatggggtacccataatctccacaagtgcgcccgcgagtcgaactcgaagatgcatggtgtgttgtggcaacttgggaacgagctgcttgcattggcgttgtttgggtggttaatcgatcgaggcgtgcgggtgggtgatgggtgtggcccacatggctcacgaggcgcaacagtcaaaatctctgtcactgcaactaaaaggtcactacaactaaaaggtggtaaatgtctacttggacaggcaaagtcaccatccgatcccacgcccctacgacgcttcttttccgtgccgatag

SEQ ID NO: 23141 - DNA, 2421 bp, Oryza sativa
actgtgacaataccccttgcacaacacaactcaccacagtgcaccgttcctggatcataatctccccctcaaaaccagaggcaatggactccccagcgacccccacggacttctcgccgcttcacagtctggcgcactataatgaatcatgctatacaaaagataaagccgttgcccacgctggcttgtggttggcacggtaaaagttttacaacagtagctcgcgaaccggtccttaattgtcatgagcacaaccatcaaaaccatatgctcacaacccaccttaaccaggttttaatcatcaattaattaacatcacacgattaaccatcgtgagctaccatttaatgtaaccataattaaaataataatgtaacatagtttataattaatccctttagttagctaacgtttctaagcatggctaagcaaacttgcatatagcatttagttgaaccaatccaacatataaggttcatgctaatcaaattataacctataggaaaataagatcatcttcggccattaattaattgggaaaggtttaccacccgatgacattcgaaaacaatgcgtaactgagataaaataatagctttaaatgggttcaacatgtcaaagggttgtttgggatctgagtgacttgccttgggcttacgcatacagctcaagaacctttctcatcggaaacactctcctccggaacgtcggaaactaaagcaattaaacaaaaattaacaaaacagtacaaaaacaagcatacacagtacatgtggatatttttaacatgtagatcttgattttagaaaaatttagcaacttgaactacctgaaacggatctacggttatttagttatgattttctgaagttttaatctattagaaaaacgggaaaaagaaaagatgatgatgtcacgatgacgtcatcaatggtggccggcccgaattgacgacctcgccggagctagggcggtcggccggaactttggagggcatctacacgtagagaacgacgagacgaacgcgacggtacttaccaacacaccgaacgaccaccgacgatagccggcgtcgagaaggcggcggcggcggctcgggttgactggcggcgacgaggctacggcggccggcggcgaaggggaggaggcggccgagcttccccacctcttggcgaaaccagcggcggcgacggcaagcgacggcgacggcggaggcggcgcggcggcgcaaccggagtccggccggcggcgggtggcttgctaggcggcagggcgacggagctacggagcacgggaaaggacgggagttggggcaaacgaaagaggaggactagggggtcctatttatagccttggattgaagagatcggactcctcccgcaagaaatcgactcgggaaaatcaaaaactcggttttggagataaactcgaaaacgagttcgattcgggcaagatactcaaccatttgctccgattcttgaggggaaagatagaggaagatgtggggataaaaacccctcaaaaatccggactaggggtggagagatcggggcggaaacggaggcagaaggcggcggctcggccggctcgggctcggcttgcagccggccggaggtaggagacaccaccgacaggtgggccccacctgtcggcctccacgcgagggaggggcggtggtggcgggttgggccggatgggccggctcggccacgggatgtgggagggatgttgggccaaaatggcccaacggcttcagggaggagttttggaactttttacttaaaaataatttgtgaaatgttgtttcatttattaaaaatacttcccttgctcaaacaattcccagaaaattctagaaaatagaggaacaagcaaagtatttaataaaattttatctagctcaattttatgttgaaaattttcctagataattagggtttagcttgtaggcttttaaaataatttctaaaaatgatttaaacaatgtatttttaatttagttgatttttagggcgtgacaaccaacaaaaccatgcacccacagcccaccatgtgatttattttaattgacccacaccgaagcggtggcattaatccaacattaccattagaacctacagtctatacattaataggattttccccattgtgtgctagttgaactaagcatggctaagcaatccctagtccaatatctagtcatgttatatcccaagctaacaaaggagcatggtaccaaaatagcatggctgtaacagtaggtaaacatctcatagtattactgaaaacaatgcagtatttgatggaaaacattagaacatttgcaatataggatcaacatgttcaagtgacaagcatgacttgccttgctctgctgctggaggaacctcggcgactatctcaaagtacaccggagcgtca

SEQ ID NO: 23142 - DNA, 5054 bp, Oryza sativa
cgctaacgggcggtgtgtgcttgatggagtgggcggacttcaaaatgcgcacccaaaatccctttaaataggcgcacccccgacggtgcgaattccaaggaactgagagaaatccccgccggaaatttctaggtccattacgcgcggcagtttttgacttaagttcaaaattcactcgtgaccgttgggcttcaaacggcatgttcgactacacgtcatctccgtggttctcgtacctggaatgataacgttctcgacacccgaagtcgcgaatggtcgcacgagttcattttgagcagaagtcgggagctactgtcagggttacgggtcaggcataccctctacccttcgatatacgttacgtatcgacatggcatacccacgcgtatgcggatatttcctttatgatctaaggaaacctttcacgaaatcaatagacgggaagagtccttctcggataagaactgggttacctacgtattgagctgggtctgggtctggtgtgttcgagtcctactcggagaccaccagacctgcgatataaaagggaccccccggggagggcatagaggatcgaatctcagagccaacacaacccacacagcctacgaagccggagcctgcgaggggccacgtcgtcaagagctagtcgaatcaactcgactttaatctcgccggattcgacaagttccatctttcctttgtaacctgtgttttccaccatataatcccatatcaaatggattagggctattacctgtcaaggggcctgaaccagtataattcttgtcttttgattacttgatgtcgtactacgtagatccttgtaccagcgtaccccaataccctctatatccagtctacgtacagtggcgcgccaggtaggggcacttggtactcaaggttctactactatgccatcaagcttcgtcgacaacaacgtcaacaccagctccagtcaagcactctcagcttcaataatgctggtatggactcaagtcggcgaaatcgtcttcccggtttacaccacgatgccgatctcaaccggtcctccaatgactggaaacgagaacgcagtggctatgaaccaggacggctccatgtcgaaaaatccacccgttgaaacagagaacggattatcgactacatccaaactcgtgaaggattctgatgcggccaagtcttgtccctccgacataaaccacgggccaacaaagatgacttccgaagttatctggtctttgtgtcctatccacaaaaccaagaaacatacccttcaagattgctaggtattcatcaatgtccgtgctgaaattcgcgcctgcaaagaacgcggaattcagcgtacttctctaactcgggatgtctattgtcctatccacaagacaaagaatcacgacctctcgagctgcaaagttctcctcggcgccgtgaaaactccgtctcctaagtcatacgtccccgttagggataacggcaaggaacaaggagcgactccagcctcagatcgattcgttggggtaatcgatctcgacccccacgaaccatcggtcttacatctcctcgaagactgtgggtcatcgacaacaagtgcgtcgcgggaggtattggctatcgatgacgttggcacgtcagcacaagccaatgcagaggcggcaaatcaatcgactactccagcccagcacatcagggttgttcaagccatacagagggaaactccttacgatcccgttctgaacgacgacctcgagcgttggacggaacgattacgggagtcggtgaccaacctcagcaatgcgttcgaagaagccgctaccgcagcacaccaagatcagccaccgatcggcgacaccaatggtaaagatccggagcggagggaattacctcgacaggctacccctccacctcgtggcattggagatcttcgagatcaaatcaatgatcgccgagaagcacgacgcacatgggacgacgcaaatcgctcccggcgtcatgtctcttcacgacgccatgatcgaggaaatcgcccaaacgaggaccgagactacaacgatcgcgaacggcgggggccagacaatactggtcatggccgtcgccgcaacgacgacgacgaaggcgatcggcgccgagacaacagcgagagacaacgacaggatgcccgggatccaggtcgtcatcctcgtaatcgtacgccagaaccaagcgacccatcgtcatcgtcatcatccgcgtcctcttcatcgttggacagacatccacgaaggtcacgcgaccgccgacaaaccaccgcccccagtgctgggtgtagggctttcggtcgttccctatgtgatgtccgatggcctgagagattccgacccagagccattgaaaattatgatgggagcgccgacccagaagaattccttcaagtctactcgacagtgctttatgctgccgcagcagatgaccacgcgttggtgaagcatttaccatccgcgttaaagggttctgcgcgttcatggctgatgcatcttcctccctactcaatctcctcgtgggcagacctgtggcaacagttcgtcgccaatttccaaggaacatacaagcgccacgcgatctaagacgacttacatgcgttaacacagaactcgggggaatcattgagggaatacgttcggcacttcaacgagtgcagaaacacaattcccgagattaccgacgcttctgtaattctcgccttcaagtctggtgtcagagatcgctacactacccaggagttggcgacaagacgcatcacaactactcgaagattattcgagatcgttgagcggtgagcccatgtggatgacgcgctaagacgcaagaacgacaagccgaagactgggggagagaagaaactatccgcagacgcatctgagtcaagcaagaagaaaaatcgcaaaaacgggaaaaggaaagctcaagcggaagtcctcgcagcagaatacgcgaaccctcccaagcgcccagaccgacagggcagcgatacaaagaaatcatggtgccccatacacaaaacggacagacattctctggaggattgccttgttttcaaaaagtcgctcgagaagcacatggcgtttgaaaaaggcaagcgagtacgcgttgttgagaagaacaaggagacacctcctcacgaatcggattctgcgtacccagactccgacctccacgtctcacacatattcggtggttccacaacgtactcctccaagcgagaatacaagaaagtggaacgtgaagtctgttcgacgtggcagggggctgcaccctgatcaccttcgatgtcgctgaattcgatacagcttataacgccatcatcgggagaactgcacttgtgaagttcatggccacatcccactacgcatatcaagtgctcaagatgctgggaccgaagggaacaatcactatttaggggaacgcaaagctggcggtgcagtgcgacaagcggagcctcgacatggtcgagcaaacgcccaccccacccgccacgtctgagccacctaagaaagtgagcaagccaaataagacgccaaagccagacggcaccatcaagatcgttccgctctctagtgctaaccccgacaagactatcaaaatcgggactacactagatgagaaataggaactcgcgttcatcacattcctccgcgataatgccgacgtgttcgcttggcagccgtgcgacatgccgggggtccccagggaggtgattgagcacaaacttatggtgcgacccgatgccaagctagtaaagcaaagactgcggagatttgcaccagaccgaaaacaagccatacaagaagagctcgacaaacttttgaaagctggcttcattagagaagtacttcacccagagtggctagccaacccagttatggtgcggaaggccaacggaaaatggagaatgtgtgtcgacttcacagacctcaacaaggcatgccccaaggatcactttcctctccctcgaatagatcagttggtggattcaacagccggttgcgagcttctaagcttcctcgacgcttactctggctaccaccaaatcagcatggcaaaagagaacgaagagaagacagtgttcatcacgccgttcggggtattttgctacgttaagatgcctttcggactgataaccaccgggaatactttccagcgtacggtccagggcgcacttagcaaccagcttggcaacaatgtcgaggcttacgtcgacgacatcgttgtcaaaaccaagacaagtgactcattgattgacgacctgcgggaaacgttcgacaacctcggacgatatcgcctcatgctcaatctagagaagtgcacgttcgaagtaccgtcgggcaagctactcggattccttgtttctggcagaggaatataggcgaatcccgagaagatcaaagcaatcgagaacatgaagccgcccacatgactcaaggaggtgcagaagctaaccggatgcatcgcagcattaagcagattcgtcgctaggatgggagaacgaggacagcctttcttcgccttattgaagaaacaagacaaatttgtatggacacaggaagccgaagaggcatttattgcactcaagcgctacctatcaaacccccctgtactcgttgctccccaacctaatgaagaattattcctttatattaccgccacgccatattccgttagcaccgtcattgttgtcgagacagagaaaatacagcgaccagtttattacgtcagcgaagctctccatgacgcaaagacaagatatccacatattcaaaaactgctctacgcagtcatcatgacatcaaggaagctacgccactactttcaagcccacagagtcacagttgtctcctccttcccccttggcgaagttgtgagaaacaaagacgttgtcggccgcatcgcgaaatgggtagtcgagctaagccaatttgatatccactttgtgccgcgaacagccatcaaatctcagatactcgccgacttcgtggccgattggaccatgccagataataagtcagacaaccaaggtg

SEQ ID NO: 23143 - DNA, 3609 bp, Oryza sativa
attcctgcagcccagcactccagacaatccctctgacttggccgttctcgtgctgggggctagacatacttgggccattcccacgaggacagggcggctacagattcctatttgtagcaatcgacaaattcaccaaatggatcgaagcagtacccactggggaaatcaaggccgataacgccatcaagttcatcagaggtatattatgcagatacggactaccgcaccgcatcataactaacaacggccctcaattcatcagcgccgatttccaggattactgcatcggcttgggagtcaaaatatgtttcgcctcggtctctcaccctcaaagcaatggacaagtcgaaagggcaaacggcatagtactacaagggataaaaacccgcgtctacgacagactcatgtcacacgacaaaaaatgggttgaagaactcccatcagtactatgggccatgcacaccacactgacaacatccaataaggaaacacccttcttcctcgtgtacggctctgaagccatgttccccggcgagttacgacatcaaagtacacgagtacagaagcattccgacgagaaccaggagaaacagcgagacatcgatgtaaaccttctcgaggagcatcgtgagcgagttgccgttcgagcagctagctatcaacaagccctccgccgttatcacgagaagcgcatccgagcatgcatactttcgatcggcgactatgtcctcagacgagttcaaacccaagcagggcaaaacaaactctcaccaaaatgggaaggaccctacacgatcacacaagtcttgcggccaggcgcattcaaaatcgcagacggcgacgatcgcgaactagcaaattcgtggaacattgaccaactacgtaaattctatgtatgagtcaataccactgtacctgtaagcacccttacagtatcaataaagcctatttctaagtcacatgtcacgaccaaagtgttttcacccaatgatcccttactctgacgacacctagcgttgaaacctgtccttatgtccctttacgccgtcttgacaaggcctccgaggaacctaagggatcttcgactggggacgcctagagccgataaggccttgtcagatcctttagagacgaaagaccatgtaagatctggtcgtgtaagagttctcgccgtgcgtattaaccaagtcgtgtaatcggaaaccgagctttccaacttcacggctgggtgctaggatcagagcttattcaaccaagacaggtcaagggtccaagagccttgtcctccgagaaaattcctccgacgacaaagctgggggctagggagagtgtacgactcaaacggctaactaaagtcattaactgagaacacactcatacacacgacatccagagtaagaaacatttgttaaagatagatttctttattcacaaaatatttcttacagtttgtacataaatatttcgctgcattacatcttcccctaagatatctggtcgcagggtacaaatactaccaagaaagccaatgccagtccattgactggaaaatcttctcggccaacggcgacatcgacctcgcaaggtggtctatctccgccggattcctccgagaacaagaaaaaccttcacggaggaattcgagatccaggcgtgggcggtgatctcgcaggcaagctaacacatgtcctccgaaatatcggctcgcaagatgacactcttgcttcaaggcttcgtcgattcgcttgccgatgccatcgagttgggcacaggccccgttgagccacgagatgtacccggccgccgattcttcatgatcggcgcggactactcgaagctgcctgcataccctagccatcgaggtgcaacaattcttcaagtatgacccaaaccacacctcgcggcctcagagcgtctccacggcttgctctttcttcacggatagcatgattctctcgagttccaccacttcaaatttcgtcttccagtattggatacgacgatcttgggtcgcaagggcatccttgagatctgctaaacataacgaccactaagacaagctggaaatccccaaaacaacacaaaggtagaactcgaaggtagaatggctactcacttgaggcagttgtagtcacttcgacctccgcatcaagagtttggtcctcgacgtcatgtgggacgtgtggttcaaactcgaataccggaattatcgccagtgactcgggctgcccgcgctgctggacatcctcgtcatcagcatctctacagtcgacaagaaaaaacttccgagatcaacggtgaacaaggatgataatcacacgcacgaaggcaaccagagttcaagatttacaagtcacaaaaaatacaagaagtcctactcttcaaaaagggggaggacagactcccccaggtcatcgacttcttccatcaccttcttacgcgtgtcgcttgccgccccctgatccaagatctcgcgcatatcgagttcaggacgcgacaacctcacacacgcgaggacatgacacgccccggtatagatgccgttggacgtctcctccgcgatcctggccgtatgcttggaggggatttccccatcgccgtcgccagctccgcaagagaagaggtcaacgagaactcgtcggggttcgccgggatcgtggacttgatgccgcactcctcggcaagctggtggagaccggtgtaggtgacccgcagcgaaccacggatctcggagaggttatccccgagttccgacatgcggtcctcgagccccttgcgctggcgctcgttgccggccaccagctccctcatcttcgtgaggtcctcgcgggcctcagcagttcccgcaccaagcgctcggcacgcgcgttggccgccgccgtctccgccctcgcctctgagatctcgcggccgatgccgcgagcaccggcttcgagaaggcgccccatttcgacttggagctcctcccaggtgaggacggcctctggcagaccacgacccccagcgggatcgctgacggggccgcttggcgtcgcctcccgactcccgaccacgggcacgacatctgttgacgccgtgacaggggacgcgctagacgttcccccggacttggcccgagcaacgttcgcccgcgcctccctataaaccgccatgaatcaaaattccactcaaacagaagacacgagaatctaaaagtttctttacttacttctcgccgatcgtcacaatgcgcttacgtcgcgcaggcggaggagacacgtcggaagcctacaaaacaaccaacatagagtgagaacaaaccttccttgctacataacctgacgacaaggtgaaaattactgagggagtcgccgccttgcggcggtgtccgagcacagacgagaatttcctcgccttagtcggagctttgccaccactagtggtggcagcgtcagacgccaccttgacgaccttctctttcagagatgccgccacctgatgatccgcgagcggaccgacgacatcagtcaaaggaagggcctacactaaatcatgtcataagctgattttgagcaaagaaggcggacgcttatcgaatgaactcacattgattgcttcgtcgtgctccgt

SEQ ID NO: 23144 - DNA, 1390 bp, Oryza sativa
aaccagtataattcttgtcttttgattactcgatgtcgtactacgtagatccttgtaccagcgtaccccaataccctctatatccggtctacgggtatcacccgtcgacaatcgtaatcaaaaaggtgcatcgaaacgttatcggaagggaaaaaaagatacatttttgaactaaacaaactatcagaccagcaaataaatgatccacccacacagtacatttagattaattaggtgcatgcatgtttaggaacagcccatgcaatacaccacagaccacacttttttgctaatattaaagcacaaactaacaaagtcagcagtactactccatccgtcccaaaaaaagacaaaccctaattttcgtgcccaatatttgacgtccgtcttatttaaaaaaattatgaaaaaaattaaaaagacaagtcacgcacaaagtgttaatcatgttttatcatctaacaacaataaaaatacgaattataaaaaaatttcatataagacggacagtcaaagttggacacgcaaacccagggtttgtctttttttttttttgaaggagggagtacttgtcaaacttggcccatctgggggtaagagccgcgcctatttagcatgccacagttccgatcgtgcggtaggaactagtagccctcgtccccacagtatcgtcgacatgagttcttgaggatataggtcccatatgttagtgggcccatgtttcttttgtgtgaatgactaatgggtcccatgcatattttttaattctaccgccacgtaggtgctacgtcaacgctacgtggaccgaaaactcggtcaatattgccacgtaggcaccgcacggcgccacatcagcaaaaccgcctcccaaaacggtccagggagtcaaatgcaccggttttaggagtttgggggtcgagatatccgattttgtaatttaaggtcgtggacatttgagggtcataaagtgaacttattcccgctgcaaaccccaacacactgatgggcccaaggcccatgagtctccccgctcgggctgaaaccctagcccctctcactatataaacccccggcgccgcacgcggccaacccttgcacccccctcaccacacactccacacaggtaagaagccggcggcggcggcggcgatggtttccctcaagctgcagaagcggctcgcctccagcgtgctcaaatgcggcaagggcaaggttggctcgaccccaatgaggtcaacgagatctccatggccaactcccgtgagaactcccctcctcgtccctcccccccataaccctccccactgcccgaccgtatgatgttctgtgcctgctacttgtgtggtgttgatgcgtgatttgcttagatctgaagccgggctgcaggaat

SEQ ID NO: 23145 - DNA, 695 bp, Oryza sativa
ttcagatttctgaaggaacaatctttttgcagacttcagttgcgacagagacaagatatttgcagacaaggcaggaatggagtaaaaacaccttgcaaattcgatgattttttactgtacacatattacaggactgatgttacattatctctattcgctcatggcggataatctgtatttaattacccttccatatctcaggttcatctctctacatacaagatggcatacatgcactgacaacgaagaactaatatgcatgtacagacttcttgctttcacatatataatcctttcttcgataagctgaactccggacgagtaccagcaccgccattgacgatggagctcatcgtcgtcgtcatcttgtcagccttgtgatgaggaagacaagaacctcaacatcgaggctgcaatcttttcactccccagtcttttccattgtctcgtctttgatgcagtagcagggaatgaagcgaaatgcactcggatttagattaaatgcattcactttgagctcttcttcccccgccatcttttccggcatttctcctcaccaaccttctgaatatttaccttggtctccttcaaccgagacttgtagtctttcttccatgtcgcgaattggtccttgatcttccggagctcgccgtctaggttcatgtttgaaccaacctgtccggacatcatcgtcg

SEQ ID NO: 23146 - DNA, 706 bp, Oryza sativa
ctggttgtgagttcttcagaccatgcgaatttggatttgagtacattaccagtgtcaggaggtatcaggatatttcaagttgtaaattctatggatgacaatagaagatatttttcatccttcttcaaaaataacagaagatgcttctccaagttgttctcacatcacattaaccttacaattgataatgagctatggagcagttttcggcatttgagaactttagacttaagccgcagctcaatgacagcattgcctgattcaattagaggactgaagttgctcaggtatctaagtattttccaaacaagaatctccaagctcccagaatcaatttgtgacctccttaatttgaagatcttagatgcaagaacaaactttcttgaagagctaccacaaggcattcagaagctggtcaagctccagcatctcaatttagtcctttggtctcccctgtgcatgccaaaaggaattggaaatctgaccaaactacaaaccttgacaaggtatagtgttggaagtggcaattggcactgcaatattgctgaactacattacttagtgaatatccatggtgaattgaccattacaggattaggtagagtgaccaaagttgatgatgctcaaacagccaacctgattaataaagagcatgtgcaaactctaagattagattggtctgatggattctactctagtgaatgtg

SEQ ID NO: 23147 - DNA, 1910 bp, Oryza sativa
tcttgacgagtttcaataaatcgccaaatgccttgcactaaccccattttttgccttccattgcaagaactccagagtggtatccaactttttgtgcccctgctcgcaacctgggtacaacgaagttctgtggtcctccaacatcttgtccaatttatgggcctccttttcactttcgcagtcctccctggcgtcctgcaacatctgaccaagatcatccgcaatgtcgttaccatcagcagctatttcctcctcgcccgtttgattttcttcaaatccatcatactgagcaaagtccggaatattgtcgtcttccacttcatcttcttccatttcaacaccttgctctccgtgggatgtccaacaattatagcttggcatgaaccccgactcaaacaagtggaaataaatagtcctggatgcagaatactccttctgattcttacacttattgcatggacaacaaataaaacccctttgcctgttagcttcggccactctcaaaaaatagtgcacgccgtcaataaactctttggaccgccggtcagcgtacatccattgccgatccatctacatgagtcaaaaaaaaccgtacacaaataattattcttacaataatgacagtcatacaataattataagatatctttattcatacaaaaatcataaaatattacactaaataattcttaaatactatttgtaaagttttaaacaattttaatgtgttttacttcttttaattttcattttagtttgttttctattatttaagattaactttcactagagttttccttctcaactattttataaaaccttgtttagcaaatgaactaaatttctatatattctttcttccccacacacattttctctctcatcaacttacaactaaattttggagaaaaaaaagtgtgcaaaacataggtgcaaatgtagtatgacaaaaaaaacattggacgatgaagttgcaaaccttttaggcacctccgatttgtatgtaatcaccaaaataaattcaataaaaattttggcatgacctcccctcttttttgaagaaattttgaagcttgctcaggcagctggagaaggaagaagacatatctataggggtgggactttagtcccggttggtagcaccaaccggggctaaagatcaccaggatcggatctttagccccggttggtaataccaaccgggactaaagttacgatctttagtcccggttggtaatagatcccgggggggcctgacatgccctgacagcattcgaaccgggactaaagataatctttagccccggtttttattgcatccgggactattgtggaaatcgtccgaccgacgaaagatggtttctccaccagtgagatgtatactagcattaatgcatcattagatctaaacatgtaaactaagcagtaaaacatgaacagatcaaatatgcgcaacatgtcgaacacgtaccgaggtaacggaaagaccggttgctcggcaggaactactcgcggttgcgagcgtcgacgaaggcgcgcagcatgcgagcggagaggaaggcgagccgtcgcggacgaacagggagcagtcgcacgaagcgcttcccaaaaaccttattgccgccttctcccggtgcaggtcgtcgaaggcagaagttccggagacctgctctcccgatcgcaggtgcacgccgacgagcgggatggagtagtctacgagcgacggtgcagcacagaggaggaggcaaaccctagattgatttcgtgtgttttgcgtgaaggcggcggctcggtttatatagagataggtcgcttgatcagggcgctcgcacgatctccactccgcataaccgaaccggataagtcgcgcgtaacttatccggactccacgccgttttcacgcaccggat

SEQ ID NO: 23148 - DNA, 30603 bp, Oryza sativa
ccaattttgcggaccattcgacgcgtacgtcgtgcacgtgcgccgcctgccctgccctgccaggccaggccaggccaggcgagcgagtgtgttccccctcttctctccaccacacatgcttcaagtggctaggagggcatcctcccttttaaggagatccccctcttctagaataagcaaggtggtactaaactccacatgcatgccatcccatgaggtgcgcttttgtgattttccaaagaattaatcttcgaatgggccttagcccatctatcaattccaacaatcccccaccaaatctcaaaatcccactgagatttgccttttccaatgtacttttatataccaacggttcgatggagactgatcaaggttgaacatccacctagaactccaagctacacttactcacaacttgaacaatggactacgccttgaattgcatgtcttgtgcaagcaagtttcactcaaagtcttatctggtactagaccgtctgtagactacccctcgggtggagcatataagtcatactcctaggtctttagtaagcttcctagaagattcacccaaaatcttcatagactgcgaccaacagtcaagcttacaaaggtgagttctttcatgaatgctttgcaggacagcatcttcgctaattaaagccaacagaactcattaaggcatagccaacctgccttgcagctcacgagagtacatgcatcttcacttagagagggtatagattggtactctcctctagtttactaatggtttgttcttcccaggttctaattcacggaatctccgatcacatagactgggttaccaccatagtataactcacatgggtctcaaacacatctccttcgatgcattatctatcacatttcgtgatagtcccttcgtgaaaggatctgccaggtttctaactgtttggatttaatccaacgttataactccagagtttctcagtttcctgacagacttcaatcgtcttttcacatgtctagacgatttcatattattcttagaactattcactttgacaattaccgtttgattgtcacagttcataaggatagccggcaccggtttttcaacaataggcagatccattaatagatcacgcagccattctgcctcaacagtagcagtatccagtgccgtcagttctgcttccatggttgacctcgtcaaaatagtctgtttgcaagacctccacgaaacagcaccaccacccagtgtaaagacatatccactagtggctttgatctcatccacatcagagatccagttagaatcactatatccctccaataccgcaggatacccagaatagtgaagccccaattccatagtacctttcagatagcgcattactcgctcaagcgcacgcagtgatcatctcccggattagaggtaaaccggctcaacttgctcacagcaaaggagatatcaggcctagttgcactagccagatatatcagcgagccaatgatttgggagtattctagttgattcctagtaattctcttattcttgcgaagcaacaagttaggatcataaggtgttggagaaggcttactatcaatgtagccaaagcgattcaagatcttctccacataatgggactgcaagagtgtaatcccattctcacctctaattagcttaatgtttaagataacattagctactcccaaatccttcatatcaaaattttgagacaataatgatttaacctcatttatcacctcaaggtttgtcccaaatatcagtatgtcatcaacatataagcacagaataactccctcacccccaccatggcgatagtatacacatttatttgtctcattgactgcaaagcctgcaaatgtcaatgttttgtcaaatttctcatgccattgcttaggagcttgtttcagaccatacaaagacttcaacaatttgcacactttgccttcttgaccttcaactacaaaccaatcaggttgatccatatagatctcctcatccagctctccattaagaaaagctatcttaacgtccatttgataaacgagaagaccatgtgaggctgctagggaaagtagcacatgaattgtggtcaatctagcaacaggtgagtaagtgtcaaataaatcttcgccttctttctgagtatagcccttagcaacaagccgagccttgtacttttcaatagtaccgtcaggccagagcttcttcttgaacacccacttgcaccccacaggttttcacctcccaagtcccgttagcgataatggaatccatttcactacggacagcctccttccagtagtctgcatcaggagatgcgtatgcttctgaaattgacttaggagtgtcatccacaaggtacacagtgaaatcatcaccaaaagacttagccgtcctttgtcttttgctccttcgaggagcttcactgtcatcctcctctgtaacatgttcatgtgtatgttcagtttgttctggtggtgtgattgaactgggtattatttcagagggtcgactagaactactatgtgtatccttcattgggaaaaagctctcaaagaaggtagcatcacgagactccataattgtaccaacatgcatgtcaggtacctcagattaactattaaaaatctataggcaatgctgtggtgagcatatcccagaaagacacagtccacagtcttaggtccaagtttgcacttcttcgttattggtacattgactttcgccaagcacccccatgtgcgcaagtaagaaagtgatggttttctcccaatccatatctcatatggtgttttgtccttatttctgttaggaactctgtttaacacatgattcgaggtcaacaatgcctccccccaccatgccttaggtaatcccgcggtgtccaacatggcattcaccaagtcgatcagtgtacggttcttcctttcagcaatcccattagactcgggagaatagggaggcgtcctctcatgtataatgccatgttcctcacagaataagtcaaactcgtttgagaaaaactctccaccacgattagacctaagtctttttatctttctgtgaagttgattttcaacttctgccttataaattttaaaatagtctagagcctcgtctttcgttttcaacaagtacacatagcaaaatctagtagcatcgtcaatcaacgtcatgaaatatcattttccacccttcgtcaacaccccattcatttcacagagatctgagtgtaggagttctagaggtgccaagttattgtcctcagcagccttgtgaggcttgcgaggttgctttgattgcacacaactatggcacttagaacctttgacaatggaaaacttaggaattaaacacatgctggaaagccgagacatcaagccaaaattaatatgacataaacgtgagtgtcatacattagcctcatcatccacactgccaaaaatatggttcacagacttattgcagaaatcagaaagggaaaagcggaacaggcctctgtactcatgaccttgacaaataaaatatccatgtttagacacgactactttattagactcaaaaaccaacttaaatccgtctctagtcagacgggagccactaacaagattcctgtcgatagaagggacatgttgcacgttcttcagctgcacgatctttcccgaagtaaacttcagatctaccgtgccaacaccatgaacagaagcatgtgacccattccccattagtacggtggaaccccgtgcgacctgataagaagaaaacaatgagatgtcagcacaaacatgtacattggcccctgtattaacccaccaattagtagactgattaactgaaaaaacagtaggtaaattaccatacccgcttccatctccagtgttgccaatggtcacattagcagacttagaggtctgccctgcaggtgccttcatccccttgcgttgtggacacttcctggccagatggccaggttgaccacacacaaaacaagtcctctcatcctgattagaattgttgttgttgtttttcttcttgaagttggtggtctgctgagctttgtatttccccttgctcttgttctgggccttgtgcacaacattggcagtggactgcccaccatcgcccttagacgcgacatctttttcccgagctttctcctcaacatcaagagacgctatcaacccctcaacggatcgtattcctgtctcttgtgtttgagtgcagtaccgaaacctctccaagatagaggtagtttcgcaataatgcacccggccacaaatttatcgggtaagacacacttaaggagttcgagttccttagccatggtttgtatctcatgagcatgttcgactacagaacggttgtcagccatcttgtagtcatgaaactgctccatgatatacagatcattgctagcatcagtagcaccgaatttagtattcagtgcatcccacaactccttagcatcggtgatatgcatatacacctcgaccagacgatcgccaagcacgctaagaatgcatcccacaaagagagtagtggcctcatcgaattctttctgctgatcagcattaagaacgcccataggcttgccagtactcacccagaagcatttcatagctatcagccacagagtgatcttgatctgccatctcttaaagtgcacaccggtaaatttatccggcctcagtgcatcggcaaaaccagccatagtaaaatcacagcgcctataataaggtttttggattgttgagaatataggcatataatgatttaatatattccataaataaatcatgacattacagatgtataatagcattaacgcatcattagatctacacatgtaaactaagcagtaaaacatgaacagatcaaatatgcgcaacatgtcgaacacgtaccgaggtgacggaaagaccggttgctcggcaggaactactcgcggttgcgagcagcgacaaaggcgcgcagcacgtgagcggagaggaaggcgagccgtcgcggatgaacagggagcagtcgcgcgaagcgcttcccaaaaaccttattgccgccttctcccagtgtaggacgtcgaaggcagaggttccggagacctgctctcccgatcgcaggtgcacgccgacgagcgggatggagtagtctacgagcgacggcgcagcacagaggaggaggcaaaccctagattgattttgtgtgttttgcgtgaaggcggcggctcggtttatatagagataggtcgcttaatcagggcgcccgcacgatctccactccgtgtaaccgaaccggataagtcgcgcgtaacttatccggactccatgtcgttttcacgcaccgaatttttcggaatgtttccaaaacaaaacaaatccgaattttcctgcagcaaaacaaaactgcaaaaggaggctgcatctgcagcaagggtgaggagccaattttgcggaccattcgacgcgtacgtcgtgcacgcgcgccgccacctgccctgctagacgaggcgaggcgagtgagcgagcgagcgcgtgttccccctcttctctccaccacacatgcttcaagtggctaggagggcatcctcccttttaaggaggtccccctcttctagaataagtaaggtggtactaaactcgacatgcatgccatctcatgagataggcttttgtgattttccaaagaattaatctttaaataggccttaccccatctattaattccaacatgcaccaaaccaaataaccaatacacctacaccatgcggccctatgtatgaaagaaacagtactatatatatcctctgctttttctcggggtatatattccggctaaattattggcatcgcaatacacgcgcagtttcggatgacactgccagtacgtatacatatctagctagccggtgcagtagtgcagcatcgatcgccaacacacatgacaacgagttctcggcacgagatcgatcgcgatcgatcagcagcaaaccaaagtacacctatacaaaagcacgttaattatatgctctcgtactggatgccgctagcagctagcgttacatttgacaggacaagtagctatctagctaggccggttggaaactacctgtagaaagaaatacgtttttccgttccggtacatggcctcgtcgatcgtagctgcagggtaataattagcgagcatctggctggcccgcggccactgatctgtactgccgctgcacctcaatgatcaaatcaaccatggaccggaagatgacatgcactcgatcgagatcgcgcgaggctggcaccggcatctgcaggttgatctacactacgcaccagcacagtagcacagtagggagtgcaaccgcccgctcggcgagagcgagaaggcagtagcagatactagattaattgctttttcagcatgcgtacgtttcggctttgcaacggcatcggaatcggttagcttttccccatcgaccggccatacggagggggccgggagagagagaggtcgaccgagagagatgggtgagagggtgatgatgagtgcacgcacacggaaccagccgagccgagccgagccgcgccgtgccgtattgccgtgtagtgcgatctatcctatgctagtcgctgcgatcgcgatatatgcagctcgtacgtaatatttctagctcgttcctgtgtgttcgtgctcgatcgctcgcagtgacgtgccgcggtataccgatgtactccatggacgaagagatggaattaatgaggtggtcagcgacagtcgacagacgacaaaaacccccagctctcgccggagcgagcgtatgctgccgttggtgccaaatcgtgccaaaggaccgttgtagtagatttcgtgcgggctgtagaaattgctgtgcatgagaacacgcagaaatctatctatctatatatttatatttactagtaaaatacccatgatttattgtgggcaaaataaaatacacaataatatataacataaacaagttctttaaaaaatatgctagtgttatttatttgcttattagagtgtccttgatattatgcatcagcatctttagtgtcttttatactactatagatatgtatatacgaacacttcttacgagttgacacattaaccaatcaatattgtaattagatagatcatattattgtgatcgaatatttatatttaatagtgtgctatatcaaaaagtcatttgttctagatggtgttgccacgtcaaaattcacctaaattttgataattagatatacattaattattaatttaggaattaataaatctctactattatacaaattgaagatgtcactactagaaaaacgatttttcatggcgtttggaaaatagtttttatggcggctaagtggaaaaaccgccagcacaaaaaatcgtgggggtcacgggctgccagcggaaacacatcttcgctagcggtcatcttaagccggccgccagcgaagataggatatcttctctggcggccctcttaagttgacgacagcgaagataccatatcttcgctggtggtgtggtgacgtggaccgccagtgtcggagaatgaactcctccaccaaggaaccgtgaggcccccctttgtgagttcggccgggagcagcgggtgagattcgagggcttggtgagcggagctgtgtgatctaagggcgttaggccccaccaagacgatgagacaaaagaggtttatacaggttcgggccgctgagaagcgtaataccctactcctgtgtatgattgattgaatgtagaacacaagtgcttggggttgcgagacccaagcgccagttcgctccgaagtcccccctccaccactaggcctagaccttcttttatacctcaaggggttaccacatgggcccaacaacctaacctagctctggtggagaagtattataatctttgcattaaattcatgtcttgtctcttgacttgggaagccaagcacacgtcatcttgatgatggggcctgtcaaatcttgccgcttgacacggggggtgcccctgtcagtcaccatttaatgggtgaagacttctgggctcctattacaccgggaaacgggagccttgctttgaccagagcgggaggacctactccggttgggataaaaggatgagaacctctcaccatcactatttgatgggacatgtcaggctgcacgccgcctgacacacgagcagcgcacaggcgcactagccagtcccatcggtcattcgaccggtcacagaccggttgagtgtactgcacgccgcatagcgtggcgcgaccgctcgggacgccataaatgcgggtagatgggcacctggaagcggacacctaacccaccgtacgtggtgacctagagagggggtcgggggtgcccgacccctagtcacgggagggggcagccgccgcccgacctcgggcccgatcccccctcgggggggagccatgtggcgcctggggcggccttctccctctagtcttggctagggagtggccgccgccctacctcgggcccgacccctctcgggggagggccacgtggcattggaggacagcctcctccatccagtctctaggaaggagtggccgtcgtcctacctcgggcctgactgccctcgggggagggccacgtggcatcggggggcagcctcctccctctaaacctgatactatcgggctcatatcaccgacagtagcccctggcgttagccctgaccaaaaccttccccaggtggtcagggttgacgccactttcctagtctgatgatatgtgggcccgatctcttattctttctttgctggcactaggacccatgcgcctttttcgccccagcctgagggcgactcgctagcccgtaccttaggctatgaacttattttctgtatatatttagcaaacgttgttatattctctcgggcccgtgaccttacgccacgtacctcgcttgcccctgccatttgttaacctctgttcatgttctacttcatctactcaaatgattattttcgtgagtgtgaggattgaactttccatagccagcaatcttcacccgcgatcaagctaagctgggcgccgtagccagccagcggggccaaagccagccgctacagaagagctagcacagggggccccgggcgtcgacggtacccagagctcgacgcagggctaggatagagctaggaatcgtagcccccgcactttaagcaaagaatcgtttgaatggatgaagcgaatacaaactttttgttaccaagggagtcaagccggcgcgcgacacataggtaccgcaggaccgcgaggaagagatgggcgagagataaatataagcaataataattttatgcaaacgattatcttcgcgtgagtgtgaggactgaactttctatagccggcaatcttcgcctgcgatcaagcgaagctgagcgtcgtaaccagccgacggggccaaagccagccgctacggaagagctagcacagggggccccgggcgtcgacggtacccagagctcgacgcagggctaggatagagcttggaatcataacccccacacttatagcaaagaattgcatgtatgaatgaagcaaacacaaacctttagctcgaagagggcctcccaccatgggttccgaaccatcttgggaaacatgtgaccacttagcaaacgaggtcaggttcccacgagcctgtgtccccacgctacacattctgtttgctctttcctttcagtggcctccttccaatctcttttccttctacatggacgattactttcgcacgagtgtgagagccgaaaactctagagccagcaatccctgtccacagttgagccaggccgagtaccgtagccagccggtgggaccaaagccagccgctacggaagagccagcacatggggtcccgggcgtcgatggcacccggggctcaacttaaggctaggataaggctagaaaatttagcccccacacttagcaaagaatcgttcatgtagatgggagagaggttgtgctcttaccaccgagggagcaaacaaatgcgcaatacgcgggcgtttcagggccatgagaatagaatggggggaaataaatataagatttcaagctaatgaattgaaaatttgaaaatacttgaagcttgaaaggacgatcagttgagccgggccgggcatcgtagccagccggcgggaccaaagccagccgctacagaagagccagcacaggtggtcccgggcttcgacgacacccggagctcaaaactgcaagagtcctcccaggagtgaactgaggcggcagcaggttcatgggccaacctcgcgcttggccactgagggccatggggaagacgttcgccatgacccggtcgccaccccccgccgcctctatgatcaccgtgcagatctggagggactcggaggggtcggcgccatcgtcgtacttctcggtgaggcagggctggagctttgggggccctcggacattccgaagactcgccacaaagacctggtagccaagcttacctggtggagatgtggggggccttgccccctgcctggggtggcgcgacactcatgaggatgctgcgccttcccccgtagcggcggcgcgacactcaccatgccggcgctcgaaagaacctcaaaaatcacgaacgcgccccctacctggcgcgccagatgtcggagaaagaactcctccaccagggaaccgtgaggcccccctttgtgagttcggcctggggcagcgggtgagattcgagggcttggtgagcggagctgtgtgatcttgagggggttagaccctcccaagacgatgaaacaaaagaggtttatacaggttcgggccgctgagaagcgtaataccctactcctgtgcgtgattgattgaatatagaacacaagtgcttggggttgtgagacccaagcgccagttcgctccgaagtcccccctccaccactaggcctggacctccatttatacctcaaggggttaccacatgggcccaacaacctaacctagctccggtggagaagtattataatctttgcattaaatgcatgtcttgtctcttgacttgggaagccaagcacacgtcgtcttgatgatgaggcctgtaaatcttgccgcctgacacggggggtgccactgtcagtcaccatttaatgggtgaagacttctctgctcctattataccgggaaacggaagccttgctttgaccagagcagcaggaccgactccggctgggataagaggatgagaacctctcaccatcactatttgatgggacatgtcaggctgcacgccgcctgacacacgagcagcgcacaggcgcactagccagtcccatcggtcattcgaccgatcacagaccagttgagtgcactgcacgctgcattaaatgcggcatggcgcgaccgctcgggacgccataaatgcgggtaggtggacacctgaaggcggacacctaacccaccatatgtggtgacctagagagggggtcgggggtgcccgacccctagtcacgggagggggcggccgccgcccgacctcgggtctgatcccccctcaggggggagccacgtggcacctggggcggccttctccctctagtctcggccagggagtggccgccgccctacctcgggcccgacccttctcgggggagagccacgtggcattggaggacagcctcctccatccagtctctgggaaggagtggccaccgtcctacctcgggcctgactcccctcgggggagggccacgtggcatcggggggcagcctcctccctctaaacctgatacccccgggcccatatcaccgacagccagcgaagatacctacatcttcgctggcggccatcttaaccctccaccacctcaaatcattttctatggcggttcaaacgaaccgacatatgacgaccgccattgaaaatgcgttgaactatatcacccagctacagtaacttcgagcactattaggagcacgattttctctctcttaagaacacatacacaggggataaggttttgatctcgaatcttttgatgattgtttggtatgtcgtccgattcgagtacggatacgatagtccgacttcaaatccgtatcctatttaatcgccataaaaaaaagtctcaaatacatgtacatgtatgtctcgaatttgttgctcgcatgtatagaagaagagaacaggtcatcagatcgattcgtactagaatatactgcacagacgtaaatttctctttattagtttagaaagaagcgcagctagcatcggctgcatgctcttcctgatccgattgtgatatggatgagatgatacagcttggctatttttcaaaggttgctgcataaacacccatgtagacatatcttcatgttatttctatcatttatgaatttggaatattcctattatgtttttttttgtgagattttcataatcaggatgaagccatcgcaatgcaataaccagccacgtgagacaatttcacaattcataatgctcaaatactgcataaaaaatatgccacgatttagtttttccgtagcaacgcacgggtactttttctagtcattaaaaatagtaaagtccatacaaccttgataatattaactccgaattttataatactgataaacatgaaaatggctacaattcagaccccgaatcgagtacaactcgatactagtacatatttggaatcatgctaaatctataattaggacttcaaaattttagacttaccaaacatggaatagctcactactagaaaaacgatttttcatggtgttggtctattattttcgttggcggccatacacgaaaaccactagcaaaaacatatcgaggggtggggggccatggaccgccagcgaaaaccgattttcgctggcggccacgctcagaggtccgccataaaaaaaactctattttttttaggcggacttcttaagtgtccgctagcgaaagtcacgttttcgctggtggtaggtaagaaataccactacaaaacttttttgaggcgaacaaaatccacccaccgcccaccgccaagtccgtccttatcccttttcccttctcccttcccatcgcccagtccgcctctctcccttctccgtctctcctcccttccttctccaccgccgcgcctcgtcgcctccccaccaccgccggctgccgtcgccgcagctccaccgccgcatacgaccgccgatccggccccattctcttcctcttctaactccctctctccctccacggagtgggcggcgaaggcggcggtgagctcgggcgcgggcagcggctctcaggcgcgggcgcgggtgctggcggagctcgggcgcgagcgcggcggtgactctcgggcgtgggggcagcggctctcgggagcggggggaggagctcaggtgcgcggggacggtggatccgccgccgccgggcctcggggaggccggatccgccgccgctcggccacgggaaggctggatcagccgtcgccggaccacggggagggcggcaccgacctcgatgccgtcgaccgtgctcccgcggctcccccctccgaccatgctgctatatttgatttttttttccttcttttttttgcatgttgttccatatgatgcacatgttttgatctgtgtaaatgatgtttgatctgtgctgatgatgattttgtatttcatgtttgaatttggaaatgagcagcgaatctagatgtggatttgaattttgaaattaatgaatcaataggcggctgcatgggtattttcgctggcggctgtatagctgcatgggtatttctttttgggctcaaaatagattttcactggcggccgatttaacacagccaccgatttaacacagccgccagcgaatcgctggcggccgtcttaagccaatgctagcgaaaatggttttttgctggcggctagctcaaagacgaccgcccgaaattggatttttgctggcggtcaataaccgctagcgaagatcttgattttcactggcctttgctttgtggcggttgcaaattctgccatcaaaaatccaaaatggccgccacgaaaaatggttttcgtagtagtggctgtcactaagaatacaaactataatgtatttcatccggtactaagtcccatatgtagtaattatgaattttagaattattaatttgtgaaaatcatatatcaatactaaaagccgtccgacttatgttgctcttaactaactacttgctaaatcgtatgccctccatgattttcacatgttcaaatacgagagtggattttaaactctcgaagggacatcccctcattgcttacataccactcaaatagttatgaatttattttttttaaaaaaaatattaacatgtgatatatcactctacaaacatagaacttaaattcaacttcaatacatcacaacagagaaaaaattgaccgtgaatatatgttaactagctgtagtttatttgttttttgttgcgatatgtagaagtcgaatttttaagttatatgtttgtgaaataatatattacatattaatatatcttcttattttttttataactatttgagtgagatgtaaacaacaaggagacattccctcgagagtttataatagtttcccatacaagtataggtattctgctcagttttattctatttgcttattacaggcacccgtaacgatcaagttggaataagatggtaaatttcaccgaaaagctagaccaaccagtggagtgcatgtatgtacttactttattatattcctgccaaggcaagcaatattggaatatttgataaataatgctatattcccctgctctttagttcgtctcagtacaccacagacttgcaatctctacactttaattataccatagcaaacgtagaagtactgtaccatcatatggtgcctgtctgattctcgtcagctcattcctgcaaattttgcacaaatttaaaaggcgcttttaagatcactttgccgtcgtccagccttagcttatgtttgctttgcatcatgaacagtcgttagcctttaagcgacaaacctctcatagaagctacacaaagtacgcatgaacctcacttttgctttttcagaggtcatttataaaccatatctgcttgggcaaggtcgttgcctaattgggcaactgcagatttgtaggcatcaattatatggccttttagatttttgttaaacaaatttgtttttaaaaggttttacacaaagctgttgctttgtttctagacctattttatttttcagtcaggtacaatgaagggttatgcacattgtatgcgacgatgcaattttttttcgcgaacacgtatgcgatgcaatctacggaataagttctcttaccaaggataatttatcatgaaaaagttgaaatgataatccagagactagttttaggccaatctacaaaggtgtgatgagaaaaaggaatccatttttcttgcatgccaaaatttagagactatggttatatggattttcgtcaactttgaatcaagatttactaatagggttcatgtctaaataagttgtatctcttatttttgttgacggagtgattatttgtctttcttttcattcgatgttagttactttttgttgagcttttaagtcaacaattaggcaactgggccgcatgttatccaccatcaaaattgatatagaagatatgatttttttttatggttgtcattaccctcttccacgcttatcagttacttatcaaggaattatagtagcaacattggtatgagtttgctatgagggctgctatacgtatgatatgttttttacgatagttgtacgatgaaacattctccgatgttccgttccggctataagtttggtctcgcatggatggatatatcttgaatcgctcagcccatatgcatatttaaataaaggatacggctagatcgcgcgctagcggcatattgctaaccagcgacgcccttctattccaaaaaacagttactagtacactcaacagtacatgtctttttttttcttcctagagaattttctcctaaattacttatccgatctataatccgattacaccattatggttgttgcaattaaatctttacaataagatcttacacgattatattctgataaaaatatctatattgtaaattacttttattatatatgtaagttacttttgtcctatacataaattactttcagatttaagctctttaataacttatatcttttaaatcacgtataattttcatgatctatttacatcattatactctacgtaaaatatgagacaaaacaagatccatgttgaatatatttaaacatttcattaatttaaaagtaatttatttaaattgtagtagtaacttagctatgcaatagaagtaagttagcacaaaatagaagtaagttgttacaacattaaaagtaaattcgagagaaaaatattttgtatctaaaaattaaatttaaagtccataaattatagaattgactaaaaactataataaacataatcaacttaaagcattatgaatatataaatagtaatttagtcaaatctcaaagtaatttatatatatgataaaagtaacttaagtatataataaaagtaatttacaaatataaatattttttcattgcagtataatcatgtaagatctagttttgaagatttaattgcaacgaacacatgtaatcggattatagatcgaataagtaatttgagagaaaactttgtaagaagaggaaaaaaaatacatgtatgtgtaatagaaaaaaaagacatgtatgtgcgctggcttctccacggcttctatggttggcgttgcgcgataagacaatatcgaaaggcctcgccgattagtttttgcgttaaataaattgcaaaccaaagtttatgatgacatgttttgcaaagcaaactttagattgaaacaatataaaaaaagtatacaagcgttaatttacatggtcctactcttagacaatgcacaggaaaaaaaaaagagggactagcgtaacaaagaatatgtttctgaggccaaataaaattaagctaataggatggactttcctctttatatgcaatctagattagtattgttgtagattagatcagaccgtaagttcagatattaacttaattaggtttatagcataaataaaaaaaaggtaaaagactgcgatgagtttgtaaactttgtatatggacttcggggccatgagcaactcttgcatgtattctcatcacgtatctgtttctgtgccgtctgtttggtccgcgtttgatcgtactaatttcttactatgatgttttccgattgctatggtgtttcaatgcacggatctatcatacttcctccgtattcgtaaagaaaatcattgatgacaatgtttaaatcaaaccttagaaatataaatcataaataactctcaagttattaagtttaaaaatgtaaaaattatatgaatagatttgtcttgaaaaatactttcataaaagtatacatatatcactttttaataaatatttttatagaaacaagaagttaaagttgtgttttggagaccgtgtcgctattctaaatgacttctttacgagtacggagggagtatttatgaatgaagatagtaggtagtactatcactaataatcagatgtagccataattgtttcttttattacccttgaccccgggaaaacaaaaattctttaggtaatgattgttccgaagagctgtggctttattatacctcatgagagatataaagagattttaatgaacactaccagattgggaccataagttgatatgaaggcccacatataatcctcatttttcaatattctccattcatagtatgatgatagtacaatcttgccgatagtcactacagggggccaagatttctctgctcaattaacgcattctttcaacagtctgatatgtctggaccgtaccccatatggccatatactgccatacacagccaatcgcataaaagtcacacctctgggtctgaggttctcttgtgaaactaaaaccgttacatctgcccatcttattagggcatggccaacgcagagtatagtctcataaaaaagggtgatgctaaataggataaaatcacaccagtgatatccctcgcacagtgtaagccatacccccatcttaatttttaattcagtacatgttagtcggtcatatttttgcttttaaacccttggattattttaatttgcatatacgtccaatatttacagtataccctctaaaaatcacaaacatatataaacgtcaacccctcctctcatcaccatatctcccacccaatctctccctgcgtctcctttctctccgcttctcccctcgccggcaccgccggggagtctctccccagcgcgtcgcctctcccctccccggccctctctccccggcgctcccctctccggcggtgccacctgtctccccggcgctggatcgaggcggcggcggtagggcggatggaggctgcggtggcgccggatcgaggcgcggcagcgccggatagatgcggcggcagcggcggtgccccatcttcttctcccccgcctacttcctcgccatttttggccttggcgcgggaggtagttggctacaacgttccagggttacggtacggagcgacgcctctcccccaacacggctgctcgcccgttcctcgccaaaagctaatgaaactatgcgatgctatgcggggggtcagggagctctacgagagcgcggtcccggccgagctggcgcgaatattcgcgtcgggaggggtgagaccacgcgacgcgaatattcgcgggtgagaccacgctctagcatggagcgttggccatggccttagtgctctctaactttccagtagagtaacataaggttctctctatcataagaacgatgcatatgaatttatctctgctactttttcttcgttactccctgcgtctcataatataaggaatttgtcacatccctctaaaatctcttatattatggaggcggagagagtaccgatgaagaatatgagcacaacgtcatcattcctgatcaaaaatggctggcactatttacccaacgctcccgccggtagatcgaattcttatcgtggcttctcagttttgctcgcggaacctgcttgtctgctcgcccatcgaccatcggcaacttgggtttcatgtgagtcgaacagcgtgcagcgtgcacgcacagtacttgcccagcaaacagccgctgtctcgggaggggaaaaaaaagggcgccggcgcgatcgttcgtgctctcgctttgcgcggatggctgggaatcgccggcacgaggcgacgtgacggctgattcgtgtccgcccgcgcgagcgcacggtggtgtgatgccgctttttttttttttttgcgtgtgtgtgcgccttttgctgccgcggggagcacggggcccgcggccgcggaaaagaccggcgctggatcgctcacggggaaaagagaggctccggcgcaatcattcgcgtgcaatttcccaaggggatggacggggccgcggggtcggtgttggcttctcgaggtaacggaatggaaaaggatgaaagtttaaaggtgcggaaaattgttctatggtctatggacggagtgcgtatttaagattaaagcctggtttagttttcaactttttttttattaaacttttaattttgacatgaactaaacacacctttgtaaaatttatgtgaagttcttgcattctgagttagggtggcaaggcgtggcaagatattccagttcattagtactaccggagtagcatgttctttcgggattttgtggttcaacgtactcagtaataccaaagttaaggcgatcctaaactagttagagcaagtacaatagcacactattaaccagctaaaaatatattttaatgagataaaatataagaaagaagagtagcgagctacagatctatagctagctacagtatagactttaagacgcaatgtatgtatgacaggtgagaccatatattaatagtatagtaagcaactattatatgaattaactattagatcggctataaatgaattggagttagtagtggactattctattatacttgctcttagaactaggatagtaggatgatgcatgatgcatcggtagccaagaagataaaacgtttggcttcctctgcagctctgctcgatcttgcggaaacgcggttgtcgctcatacgtgcggcccgtaacttgtgggctgctagaacgtgttacgtgaggcccatccatcatgggctggaaaggtattacagcgaacgtgtggcccatactggatggaccggaccggtcactcttgtatttatggaccagaacgggattgggacatgttaaggccttgtttgtttaacgaaaaagtacgtatgaggtccctgtcatcggattacaaaatcgtccctcaaccaaccggatataagtcatccctcaactatcaaaaccggataactctgggtccctaggtggttttggctctggttttatccgacgtgacagctgagtcagcgtaggacccatatatcggtgtaaccacatcatcaccctctatttcccctcctctcccttcctcctctctaactcagtcttctctgtgtaggctggcggcaggtggggaggaggctggcggggtgggccgaggcaggagaagaggagggcgtcggcagccggcaacgcagcggcggcggccggagtggcggcaacgacgacgccggagaaggtggtgacatcgccgcgtgtgcgagctcggggttggagcggcccgagaggcggaagaaggaaaagggcatcgtctgcggtcggtgacaggcggggaaaacctggggtttcgtgggcaacgtcgtcccccgctcgccgtcgtccctccccttcgtcggctgtgatggggtgcgcggcgtcaacgacggacatcgctgagcggcggaggccggggccgttgcctggccaccacgagacgtccaccgccactggcatcctggcagcgcgccacgacgaccagcagtaggatgggaggaggcgaccgcggtggtgccaccagctcaaccggccgtcgccattttctcgacgacggcacacggggaaaaggcccggcaggccggtgtgcatgggcgcgcgggcgcaggcgtcaccgagctagaccagccgtccccatcttctctacaacggcgcatggggagaagggccggcagatctaggtgaggaacacgaagagggggagcaggaaggggagcgacgtcggccgctttaggaagcgcaacagcgacgacaacagcgatgacgacgacacaacagcgggggccatagcgcgatggctatccttgggttcgccatggatgggtgggtggcgagctggtggtggtggtggctcccggactcgagttacatcgaaggtcgccgcccacgcccaccgcacctgcctgccgtgcccagctactcccccgtcccgcccatggagaggagagagaggagaggagagaggaagagaggaggagaggctgacgtatggagcccacgtgggccccacgctgagtcaactgccacgttggataaaaccggagtcaaaacagccaaaggacctagtttgcactggttttgtaagttggggaatatgttatatccggtttttcagttcaagaacaattttgtaactaggtgacaagttgagagacctttggtgtactttttcctttgtttaatccccaggagaaagaaattggagggtattgatagggaataattctatacgtgtgaaataaatccctttaaattttccttaatcccccgtgagtgtctgcgaggattgtggtgagaaattattgtccttcaatcccattcaattcctctattgaacaaggtcgaagggcataatttatgggccggaatgagattgtggcctactgttaacgaccaaatttggtaatatcatcatcggaaaggaggattggatcaaagtggagtcgaaggcgaagatcgatctgagaacagagcaagaatcggctggagtccagatcggctacagtcaggatcggctgtgtccgagttaaactaggtgagccgatacagctgattccgacaatacgacttggtgtacaacatcgggttgggttgatatgcttcaagatgattgccgtgcatggatagagtcctgagaaggcaattgtatctattaattaggatattttatgtaaattccttagagatatgtttgggtaaaagtctgccgcaaaggcttgtggtatcttagagattgttagagataataatcgtgtccgatatgaatatagtttgtaattttcgggtataaatagaccccgaacctcatgtaatcaattaacacacacgttcaatacaatttcggcgcatcgccacccttttgctttagttttatttcgacgagttcttgctttcgggttgagctgcatcggtttcgatcttcaacaagaggtaaaaattgtcatgacggtttgcgttctcgggattagcgcttccatctttatgatactctaatcttgtttatgtaattcgtcgagttatcatatatcttacataatctttggcaatatcgctatctaacctacaatcggctaacatctatcggtagagggcagccgatcttatctgatttaactatatttgctctatgcgcttcattgacccgttaaatatgccctttatgttaagatattattgcatctaagtatattcagcttctgttttaacatcgtaatatagagttgtatcggagtattagccgatacatgctagatctatctgatcggctatgctatgaacatatataatcatgttattaatatatatttcgatctaagtgatttatactgtctcggcatggcgaccgatctatctcaatcacttgatttaagtatatatcgatataagaattatatattgccaatatctacaaccgatcgagtagatttagttctttattatctatttacaaccgccgatcgatttacatatgacatcggctcaaagataaatgatatgtcatcggcacctagccgatttgctatcgtttataggtttaaccgcggtttatttgtttttatttcttgttaattacggaatcaaatcaactggcacgctagcatacccgaaggcgagttttggacctgtactggagttaagcagatctctcatgcctcgtgttttacgtctacacctacaggcatccaacatttatatggcccagaaatgaattgtggtagacgtgcactccaccgctgcggcccgtcaacttaaccggccaccgctgcaggctgcagccacatcccacgagttccctgctggcctctgctgtgttctacttctacgccggctgcagctttacatccggtttgcttatatatggctgaaaatttgtgcaaaattttcgcacatatacctgagattcattcctctgtacaatttgatttgctgttcggatgttcaaatcccaatattactggcgtttgtggttcttttcattcaaatttcagagaaaaagagcatgctggtatagtttctgtacactagagctcgagcgaagtaatctgttgccaacaaacaagatcaagagtagtggttaataaaatatcccttcttctgaaagattgttctgtaacgaagatcagaaacattagtgaacttcagtatcctaccgtcgatgtacatgcttgcctgctgatctcctgtctccaccactaactgaggagaagatgggctcattcagagcctaattacgaaccaaaacctctacttgcagaagacgaaaaaaaaaaccattcacgaacatcgcagggtaaaaattattggcaccacgtcacaatcatgggatcacatttccgacagtcatactcaacacaaccaaaactatacatatattgtacttcggtctcatcctttgagtcagacgacagcaaaatacatcacgaggttttcacggttatatagatcgctgttcaaaatagtacttaatagagcaggacacactgacgtcactgagcaagttgacaatacgtctggttggtgctgatggactggctagttatcactttgcatgctcctgatcatgttcaggatataaaggaacaagttgaggatgtcaaggtagagctcaacagaggcccaaatgtagtcgtcataagtgtggcgctttatcaagttctctgtgtcgtagatgatgaaacctgagaaaactaaagctccaaggccaccaaacaatgcaactggtccagagcccaatgggaagaacacctgcaacacagcatatcacggcaaagtgcttattacaattggtggtttcgtaatggtaagatcgctatttgaattaagtatattgtatcaaaatgagtgtacacttgcctgaataaagcttatcacaacaagtaaaacaagagcagaaaacagaattggtccaagataaccaaattctttccccttctttgaagcccagaaagtatacgcagtcaaagaggcaaccacagctgaggtcaatattaatgcctcaagcacaattttccctgcagcacacaaatgattgttatgtaaaaagtacagttggcagttgaagaaactaactaaaacttgcaaaggaaagaaaaccaaccttgagtgttagcacatgccacaccaatactgaaactcaagcacaacgtgaacagacccaggtaaacaaagttgtgtgggtgtttgtgctgataatgatacaatgggaccatcactgcaagaaataacacaaaattagctgagagcaccaaaaccattccatcctaccaaacaattaacaatgtcatctactcaggcttttctcaaaattcagatgaagaagtttagttactcgcaacactaacatgaacaaaaagcagggagtaaaaaaaaacagccccactgatccaagatttgagactttccttgatatttttccatatactattaaaatataactcataccggactaaatacattgactatctcttacacagttatgtgtgctgcctacttgatccaactaggggataaaacaatcttgtctatggcaaacacaaagcagaaatttcagaattgaaagaaaaaaaaataatctggatacacaagtgttcagaagagttctacacttctaaagacagccccaccatgcccatatcatcacactccgcacttgactaacacaaacgcatcatatgatgtcaagggaaacaaataaggccaaaccaaaatgcatatgaatcatatcatttaaggtctcataacatttgtaacaaaattttccgacagcgtttgcattaactagtttgtcataaactcgtcgctgaacatgatctatagaaatgctattcacaatttataggaaaagcaattgcagcattagtttataatataacacaaacatttacttcacatcccaattcagaatgcgagtgggcaaatccatgatgcagaacttactacgtctaattctaagtattaattcgtgaactaattagatcctagatctagaggccaaagttttgattccaacagcaaggcatatagtaacgcaccgatctatctagattcaactatgtagcctacaaatcaaaccagctgctaatcagcgggacgcggatgaatctacgaccgatcacagaataaaaccattctcaatttctcatcaagcacaagaaatctaagatagaggtcaaccgaagcatcatcagatggggaggagggcacacgtacggacgaaggggaggacggcgagcacgagggcgagggtcggggaggaggagagcgtggcgttgagggtggggtggaggacggtgagcgcggagacggcggtggtgaggagcagctgcgcggcgaggatgccgtacaccttgcggacgaacccccaccggagggcgctctccccgcgcgagatccccgggtacagcgtctccccggtgccggcctccaggtccaccgcggaggcgtccaccttctccttcatctccggcgcccggcggtagcccgccggggccagcggctgcatctccgccgccgacgccatcgcttccgacgcgcttggtgggtgggtggggggaatcggggagagaggaggaaggaggtcaggaggggatttcggttgctggtggcctcgtgggaaggagacccgtatgtatcggggaggttgggatttgtgaatttgctaagcgtacacgtgggatctgaccgaacttttcttcccctggtcactgcgaggtggggccaaattgggcggatcggtgggcgcagcactcagtcagaagtcagaagaacgcgtgacacacacacactgacagttggacccacgtggataggctgttatgttaataaatctctatattttttttgcggggaaatctctataattacgtgtgcttaactcatctttactgcacctgcgtgaagaatttgttcgtagcaaaaaagaattactgttaacgattgcgctcgattgaattacttcatggtctggaatactagataatttacaccataaactattaatattggacaaataaactccttgagcattgttttgggtggtttttgctcgagcttacacacgtgacgccaaacgtgacaatccaattaacaaataaaaaaaatctctagacccacccgcccctaagccaatctatccctagtttcccctcttctctctctacacctatggctagagaaggagggcaaaggcggagaccgcttgggcaaggcggatcgaggaggcagcaacccgaggcagagtggaggcacatggatgtagagctcgaaaccaacttggggtcgagaatcccgtcctcactaggaactcgtccccggtggcgaccaccaccatacgtcgcaccgtcgcttgctgcgtccacgccacgtttggccactggtctccatgggagagggaggatacacgggggaggaagaggaggatgggaatatgacagtgatagcgagggagacaacgaagatgccgcacatccggataaaagcacaagtctcatatatggaccccgacggtcgcatcatctccaccaccactcacacggacgcagctgcacatctcgccaagctccgcaaccaaaatactcttcgaacatcttcgccaccacgtgcactgatgctcgccaccgcctgtggccttttccaccaaatcgagctctaggagataatgcctagagagctcgagctcagctgcccttcgcacaaagagctcgactccgccgccgcctgcggccttttccacccaatcgagctccaggagataatgcctagagagcttgagctcagctatccttcccacaaagagcttgactccgccgccaacacctccccaatgaagtttgagctccgttgcaggctctcctctaaccttgctgtcaagctagagcagtggagcacgcgaccataggtctggaggccactcgctctacgacgaggatggtgttgcccaaccaagctgaagccatgcggaggctcgcaagttcgccatcgccgtgagctttgcatcaatatcttccaccattgtccaccttctccaatctccagcatgagagagatagagagagagagagagcaggggactagggatgtgattggacataggaagagaaaattctttgttggttggattgccacactgatgtcatgtgtgcaagctcaatttaaaaccgactaaaacaatgctaagaggattatttgtctagtatgaatagttcatgttgtaaaatgtttggtattttagtttaaggagataatttggttgacctaaccacgatagttcgtggattaaagggactatttggattaaactaaatatttggtagagttttagcaccaacaaaattttagtatgctatagttgaaaatattgatttggattgaagtcaaactatgcttataagacacaagtttacaggcaaagctaaatctatctattatattattaaaacagctctgaaaggaggcaccatgttcactgtttgggctagaaatttccacattaatcggagaaaaagaaaaagaaaagaaaaggagagtcgaagtagaagtacaatttaaattagctaaaattcggaattaaaataagagatattgaaagaagtttccatgtatgaacccaatacgagattaatcaaaactcgaaataaaataaaatccaaaattagaaaagaaaaggagagtccaagtagaagtacaatttaaaaatagctgaaactaggaattaaaaataagcaatattgaaagaagtttccatataagaaccaaatacaagattaatcaaattttgaaataaaataaaataaaatccaaaattagaaaaggaaaggagagtccaagtaggaatacaatttaaaaatagctgaaattcggaattaaaaataagaaatattaaaagaagagtccatataagaacccaatataagattaattaaaaatcagaataaaaataaaaataaatccgaaattagcaaaagaaaataaagaagagttcaaagtaggaatacaatttaaaaatagctaaaattcataattaaaaataagcaatattgaaacaagaatctatataagaacccaatacgagattaattaaaattttgaataaaaaatataataatatccaaaattagaaaaattaaaagagagttcaagtaggaatacaattttgaaacaactgaagttgaaaataaaaaaataaaaacattaaaagaacacaatacggtattaactaattttttttaaaaaaaataaattctgaaattagaaaaaaaagatttcaattaggaataaaatttataaataactaattttttgataaaaataaagactattgaaagaaaagaccatctaaaacacgtgacgagataaattaagtaacatgcctataaaggagtagagttggtggcggttgatacgtcatataaaaattgttaataaaacaccaaatagaatcctaatgacgattaaaaggagggacgtcgggcatgccgtgaagcaaacaagtaaggcggttgccgggacttctagaaagtaaaaaaaaaacacattgataatcatattcaaattttaaaatctcaatgacaataaaaaggagaagcagcgggcagggtgtataagagtatagttgcaaagccgccgatggttgacgggacttctagaaaataaaaaatgaattacaacaatagttatgtttgatttttagaatcacaatgataataaagaataggcggcggacggtctgtagaggggcatagtggcatcgtttgctaggacttctaaaaattataaaaaatgaaactacaagtctaatttttgaaggttcgaaaattctaaaaagtaaaaaaaaaaccaatgataatcatgtccgattttaaagtctcaatgacaataaagaagggaggcagcgagcgagccgtagaggagtacaatggcaaaaccgctgacagtttggcgggacttctagaaagtaaaaatgaacccaaacgataattatgtttgacttattaaaatctcaatgacaataaagagaagagatagtggatgggcatagaggagcataatggcaatgtttgacgggacatctagaaattataaaaacgaaacccaatgtgataataaactctaaaaactagaaaatccaatttttaaatgttccaagaagaatgaatagaaatagtgatagatcgagcaagcaaataaaaaaggagatgacataagggatagcaaatttttaaaaactatataattagaaacatgaggatgataaggtttggtttttcaaaatcttaacaatgagatagctatttaattaattctaagtaaaatcatacttaaaaaatatatgatttttttgctagccgcgcaattgcgcgggccacccagctagttcatgttaaagttgtgttctactccctccgtttcgaaatgtttgacgccgtgactttttaacacatgtttgaccgttcgtcttattaaaaaaaatttaagtaattattaattctttttctatcatttgattcattgttaaatatatttttatgtaggcatataattttacatatttcacaaaagtttttgaataagacgaatggtcaaatatgtacttaaaaagttaacggtgtcaaacatttcaaaacggagggagtaatagagatgtttggttggttaggcaaattttgataagggcaatcccaggcccaaagatttcgccgaacatacacgtcgtcaaatcgaacttttttcgtttttagattttttttaatatttacagaaataatctatggaccaaaaaaattgcagaaatagcccctgtcgccctaatggtgggcggcaatctgacgtggtagacggtgggtcgaccgcgccgtctgccgccgtcggccaaaattgcgattaggcccttgccgcccgtacagagggcggcaaggggctaattgcaattttggccgcccataaagagcttgcggccgtactttttt

SEQ ID NO: 23149 - DNA, 9803 bp, Oryza sativa
aaaaagtacggccaaaagatttttctatgttatgttaataataaataaagaagtatttattggtaaaacttgttaatattgttataaaaatgtattgaagttggttgttgcgcaatttcatatgttaagtgaggtattattttgtaccttattcgacgtattagtactcggataatttatataggcctatcgcagtctgggtcgtagaaacattatatggacttaaacaaggagaattatgtaacatgaagaaatagtagtacaatttgaacatgatacaactatttacattgcggttacatagatgatattagattcgaactaggagggaggtagtgcaatagttgaacacaacgacgatgtagtaatgggacaaggaagcatgacagtagaaatttcaatatgccaagttgtccgataatagctaacccctacgtgaggatccctctcctctctcaaaccgcgctttagtaaccctgtattgctctggtagttcaagctgcacaacacggctaggtggagttaggacccttctggtgtctatccattctctgtattgacatctccttggtggttcatgggaggaaagaataggtgtaaagcaagcaaagtaagtaaatgttgtgagaaaataaggattcatgtaatcaaaatattcttaccatgaaatcgtcgtcaagaatatttggacaaacaaagaaccttcgacccaatgttgtaggatttatggaacgaagaacctgacaacgatcaccacacctgcatcttggacgggcttcccatggagggagtgccgtagttagcacccgccagtcgctctgttgttcacgacattgtcgttcataagccgcttttctctgtaagtattgctcagtactttcggatgcgaaataccaacgaccttcttgtaaacaagtggttaggtcgagaacgggattttctgtatcgacccactcgatgtatgcgcaagccgtagtgcgggtctgccgaatagagtagtgttacgaagaataaagcgattgcccatacggaatgaataagcatatgcagataataaaatacctcacggtcatagttagggcacctaaaaaagcgccttcctcgaatatcaggattcctcgaagccattagttggcatcgatcaccgcataggcagagaggacgctggcaccaaggtggtagtaggtatacacaaggatcgctacgccagtttggatcctcaacacctcggcgtctagccattgacgaaagccggtcggatttgtaatgaagcaagtggggaagagagtactgaatgtgactgagttctgaaagattgtgaggcctcactcgttaaggcgacttatataggcgcaaaaaatcgagtgatacccctgacatgtgaacgtggtgggtgtcacgcccagaaattctcgaaccagaatttctaagctgaatgtgcattaaatccctgtccaggaccagccagggtacacaaacgacaattgttgacatacagatccacgtcttacaaaaatagaaaagattacaaatgcagcggaaaagataaaagcgagctaaaccgggaagcttgacttcagcagcgggcgactccactccacaggcaatccttgacggcagcgacgaaaccaactttgacaaaacagctccaactaggaagatcttcagctctggtgtggggaaaaagagagcaagactgagtactacccactgtactcagcaagtcataccggaagaggaggtatgatgcaggatataaccaaaggaggctagaggttcttttgcataaagctagcatttaaaaacagtagttgaaggcagtaaaacagttgtagtaattaatcaatattaaccaaacactgtccaacgctaccccacgttgcaacaggcccaaccaaccacctgaactacaccagttcattaagctaaactagggatgagactaatcacggtgaatctggttgatcgcccataaccgcgggcacggctattcgaatagttttactctggccagaggtgtacaactgtacccacaagacacgattccacacatgtcgccatgccccgaagtatcaccatgatactgcaaagggggaaatcgtgacaagaccctccacataaccctcccctaaccatccacaccacgctaaggtttcacccccacccctcaaaaggcagtgggcggtcccctcttgcgccgcggtgaatccggcagctggacaaccggacaccccggccgacccaactccatcacgcccaccctcgccaccggtgcctaggaaagggtcgagctatacttcagatcaagcagttacccactcccgcttgtggtaagcacggtaagtctcccagggtttcccgtgaaccggtccttaactgccatgggtgcgaccagcaaaaccatgcacccacagcccaccattcagtgtattttaattaactaacaccattgcggtggcaccaatctaaagctatgccaatagacaaagtctatgtaataaggtgatccccatttgtgtgctagttgaactaagcatggctaagcatttcctaaaccaacatctagtcattttgatacccaagttatcaacggcatatggtaaacaatatgtggctgaggaataggacccatcccacattacattgtaaaagaatgcaacatttaatagaaatgcgggatacttgtaaattgggtacaatatgatcaaacgtattgcatgacttgccttgctctcgaactgatgggacctcagcaacgtcttcgagaaacttcggatcgacgaaacggccgaaacctacgcgacaaacaaagcacacaagcaaaacatgctataagactactgaaacaggaaacaaaaccatttttaatggattctttgcatttttcttgatttactgagacttgaatggacttaaacggagctcggatgaattacttatgaattttagaagataaactgtgtttttactaataaagaaaagtccttaatcaatttattgcgcaataagtcccagggctgacgtcagcgaggggagggggcggcgccgacaggcggggcccacgggtcagcggctcaaagcggccggtctaccgtggaccaggaccacgcgggtggtccaccgccggtccacgggaccgatggtccggatcggccgaggggccgatcggacggcacggcggcggctaggcacggctcggctcggcttcaaaaccggccggccggccatggcaaccggcggcgacgcgcacggtcgccggcgacggcaatcggcggcgtgggaagcgacggaggacggggcgaaaagcgacggcagcggctgaaggcgacggcgcacgcgcgaaggacggcggcgcacacgggagagagggaaaaaaaaaagggagcggaggggagcctcaccggcgagcacggcgaccaaagcggaggatgaaaggcggcggtgacccggcgatgctgaggtgcggacgggcggcggcggcacgctaggagaaaacagagagggggttaggggtagggagagcgaccacggcggctagagcggccggccggagttaggtggaaatggagagctcaccggcgtgcgagagaaacggcgctccggcgacgattggcggcaaccgaatggtggccgaggtgcaagcgggctcggtgagcgtgacggtggcgactacgcggcgcggcggtggctctagcggcggcggcgcgcggccggagatgggcggcgggcggcggagctcgggtgcgcggcgcgagggcggtagacggcacgggagagtgcggtgaaaagaggaaaaaacgagagaaggacgcggggaacgatttataggcggagggggaggcggacgtggccgggaacccaccctattgcgccggcgacgtggaaaggtggggggagagagagagaggggtgggattcgaaatcgaatcccgccctctcgagcgcgcgcacgggctgggagatgtggggaaggtgggcggcgacgcgggcgcggagtggggcgcgaagaggggcggagaaggcgggcggcgtggggaggtggggcgccggcggttggggctcggctccaaccggctagaggaggaagacgaccgacaggtgggccccacctgtcggcgcccgaaggagagagggagggagggaggacttcggggaggggagaaggaacgggccggccccaggaaaggggcgccgagcgcggggagagagatgggccgacggcccatctagagaaaaaggaaggaaaagaaaagaaaaagaggggaaggattttcctgggattaaaattgcactttggtgatttttaattggttaaaattatttccaaggctctgaaaattccactaaaaatcttgttaatgcattggagcatggggaactcaagaaaaattccaccacgccgaattcaattattaattgcatttattaattagggaattagctctaggttaaataagataatttcttcggacgatttatttagccaatttttaaagcaaggagagggggaaacttcagggtgtgacagtggggtatggtgggtacgcctgattggcgccgaaagatacatgcatgatcggcgccgaaagttacattggtcgtatgcgccaaatggcgggcaaatactcgtatcacacgcgaataaaggaggctgcatcggtgcggcagaaagtagtcgtgcatgcgccgaaaggtatcgtgcacatataacaacaatgtagtcattacacaagcatacagtactggaaagtgaagcaagtaaacaaagagaagactgctctactggccctgccccgcgccgcgaccatgcttggtcctccgggcctgtgctcgcacgtggtcctgggagtaggtgaaacgatccggtggcacagcacgggtagcacgagtgtcccgcggaggagtggcctgcgcctagtcttgcgtctgcaccggcggtgcgcctcccagctgtgaggggccgatgacgtcctctgtcgagcctgaagtgaagtcgaagtcagtgatgtcgaagaggaaggtggaaggcaacaagtggtccgacgaggtcccagcatggtccagtggtggaccctgactcgacgtgccggctgcctgtgacgaagtcccggtgtactgccagaactgcgctgagtgcgaggtcgacacagctgcctgagacgctgaccctgcagcctgggagaagtgggcggcttgcgtcatagcgaactgggcgaaacctacacatcgacaacgggacccttgtaagctaagacataaaatgtatgtaaattgattgtcgaagtaatgttgtttttttaagtacctgtggggggcacaacagaaggcctagccgaggaaggcggggtgctgaacggtgcacgaaaccctgaagcaatcggcaagtgaaacggctcacttatatatgcgaggcatgtacagaaatagtaataaaaatacttacctccgtgcggagggggagtcggcctaggaacgtgcgcagctggacggggaccagtcggtacgggtggccgctgtacagctgcgtctgcccgagcaacgtcgtctgcacgacaggtgagcactcggagaatcgagcgcatcgactccaccatccgcgtgtacgtcgtcaggtgctcctctacgggtaccggaatccccgcgcctaaacgttggatcgtcgttgaaccgtcaacgacgacccggttgatgtcgtcgacctgcatggttaatttgttcgtaaatattcgtaaaatttgacgaagagaaagacatgaaaacataaaggaatggtgcgatgcagggtactcacagcacgagcgaagtcctggtcgcggtgcctggcatagaggtctctagtgctcgcaacgtggggctgctgctccaagggagcgaaggtgaccctagtacgggtgcgtggttggtaccagcgtaggtaggcctggtacgactcctcagtgtgtggctctccctcgtggtccacgacctcctcggttgcgagcaaccagtcctcaacaaaagtcgccaacttggcgggccagtcgccagctgactgctgacccttgcgcgagtacctgcgaattaatgtgtaatattagtgtgaaacgacagatgttacaaattattgtgaacaggcagattttaatgcaacaacggaaagcgtagtgcaagatcttaccggtgaacagcagctgggacggtggtcggaaacggtactggaaagggctgacggaagccgaactgccgcatcacgcggaaaggggcgtgaggctcaacgcagatgtcgaagaccatcggaaccgtagtcatccagtacgcctggtccctggtgcagagtgtggacagacccaacggcgcacgagcctgggtagccgtggcactgtagggctcccacacgacgtcagtcggcagaaggcggtcgaactccataacaaactcaggatacgaccgcctaacctggacgtgagcccatcggcgctgcaatacgagacgatcgatgtgatgtacaatgaacttagcaattaacttaacaatacgataagatcgatgcaacgtacctgacgacggcaccacaaagtacccatcgtagggtagtcgacctctggtcgctcctcgtacagtgactcctcgtacgcgtgctggtccacctcagggcggccgatcgcaatcctctcagctgcccagatagaaagaaagagagggcacccaccaaaggtcgcgctgggatccgtcttcgtgcaagactcacaaagtgcacggtacagagccgccaacaacgcggaaccccagctccactgagacacctcgcctaccgcgacgtcagcgatgctcctggcgtagtgcacaagtcccttgtcgaccgcgtgcccgtgaccgccacagaacatcacccagccaaaaagccagagcaagtccgcctccaaacatcggctgtaggagtactcgtcggcctccgcctgtagctgctcaacctgcaagccgtcgataaaatgttaggcaccttaactgcggactaaatatgtaatacgattgtcatttcggtacaaaaacactcacggtgaactgaagcagccaccttttcgtaggtccggtgttgcggtggtgtgccaacggctcgaatgggaggtgcggtgcgcgctgtactagtgcgaaacgtgccgtcagatcatcctgccagtccacagccgtggtcactggcccaacagcgtctcccgcgagcggtagccccaataagtacgatacgtcctgtatggtaggggctacctcaccgcacggcaagtgaaaagtgtgcgtctctggcctccatcgatcgaccaaagctgctaggagggacctgtccacagtccatcgtctggccgggtccgcgtcaccggccgcagcctccaccagccgacacatcggtaggaggccggcctcacgtagcctgcaataacaaattaatatgtcattataaaaaatattatagtgcaactaacttatagtaaaacactattcgtacctctcgacaaaggagtcgtgaaccgtgagtagctcaccgcacgtccgtgcccggaacgtcccaagctgagccccctgcaccgcagtaaggtgagaccggtgtcggtgatctatcgccgggtccaacaactgaggtgtatcctgacgtgccatctctgaaaaatatagtgtttcgtgttagaacaattcaaaaaatagtactgtaaaacaaaagataacttgcaaaattatgaaatagtaataaaatcatgagattaattatgtacaacaagagtacaggctatttaaatatagcaaacgttactaatggtacataacgatgacatgcaatttaacatatatgtagagttcaataatataacataacattacgtgtcgaagtccgacatacatcagcatacctaaagacgttaggcgccttagtccgacgttacatcacgagacctaaagacatgacatgccgaagtctgacattacacgacgaaacataaacacatcgataagttcgaaacgaattacaagcaaatccacatgccgacatagaacataaaaactacaccacgtagccagacgtggcacgacgacgcctaggacgtggtcgagtggaggtagtgccttcacccgtagggcgagctccatctgctgctgatcctaatagtcctgcctccgccgcacttggtttctccttgtctttaggacaatgcttgtaggtgtgcccatgttcatcgcatttgctgcaacgcttcaccctgccagcctccgactcgtccatatcgttgcggatgcgacgagtcctcctccttccagccttgcctcggagcttcgatgggtcaggaatattgagtacttcattgttagtctctgtgaactccccagctatgccgaacccataaatctcgccgctccatgtatgatatattacttgcttactgaagtactgtgacacatatactgcatctggtatgccacactccgctgcggcagcaatgacatgggtgcatggcctgtggagcagcttcggctttgcacaagagcaatgacatgtgccgtcggctttgagaacacactcctgcttcactctcttgcggtagatacccctgcctgccttatcttgacatagtatctcaaacctgtgctgttgggtaccttgcactagagctcgatgtttcatggcctttttacgcaactcctctagctttttctgcatgaaagctccaaacaaaatgctgttgttcggcatagagggaagaacttcctggaaccgatccctaaaatacctgcatgttccatgtaaaatgaactccactatgccaactagtggcagtccacggacaccgcgcatcacccagttgtaaacttctgccaaatttgttgtcattattccatatctagcaccacctgtgtcatacgccttggcccatttctcttttggttcatgcagaatccactgagaaaatttccgaatctccaatccagttcttctaaccaatgttggactatccgttgggagaggtccaagagcttgaggagggtcagcaacggcggtcgatggagccgctgcacgctgatcactgcatttggctgtcaactcatctaatctcttccaaagctcattgaattttttctcctggttctgattgcacagcctcttgaacatgttcatgagctccttgttcttgaattgcttgaagaaattagctcccatatgacgcatgcaccacctactctatacatcttcccaaataccggggtatcctcattccatactcccaaactgcaactctcctatcgctcacagaatgccagcgtgcctatcatgtatcaggcatacatttggcctcataccaacaacttttgttttaaccaatttcaggaaccagtaccagctgtcggtattctcactctcaacaaaagcaaatgccaagggcaatacctgattgttcccatctacccctattgctgttagtatctggccccgatactttcctgtcaagaatgtcccatcaatgcagagaacaggacaacagttcacgaatgccatcttgcatgcatgtagagctaagaacgccctttgcagcacactcttgtcaggatgttcaattgaggggaatttcttcacttcgtaagagctcccagggtttctttcctcgataacaccaagcaggcgtggcaaattgtcatacgaggcttcgtaagttccaaatctcatctctattattttctgtttggccctccaggccttggcatagctaatagtatacttgtatgtctcttcaatgtgtcggattattgaccttggttcatatgtgagattatcgatgacatgc

SEQ ID NO: 23150 - DNA, 4736 bp, Oryza sativa
attaatatccgtctcatcatctgacgaatcaccttcctctacacgctcgttgtcagaatcgtccctctccatttcatccacaatggcaccgacagtctccccctcgtcggccactccacttggttgaatgcccactggagctactacgcccccgtcctctcgtgcgttgacctcctccacagaagtctcgtttacttcagcacttggtccctcgccatcatccatgttcgtctgcacacctggatcctttgggtgaacaaacggaaccaaagctagaggccacccgcgttgcaatgcattttccaaataccatctccacactcgagagttttgaactggcattagttcccaataaaaaccctcagttgcccgacttactataacattgattgttatgtcacttgtctgtggatcaactctgaagcccctcattaaccatccttttatagaaggtacactcctctcagccggtctatcaattcccctttctgatacaataaaatctgacagatctaccccagttggcccgtaacgaacgtttcctggtccatggtaaacttggaatatttgtttgttcgacatatctgtcaacgaaataactagatcatattactctttcatgcaataaacatctacaacgtaatatcttcttgtgtaagccaatgcaacggtaatgtattaattccaaactagcagatctacgtagttaccgatatctacaatacacacttctagattagtacaactaaaaccctaaaaatataatgcatttattcaaacaaatttttaaagaatacacactatttaactcaatagtcacatataggatctatgaatattacctgaaatcggtgtctgaatccggcagggcttcgccccttcttctcttctcctcccctctcttctttttttttcactggaattgaggagagaagaatgacggctgggggatgggcagcaggccttttataggcaacgaggcctgccgcccggccagagggcggcaaggggccgcctgcaaaatagccggccccgactggctttttttgcattcgggccccttgccgcggggttttcctaaaaaaaaaccctccctctgtcaccgcccgttcctcccccgtttgccacgtcagcttgtcgccctagaggtgggcggtaggggctatttctgcaattttttggtcgatatattatttctgtaaatattaaaaaaaataatctaaaaccgaaaaaaattctcgtcaaatctatctcggcccaaaattgcgggcacctcacctaccaggacaggaccccggcccacgccacaggtggcggccgccgccgcgcgccgcagccgcctcctcggcttcccacggatcggacgggtcgcagactcgcggcgcacactggcacccgatttgttggtttcttacccctcctacaaggcggccggacgcccacagatcggatcggtcatcaactcatcatcgccccccttcaaaaggccacccccctccccctcccttctcgcctcattccccacagccgccgcctccttcctctcctcgatctccctattcgtcgtagcctcctccctcgttcgctccgcccgcaaccatgtcggcctactgcggcaagtacaagggtatggatccatccatccatcagcattcttctccatgtcgttctcctctctccatctgttcgtgctttcagttgcgtgctgtttagatctagttcttgtgttgggttttcggggtgagtttgttagtagatctgttcgggaacagtaaatcgatggagtggcgtttatttatgtgatcgtaatcgtgaaatcttttgttgtgtctataggttaaagattggttactagttgacttactgtatgccatattggcttagtttatacataagggttctttagtgataagtggagcagatcttgttcttgtgtgttaaaagattgattataaaacatattttctgccatattgatttagtttatgcatagtgtttctttagttataacttataagtcgtgtagtatctgtgacagaaataagttggttgatctagatgacgtgcatgttctgttagcagaaattttctatctatattgatctgttcaagtgatttaaattatgcatagtgtttctttagttataagtcgtgtattatttgggacagaaataagttgggttgatctagacatgcatgttctgttagcagaaattttatatctaatattgatctgttcaagtgacagcctttcggtggtctagttgagcattggacatagtttatgcctggcaatttggatagatctattatttaggccatacagagatgctgctttttttttgttaataatatagtgtttgccatcttgcagacgagctcatcaagaacgctgcctacattggcactcctgcaagggtatccttgctgcggatgagtccactggcaccattggcaagcgcttcgccagcatcaacgtcgagaacgttgaggagaaccgccgctccctccgcgagctcctcttctgcacccctggcgccctccagtacctcagcggcgtgatcctcttcgaggagaccctgtaccagaagaccaaggatggcaagcccttcgtcgatgtcctcaaggagggtggtgtcctcccgggcatcaaggtggacaagggcacaatcgaggttgccggcaccgagaaggagaccaccacccagggccatgatgaccttggcaagagatgcgccaagtactacgaggctggtgcccgcttcgccaagtggcgcgccgtcctcaagatcggccccaacgagccgtcgcagctcgccattgatctgaatgcgcagggcctcgctcgctacgccatcatctgccaggagaacgggctggtgccgatcgtcgagcccgagatccttgttgatggccctcacgacatcgaccgctgcgcctacgtctcggaggtggtcctcgctgcgtgctacaaggccctcaacgagcaccatgtcctcctcgagggtaccctcctcaagcccaacatggtcaccccaggctctgacgccaagaaggtgtctcccgaggtcatcgctgagtacaccgtccgcaccctccagaggaccgtccccgctgccgtgcccgccatcgtcttcctgtccggtgggcagagcgaggaggaggcgaccctgaacctcaacgccatgaacaagctcagcaccaagaagccgtggtcgctgtccttctccttcggccgtgccctccagcagagcacgctcaaggcctggtccggcaaggcggagaacattgagaaggccagggcggccttccttaccaggtgcaaggccaactccgaggctaccctcggtacatacaagggtgacgctgtcctcggcgagggcgcctccgagagccttcacgtcaaggactacaagtactgatttgccttgggaggtgctggctaccattggaacattctgcggctgttgcttaatgtggttttgatatctagagggcaatctatggttatctaaaatgtcttgtcgtaataattctggaacctttttgtgtaacacattaccaaatatcaattgcctggattgaaatatcgtttttatcagttctctgtgtgatggatgattttgctggatggaattaggctctgtttagtttccaaaacaaaaattttcaccctatcccatcgaatatttgacacattacgtgtaaattgtgagacaaaacatgatggattaattagacttaataaatttatctcgtagttgtaatctgatataaatgtatatctatatatccgatgtgacatcttaaattttttttttttttgccaactaaacaaggcgacaccccaaaacaatttttttcccaactaaataaggccttaaaccgctactcggcagatttagtgtaaatagcaatttggtctagtagacgttaccccaattttgcgatcaccttggaaatcgctggaccttatcagctcaatcgaagctatgcttcaaggcagattcaccaccctacctaagtccaccaaaacaaaatgccacaggcgtggaaaatccataaatcgataaaatgtaaagtaaattcggataacttctgccgtgagagaactgctgtagcaattcagcttcattgtacaaccatcaatgctataacattagcataagatatggaaaattttaaaatcttcatccaacatgtaagcagaatggatattgaccatgtatctcctagtaatggggcctacagtccgacaaaattctcctaaactacgggctggtttggtttgaggcctaaattaggcttaccaatattttgcaatttcaatagtatttagtatctatttggtttgaagccaaattttggcatatctaagaaaatagaccatttcaatagtgaacttaggttattttggcttcaatccaaacacaactttgccttaccaaaattagtcatgccaaaacttatcaaaatttggcactgacaaaatttggtaaggcctatttagattgaaactatgccagtggagcaaaaaattgaagtgaaggaaaaaaaaacaagatcctattcgtgttttttctcccgatttgcaattgcctgtttctgacgcttctcccatgctggcatcttgcctgggaacgcccatcgcaaaatccgctcccatccatagcagccacaaaacataaggatagcccaaagcatcagtttgcccctcattccttcaggcaggggtt

SEQ ID NO: 23151 - DNA, 10069 bp, Oryza sativa
cagtgtttgctatgattaaagatcttaaagtagtgttcggaaaggggcctggaagccagcctatagagagcgaagatagtcacgcggcgatgtggaaaaagaactctatattttgggagttaccatatcgggaattcttggacgtacgccacgcaatcgacgtgatgcacctcactaagaacctttgcgtaaaccttcttggcttcctaggtgtatacggaaagtcaaaagatacactggaagcacgtaatgatctgaagcatatggaacaacgcggcgaccttcacccggaaccaaaggagaaaggaagccattacttgagtccagccagctacactctaagcaaggcagagaaggaaagtatatttgaatacttggagagcataaaggtaccgtctggatactccacgaatatcaagcgaataataagcatgaaggagaagaagttcacaaacctaaaatctcatgactgtcacgtgttgatgacacaactgctaccagttgtaataaggggtatccttccagaaaatgtccgggcaacaataacaaagctatgtgcattcatgaacgcaatttcgcagaaggtcatcgatccggatagattagaagcccttcagaatgaagtggtgcaatgtctcggcaagtttgagttgatatttctaccttcatttttcaatataatgacgcatctgctttgtcaccttgtgaaagagatccgtattctcaggcctgtgtacctacacaacatgtttcctttcgagaggtacatgggcgttctgaaaagtatgttcgtaaccgtgctcgtccagaggcaagcatcgccaagggttatggaacagaggaggtcatcgaattttgcgcagaatttatcgaagaccttcgcccaatcggggtacctgaatcacgccatgaagggagactacggggaaagggaactctcggaaggaaaagcaataatgacggtagacaacaatttattccgtaaagcccatttcactgttctgcaacactcttcattggtagctccttacatcgaggagcacttggctctagttcgcgccaggaacatcggtaagtccgatgcatggattacatggcatcacattgatactttccccacgtggctacgacaacatctcatgggtaacgagtcaatcaaccaacaacttgccttcctggcgaggggaccgtctgggtcgatcgcgacattccagggatatgagatcaatgggtacacattctacacgagagcccaagacatgaagagcacgaaccaaaacagcgctgttcgtgtcgatgccatgggacacgatgcaacaactgccacgtattacggtgccatcgaggatatatgggaacttgactatggtcctctcaaggttcctttgttctggtgccaacgggttaggttgactggtggaggcataatgattgatgacagtggtatgacaactgttgaccttaacaaggttggatactcggacgaaccttttgtccttgccaatgatgtaacgcaagtctttttcgtgaaggacatgtctagcaaaggaaagaagggcagagggcctaatgagcctaagcgtcaagtggttctcccaggcaaaagaaaaatcgtcggagctgaggacaagactgacgaggattacgatcagttggataggcaaccccctttcacggtgacgattgaccctagcatcctcctatcaaatgaagacaccccttactcacgcagcgatcacaaggagggaacaatagtaaggagaaagtacgtgcggtcaatcgtcactgccgatgtaatgccgtaattattgtgtacacgatgtaaactattttggatgtattgattatccatataaatcaattgatgtatggcataatttactatcattcatatgctacatttaattgaatatcattcatatgctaattataattgactagaaaatttttaaaagtattaaatcattcatgtggcatttacagatgttaattagagtttttcacaatttaatttactatctttcatatgctacttatatatgactattcgaatttttaaaagttttaaatcatgcatgtggcatttacatatgttaattagagtttttaacatttaatttaatataattcctacgctaagtatatatgatgattacaatttttattaattttaaatcatgtagtatgtacatataaatcttaattagagtttttaccaatttaataatatcattcatatgctaagtatatatgattattagaatttttattaattttaagtcatatatttgcttattacgatttatccacttaatttattacagacaaaaataatttttcaaagtaattgtcattaatctttgtactttaaataatgttaatgcattaacttctattttagaaacacatatgtaagcaaaaataatatgcagtgctataatctttagtccaggttcttaaccctaaccgggtttaaaaagaatttggaaatagcgggaaaatatatttagtcccagttgatgagaacaacgatctttagtcccggttattctcaacaaccgggagtaaagatatctttacttccggttgttctcatcaaccgggactaaagatcgagggctatatatattcccgaagcgcgccctcgtcttctccaccaacacttaacgttttcggtcgatcgatctctctcggcctctctccttcgccgccactgcctagggcaaatccccgcgccgacgccaccgtatctcaccgtcgtctcgagctcgtcgtcctcgccgccacctccgcctcctccgccgccgccgcatctctggggtgagagccgccgccgcctctcccttcatcgatctccgatctcgatctctctctccgtcgtgccgcccgccacgagacgccgtgccacaacgacaccgcgccacgccgacgccgcgccacgccgccgccttcgccgccgcgcgcgcaaccccgccgcctccacgccacgccgccgcgcaacgccgccgccgcatgcaacgccacgccgccgccgtcgtcgccacgccgacgccgccgccaccgccgccacgccgccgcgccaagcgccggaccgatgccgccacaccgccgttaacgaacacgtgaacgagaacgaacacgtcaatatacgttgccgcgagaacgtgaacgagaacgagaacgatcgaacgaaggagagcgagaacgagaacgatcgaacgaattaacgtgaacgagaacgacaacgaacgtgtacgagaacgaacgtgaatgagaacgagcgaatgaatgtgaacgtgaaatgcaatatatatatatgttacttcgcatttatcctaatacatattttttgtatcttgcagaaaagacgtgttgtcggagtcgtccctcaagccggagtggaagagctagccctagaaggaattcgtgcaggcaagtgacgtaataatataaatgattgttatatttgtaatgcaattaagaatattagacttgtaattagacttagcatataagattgtgtagtgttctaatattatttgagttttaatataagattattttattgcaaattagacttagtatgtaattattgactacggaattggtgcgactcctagcaattgactattgtagtcttaattagacttagcatatacgcacgaaacacttagcatacatgactattttagtcttagcatgtaatattatttgatttttaatataagattattttatttgtaattagacttagtatataattactgactacggaattggtgcgactcctagcaattgacaatttttgtcttaattagacttagcatatacgccagttacacttagcatacatgactctttcagtcttagcatgtaatattatttgagttttaatataatattattttatttgtaattagacttagtatataattatttactagctagggttgtataatatacgtcacctagacttagcttatatcacgatttgtaattagacttagcacgtaaggttgtgtagggttctaatgtacgacatttacacttagcatacatgacttagattgttaaaacataaatgtctcgtgacttagcagatgtttcttgtatcaacagatggctgaccgcgatgaggaacagatattgtacgatacaatcgcggagggaagcagccagtactggaatgaagaagaggggaacgaggatccaaatcagtacttgaacgagaaagggaacgtggagagggatgcggaggggaaccagcaggggcacgtggaaagggatgtggaggggaaccaggaggaggaggctagtggtagtcaaccctccgttggacagaagagggcacgcgggcaacgaggtgcagcgaagaagcttgagggtcggcacatcataatggaagtggaagaagatggacgtcctagtgccccggccgtagccgccaagaactatgtacgtcacagcggttgggttgtgcgggataacgtgcctgtcagtacggtgtactggcgaagaacaaggacacgcggagatcatgagagctttgtcctagattcggagaaagagatgctgtggaccataatgctcgagacattcacccttcccgcgggtacagaggacaaagtgaaaaggtggactctgaagaaaatggcagaacagtttcagagcttcaagggagagctgtacaagaaatatatcctgaaggggcagacaccgaacttcgacacattcccaaagctaagggatcactgggacgagttcgttgcatataagacaggtgaacaagggcaggcgatgatggaaagaaacaaagaaaatgccgccaagaagaagtaccatcactacttggggtcaggaggctatagcgtcacgatgccgaagtgggaggagatggaggctatcttgattgagaggggtatcgaaccggcaaccgccaattggccggaacgatcgaagttctggtactatgctcatggtggaacgctcaacccagctgatggctcactggtcttcggcgatcagatacgagaggctgcgcgacgactaacagatgcagtggaagcctcctctcagggcacgttccgatcggacagatatagggacgagctgacactcgccctgtagactccagagcatccaggacgaacacgagggaaaggggtgattccttagaagattggtttcaaggaggacatccacacgtacaggagtcggatgaggagtaagagagataccgaggcgaagattgcagatctagagttccgggtatcgagctacgaactcagcatgcaagaggaggtgacaaggaaggttgatgaacgcatagccgcacatcggtcccatgatccccagccgaccattcctcctgcaatgatgagcccgtcaggaaaccgtagcagctgtgccttaacggggcaggtaggattacagagcatggacgccattcaaacacaggacgaatcgacctgtcccgttgatgacatcactcagcagacaccatctgagctgcatattccttacaagaacttatcaataaaggtaagctcgtagtttatatattttagatttagccattccgctagttgctgcttatatatgttgattactaataaaaaatatctcacaacatgaaggtggcgtcgggcatggccatcccaacggacccttcaggtacttaccactgcaggccgattccagcaggatactcgaaggtcgaagttgagttggtcgaaggcgcatacgaggacctcgagctggattaccctggaggagacggtgagacgcatctacgagacacaagccatgccattattctatggcgcaggcggtacatcatcctccctgggcgacaagcggcgtctcgtgcaccatctcctcctcaggatcttgcaccgtctcctcctcatgatccgccagcaccgtctccaccttaggctccagcaccgactcctcctcaggatcctgcaccgactcctcctcgggctcctacacctactcctccgcaagctcctcttccggcaccttcaaagtcaagggcccccccccagctccaccgcctgcccacacaagggcaacgaagaaggcgaaagttgacgccgccaagaacaaggacccggggtacgattgcacgcaagaggagcttgacgcttacgttgcatcagaagtcaagagacaattcaagcctcgaagtccagaaaagaagattcctatagaccctagtgtcaggaacttcttcaggggtatgtctgcatctgtcaaggaggccatcaagctatcggactatgagcgaacgctgaagaaagcatcttctggaaagtccaaaccagtccctcagcttggagagcgaccaaaccaggagatcgagccgttggtgaccggtaaagaaatgatgatagaacaatttattactgacaccggtctaactacggatcaattgctaggagtcgcaccaatcgaaaagacggaagtgaaatacatgtacgaactcggtaaaccgcttgtcaagcctgagctgctgcagtccctacccacacaaatgtacaagttccatcagctgtacatggagatgagcgccaccggtagagagatgatcggagcgaggatcagggacacggacttcttgcaaggagatgacattctctggatcaatttcaggggaatcaacgaactataccagctggacgccctcgacatctctattatgagttgctaaattttgtaagtatatcgttcagttaatttcttactatacgtctcctttaattaattatgtccttgtatataagtagactatagaaaataatatactcccttttatcgttgtagaatggagattcaaagggcccgacggcggagggttttcgatactggattcatcgaccctcggaaagtaaacgtcgcaatgctcgaccaatatccacaagaaacagaggacaatctcgtccctctcctgaaggcgcagcattacaagacgttcatactgttgccatacaacacagagttagtttaattttactgtcttcctacataccaaatttcattcccgtacgaacttgctaagtgtttcatatgtaatgcatcccacgcacattgcagattccactgggtgcttttactcttcgacctggaggcctgcaccgtcaacgtatatgactcaatggataaaaaagagtctacgtttgacaaggttttcgaacttatagacaggtaccgtcataagttcctttgttaattaagaaaatcttgttatgttaattgctactacgaatcatagctttaaactccatgtagggcttggtatcggttccgtcatttggtccgcggcaaatggagagaaagacttaggcggaagttcaaatttcctgtgagtacacatgctctacatttatatttctccgattcaaatacatacaagtgtatattaattagatctctcgttgtttgtcatttatttgtagtgcgcaaagcaaaagcagggaactaacttgtgcggctattacgtgtgcgagtattgccactgccttgcagaccaaatcatcaccacaagagagctcgatgtacgtacaaataaattcaaaatttcattacgtagcgatttcttgtttaattactaatcaatttcatacattcatatagtttattcgcatgagggataacctgaccacacacaaggaatttatcgcggcggttcaagaacaactcatgggattcatcaacgaagaaatccttgatcccaagggtgaattctactacgacggaaacacaattcaccggtccttagcttctgagctagcagcgagtactactacgtcgaaatcgtagctagctaggacatataatggattgtaattaatacatgactacatatgtttctatatgcatgtgtacacattttctataatgtaaatatattttggtcatatatatatatatatatatacacacacacacacacacacacacacacacacacacacacacacacacacacacacacacacacacatatatatatatagatatatacacatatgcatgagcataagatatatatgtagaaatatatatgtattaggcatgaacatatgtactgaaccaggtatacatagaatatatatatatatatatatatatatatatatatatatatatatatatatatatatatatatatatatatattattagaatagttctatcttacactcttcctttgggattaaataaatacgatacctttataatactttcgggcgaaatgctacaatggtatatccgtgcgcttgtggatcctttctgtaaaccatatatataccaggaccatttctagcgtcattgctagacattcatatttctagtaatattgttaagaaataccaacaggtgttaacagcgaaatttggcaagatagactcggatttcgagttggaattgaaggggaatcaaagaagattggatctttccaaatatggattacgcatcggttgggcattgcatcggttggaaatagagttggagtctgatttagccgatttgacaagtagccgactagcctgacttgggctcggtttgggcctcgattgagatgaccgtcattgtcgtttagagatagagctcatttaaggcaattgtatctattaattaggatatttatatcggtttgagttagagatatggtaagagtccatggtatggacttgtttgtattttatctttaggaaagcttgagtcgtgtccataatggacaagttttgtactcggggtaaaaatataaaccccagaccattgtaataggggagacaatccaatcaatacaactttcagcgtatcgccacccttttcttttacttttcgacgagttcttatttcaagttggggcatcggctacgatctctcgacaacaaaatagttataacacaacaaatttaataaagcgaatgtaataatttaagtcaaaatacatttcgcaaattatgtttcaatatgctcaaggagagcgtgactgaccttagtcaacgaacagttttctgctgccacaaacgatggacctaaattgcgagatgggaacctctaaaatgatagcaactacaccaataacaaaacaagactaaaactctaagaaagaaatgatcacattacataaaaataacatttttgggccctttaagttataaaaaattaagcaatttaaacgggtcaatttggacctcgtatggccaagatacgaccatccaaaatttagctataatttaaatggagacttccaaattatttaatcattattgtactattaaattatgtgtaatacatcagcgctcgaggagagaaaggaccgagcaactgattgtcgagacccatgggtaaaacaggtagttcaccaaggactgggttccccgagatggtccatggtaaaagcagagataagaacattcttcgagtcggtgagggcgacgcaacttcatcgaacgacgtgctcaaaggaggggatggtgttcctgaggtcttgataaaccctgagctgcactcaatacactcacggctatgattggcctgatctttcggggagttgatgataactctaatttgggagaacttactacaaccgtacgagacgctattgtgttgtgccttagcgatcgatacaccactccgtgggttgttgatcttgctggtgcaaatcaaccttatgactgcaagcaaatcaaataaacaagtaagaacaagataaaaaaaaaggtaatctgaattgctcataggaattgaatacacacaataacttgatatggaggcatgctcaaggaagagatcgacgaggcgtaattgacggcgacgacgatgcagcgggacaatgcttcggtgagtcgggaaaggttgccggaggaggaaggcgatggcatcaccactggtcactggcgagaacggttttctagcttgttttgggctcgacgaaggggagcctggggaacaggaggtggctgcaacaccaagggtggcagcgccggggtgctgcgtttcctccggtcgaaggggaggggttgccggagctcgtgtcatggtggagagagag

SEQ ID NO: 23152 - DNA, 13265 bp, Oryza sativa
tttaggtggagctgaaattgtttggttgagctccaattccaggagatgtggaggtggtgttgtgccaaaatactccccccgtcccacaaagactttatttttgggtttctgtatccaacgtttgaccgtatgtcttattaaaaaaatttatgaaaagaatttaaaattagtcacttataaagtattattcatgttttattactaaataataataataataatcattgaaaatttttaaataagacgaaaaatcaaactttatataaaagttgaaaaatggagtctttgtgggacatagagaatagtagataagctataaggttatatatgttttccttcttctttctatctctcacatatgcatttaatgtatttagcttgaagcatgtgaacagataaattttgcatgagagttaaccctttttatttttcaaattctctcactacttatcctactattaaacttaaactggctcttaaaatgaacaacttctggacgtatctcggcaaaaaatttatccatagaagttaatttcttttgggacggagggtacagtgctaaaaatttttaattaggatgtgcaatgtaatactcttttcatgttcgtaatacttatcgatcgttttgaacaagtctaatgtgaaattttaaaatctttaattataaattatttctaaaatatccatatgtatagtttaatttttaaaattactctaataaaatagtatatttattaatatttttatatgtattataatagaaaatagtggtcaaacattactttttattatgttcttgttaaaacgacaagtaccatcaaaatgaagacacaactatcctggaaaaatcacggtggaccatacaaataggtttaggtcgttgcaattgcaggggcatcacactccaaattcctcaagtcgaacctctgaagtgatgacagtataatcgatagtagcttggatttttcctaaagcagctattggcacgttctaattaaggaagggagttgggaaccggcggaactcctcacgatacattgggcagtggaaaaaataaaaaatagtttaggggtaaaacttttatatttatgtttattagaggtttataaaacaatgctgaaaaatgaagtatgataaaagaaactcaatcaacttaaaaattaagttttaaaatctaatttataattatggaagctaaacgatgagaagataagaaaaggatcatgtttaaatactaaatggcaagagctgattaactatatactagtatagactatgtgtttctgatgttacaaacagttttcttttagggggtgggaggggggggggatgttacctcaaattctgtgtcacaactcacaaggttgcaagagtgcacgaccaaatgtcactgcattcatcagcgaaaaacctctctcgcaagttgtactatcaactagtactatcaagtggatgacaggaatggacaaattaaatttgctgagctgagaattttttcagttttacgttatagtagttgcataaacactaataaataaatacacaacgaggatatggatgatatattactgttaaacgcatgttaaacgtacaccttaaaatgtatgtgctcgttggtatgtaaatataaggtaatgttcgtttctacttaagataaaaataaagaagttagaacaccaaaaataagaaaaccattaacgtataattagttgagttttaattgttataaacttaacgaatagttttattcaatattttacagtaacttctacatatataaaaaaattttccgcgaaatatattatttagctgtttaaaaagcgtgagttgatcaaaccgaggtagcatgaagaagatgcctatatggtcgcaggttttcgtgtatgtctttcgtgatcgataaaaaaaggcgagattttaacgctacaacaaattatctggcggtatcttctcttcctgccagccgtgcgcttccctacgtaactcgcttgtcctgtgactcctgtccgatcgtccgtatggcatctcgaactgatcctccgttcccttcaagcaactgctacatgccgctttcctgcagcgctcactcgcgtccgtggcgcggaaaaaaacggcttcctgtgcgtgcgctcccgcgccgtgtcagcttccagctgcctctgttctctccgtgacgccgatggcgagagctatagcgcaggagaatttatggcgctcacgccgtgtcagctagagctcgaaccctcgaacgctcgagcggaaaaaaaacgcttgggcgagcctcgcgccacggcatccgggggtcgacggcgatggatctccgatagcgacccgagccgagccgcgcctctcgatcgcgatcttgggtgagtaaagcacggaagcttcgcgcttaattgggagaccgcgaatctgatgtaagcgctgcagtaagactgggatgggacaggttaattcgatccgcggcaactatcaccggtttcttgtttccatgcatggctgcatcaagtaagtttatgcagttgtaaaaacggatttgaacattgatgttatatatgtaaaacagttctgtcaagttgggcatttgtcaatgtcaaaggacctttcggtattagtaccgcaagttacttacaccaatcaattcaccgatgagaagcttaaatttgctatacaattggaattacctgtggctgtagtccgtcaaaacacacaggtgcgtaatacactcaaccggcttcttgtcgtttggacgttcatgtcagatatgtaactagccccaactgagctaaactaaactcgacaagtccatcttgtgttgcactaactagcaagttgcctagttggcagctaaatcaatgcatgtaaacctatcctacaataggaaaagagagcagattccctttacagagctagaaaactcttgagtcagtataacctctctgtctctgtgcattgtatttgtagtctgctcaaaatgaggtgtttgagtgctacatctcagtcgaggcaggggcatccaaagtttcacacataaaaacatgtgacaccataaagctcatccatatgacctctcgatagaaaggaaaagcatcatcctgatttggtggtgtcggtgttaacttatggcgaaatcacatattaattcgatccggtgcgcaccgagccacgtacaactgcactaagtaaagggggacacaacatggccaatcagcaaaggttcttctctgatggttaggttacaccggtgtagcaacctcctctttatctaatggcagattgtttgttttccctgttaagagtaagagagctcttgaattcaaagaaagtagccttaagtggagatgaagtcactagccaattaacaaagccatgcatatggcattggtagaatggttcacttgacagcttcagaatatgtatacaattgagctggctagtatgccattggttttcagttggaacctctcctgtagactgtagtttaattacatctatcctctgctgctctatttgcacctgcatatatacttgcataatacttggtggtcaacgcacgtaaaagaagatgccaaatgaaaaatgcccttctgatttgtacctgaaaacgaacgctggccatacgtatactacttgaaagcgagagcgccgctgcatccactgacgactgaaacataccattcagctttcagccggatgccccgggttgcactttgcaagaacagtttcggcaaggatcgcggtttctttctggaagagtgggtaaaaaatttcagacagaacgatacgacggttgtatcttctgttgttccctctgctacccttctctctgcaagcatgcctagttgatgtaactgatcttttgtcgtcgaccttttttatccctttttatcctcacccgttttaaaaaaaaatgttgcaaagtcaaaaggaggccacatgagcagcagagcaggtccatttactggcaaaaagcgtgagcacgcatacagttcagttctaatctaggaggatcagtcccaatttggatagtgacacctcccaacatgttctagaaaacagggtaaccgtcaacacaggtcacttatttaaaatcacataaagtattacctggtattataaaacgcacatgaaaaaaaaaaaaagggagcagtcctgtaatggataattatataggtataacttgcaggagtcgggacttagagggtgtttgggacttatgtttctgagagcctctctctctctcccaaacacccccttagtcataagtaagatccccgcataaacataaagaacttaccaccataattattgtccgatcatttctcgagatttggtgagatcatgattggccatgtatgggacagtccctcccattcccatcttaccatatatgtacatgatctacgagtatatgtgagaggacacatttgccatcgctttgcttgcctgctcgatatggaatgtcagcacgaacagggcactgcacatagcaagccagtgcactgcaacgacaaggttacgtgcagtgaatggctatacaagttgctgcctatcctgagagccggggaccaacgggccgcgcggcactttcgcggcttttggttgatgtgcgtgacgataattggctagtgcgccgggcagcctcgtcgcagtatgcgtgttgtatcacagtatcagccatgggtatgtggaggatttgcatgatatagaacggtagtgagctagctgcgagatcttggtgaggtgacagctgcatgcgggagctagtggcacaccgttggggtcgggtccgtactatgatgtagccttatctcgtagtgcaatggcgcagggcacatccttttcgggttcagcgatgtccacgggcaacctgtcgttagagagatcatgtactggcactatggcgttattgcctagccggtccctcaccgcggaatggtgtactaagctctgatggtgagtattagagttctagcatgggcctggaatcggcagaaagagggatattacgtcccctgtgtaggagggggcttcaagtgctgctagctagtcgagctttagagacctgattttatggtaacgaccacattaagcaatctaacttccatagcctttggctatttcactatttggccataatcctagaaacgttaacaccttgatgaggatgtgtcgtcagtacgaatatcctctttctgtagccggccggaaaccctttctcttgtaccagatcttaaagcagatcacatcagacagtcctgtcccgggggtagatggcgcgttacgggtttaccggttcaacgtgtggctacgtgacgaagaaatactcctataaaacaaaacaaaaaagacgttactaagcgaaaggcccaaacgatctgccgcgccgcgccgccaacgatcccgacgtaacagagctagctactagctagatagtttggtccagccgtttcaccggtggggtgtgcgaaaactgtacacggttacgacggtatacctaaccatacacctcgcgcagccgcgcgtgctgcacccgtcggtccacgcccccccccccccccccgcgcgcgcgtggtagcttggcttgggcgcgcccactcgatcgaacgccgccaaacgtgacggcgacgccggtgcgctcgcgctcgcgcggcgttgggatattctttcgccgggacggcgagaccgcgagatcccccccaccccacccatactactccccaccgcgcggggttcggccgcctcaacgagcggtgatttggctcgcggggtcggtggtttgctcggcgtcggggtcgggctgtctcttggtcggtcgcgcggacgccgagagcgcacggcacggtggcgtcgaagggggcgcattacggcgtagcctcatttgccgaggcaacgcgcgcgagatcgatagattgggctaggggcattatcattggtcagataacggaaccgggggcactactgtcccctgtggaatcgaacgggcatgtcatggctgtcagtgcggataataactaatcaaatccgtaaatgggctcctgcgtgtttgatccggtagcagagtagtagtcccgttcagtcgccagacgtgctgatcgagccaatattgcaagcccctacataactttatgctgcggacgccaacataatccgaccgctacgttccgcagtgaacagtagtcatgggaggaaaaacccaaggcagaaaaacactggacgacccaatgtccggtggtacctaacgaatcaatccacatttcatcgagacaacatgagtcccaaacctacccgattgtttggcttccgtattaatgctgccatcatgtgacatggatgccacataaaaacccgtacgatcatgccgattcagatatgtttccccgctcgagaggccacgcttgctcccctggtcaccggcccctggtctgggtcccaattaacctcagatcattgatcgaattcccccaatacaaatccttcagccacaatctcatatatgctccgaccgtgacgtgctcctatacgcaatcacacaaattcattcatttaatttattcctctcccatgcaatcagtcaactggatggcctaacgactaacgtcagtataccactgtaatttcattaggggaaattaaacatccatatatatgatctgaaaagtgaaaaccgaggcggaatggatcgcagctggtagctagcatggtagtctggtattacggtatagtggtacaagagacgaaagcaaagacgaacacgtacgtaggcgcaccgcacggcggtgtgaacgcggcgcctccatccgcatctacctcggaatcttcgtccgggggcgctcgtccgctacctgagctttgatgccgatacggcgatatgatgcctctcccgtgctgccactagctctctctctctccctctcccgcctatcagcaaccgctccgagcagaaacacacgctacgcttcactgaaatctcttcgctcgcggctagtgtcgcgcgcgtgcatgtcgtcacgttcgtgcgttgggcaccggggcgccgcgcggcgcgcggccgagaccaagcgtagcgtgtgtttctgctcggatcgacaaggacggcgagctaaccggtgtcggtattagcgactcccgagtcatcgatcgccgtctcaggtgcgtgcagtgctagctcgtgtcgcgcgaccgtgcagaggctccgtggcgggcgctggaattctggggcccgtacagccgtttgtacgaacggggaggggtgtctcttcacaggataggatatgtggctacagaagctcgtggctaatgtggtggtattaaaaaaaaacaacggtagagtactggctggaggtgtaggcgcacccgtgtctggcgtccaaagtgagtattttactcgcacgttaggtggaaggctgatactttacatacatttgttgagatgggacaaggtgtggtactcgaggactacggcttttgtggtttcgttagctccaaagatcttcggggaaaatataaaagaattcaagagtacactaggggttattcttttttatttttttatagggagaagccataaaatttaattgataagcatcctaataccaaaaatgctatcgacaagagcaactttccaaaaataccattgcacaaatctctttctctcaaaaataccatcatagtcaaactgttgttaacaactctccgttaaattgtatgaaaagaaattttacccctagacaaccatttgctcacccacatcatcattttgcaatgtttgctcaccggcgcctgcgggccactcctctacgccgtcgtgttgccgcctgttgcggccgacgcaccgccgcctgtggcctcctcgccgcgccccgcgccacgctgctgtggaccgtgacgccgccgccgtggaccgcggcctcgccgccgccaccaccgaccaggagagctgtgccgcagtcgggagagccgtctggatcgggattgaggggtatagggtaaaaaatttcaccatttcatctcttttttcttttaccataaaaactgggtatattttggcccgagggcaatttggtcattataaaaaaatggttgttgcagtgcggaattgatggttatgttgggagaaagaagcttgtgcaatggtatttttgggatgttgctcttgtcgatggcatttctaggattagggtgcttattgatggcatttcatggattttctcttttttatattgagatgcccaaccaagtaattttacaaggattttattttcttgaatgtacattaaacgtgccaaaaagaaaaaaaaacttcatgtcataaaacgtcgtaggagatacgagcagacaagcacaatcataacattaaccaacttcaactcgcgtagaagtatatgagtagacattgaccactatcttcaatcctttaacaattttgcaagctggcatcaccgagcaagttggtgaatcgcaccccaaaggcactcccgttgattggatccttgtcaacgcgacatataagtctttctaaatcttcattgaaaattccacggatatagtagttgtcacataggtagaatagcaaataattctatgacatttctaacttcatagacatcactatagtgataagagacatgtttccttcccttttgccatcagcgaggatgccgaatcaaaggaggggcaccgagaggaaggcttggaccgcgtaggccctatcgtgatttgccacctgagacgaagtccgagagccctatcaacctaggcttgtcaatattttagaaggattttcattgtttaatatgtactactagaagggttttccatcatctaaataatattaatattgaaagctttaatgtacttatcttgaaaatgtgctacatacctagagagaaaataattaagcttgaacgtgaggagagagagaaaaggcatggactagctagctgattgcatgacaaacattcttaggtgcttgcaacgatgacaatgtagcggtgaccaaaatgaccatacgattgacaaacaaagcggggaagataataacaaccattggcgtctaaaatctggtgacttagacatggaaaattgcaggtatgcatctattcaagcttgatggttgtcggtacatagtgctgtagtgttataatgacatctaatacttgtatgtaagggagaatatatatgactagggcgggttggatgcttgtgcaaggtggtgcgtggcgacgtggtatgttggggagtggtatctggtaagcttgaattgttcattgatgctggatgctctacctccttagtccttccaaaggtttcattgggttttacttttttttaatcaattgtcaactttcaggccaaaggattctaaatatcgaactaaaagtcatgcttttatgccccatttgaaacagagaaattttgtagattcaaatcctataggatattttcttcctatttgaccctttgaaacagaggattaaagctttcaaaatcatatgaaattcctaataatggctcaatgcgtatattttaaagaaaagttatcaagagttccaaccttttaattttttcttctttgatcatatctctcatctgattcatatattttctcggtgatctattcaaaagatcatttatgtggcttttctgtattttataataatttgttttacacttttattcttttgaaaatcttatgtttttttattactctgttttcacgatcatgagattcgaaggaacccttaatatgaaatttgaagttctcacatacaaattaaattcactctcgtggctagcaaaacgcgtcaagtggcatggattcattgattggtttttgtgttcgggcacattgaagtctcttttgaaatggagggattttagtggaatttcagaagaattaaattatttctgtaaaatttatataaaatttcgaatgtttcagaatttgaaagaagtgtgaagaggatgaacagaaattgaccctcgatgcttgcgtctagtgtgtgtgccctagaagtcatggctcggaagttaaaaatagaaatagtttgaggtcattgcttaggggaagttacaatatcatcaaaatataatttacaatagcaatatgttaattttaaagtttaagtgaagatatgaaatacaaactcgaaattcagctgccatagttggccctacggcttataagccactcttaaaatttaacagttcaatatttttttcatcgaagtttattttccattgttagcttttataaaagttttgctttcaaatataatttctgtggctgtaaggtcgtccagtttataattagaggtgaaagtttcaagcctttgtaccgaatttaatttgttcgttatatttctcatttgggttgtacttaagaaataatatttggtattttttttctattgtataaagataagcatatgcgtgcggggcaccacatgtacattcatgaccttttgtattagatttttctcgttattcgcgtgcacgctttctaaactattaaatgttgtgtttttttaaaaaaatctataagaaaattgcttttaaaaataaaattaatctatttttaaaatttaaaataattaatagtcaattaatcatacactaatagctcatttcgttttgtatatcttcccaatcttttctttccccttctcctcaaacagttaaactcagttttgacacaaacacacataactgcatatagcttagctcaaatcagagatctaattttcgcgaccgcataaaaagatttcacgtcaatatattagaagaaagagttttacttacacaacgcaatcagccagaccggcttatgctaggaaaagagagaaaaaacaaaataaaaaagttgaagctcagatatctaatgaaggcagcgtatgaaatttccatgattcagcactatcaataaactctttcccttttttgtcataaaaaatagctgaaacctgcataatttcatttccactccattgattcgttccaccgttgagtgtgcccgaaaaatttcttagttccataggacgtgcaggtgcattctgcaggatcaggcagcaaatattattggcgtgagccggtttagcctttcgaggccgggaaagataggccgtgatgagatccttgcctacggccaattctgacctctataactgtagctggcgatagtatcttcctcctgcttctccaaaggtcaactgctactagaggaatcagtctctccttaaaatatctaaaagtgctctcaaaatatgcaacagtcaccttagtaatattacgaagaaagatactactttaggaacatgtacagtacaaaacacatccacatacacactgcctttgtgagtacaaccgaatgactggaccagcatatcttgagatcgatgacgccatcatggataactcgttgtcgaggtacgtcgtctacttttgaaaaaacaaatatcatgagattgacgaagtcacaacggatgcctcattgtcaacgagtactaacccctataaacacacacatcctatctctgtgagcacctacgaagtactgggttaacatatcttgagattgatgaagtcatcatggatgcctcactatagacattcgtcacctaccactgaaaaaataaatatcttaagattgacaaagtcatcacaggcgtctcgttgttgacgagtacgtcgcctaccactgaaagaataattacacctctgaagtactaggtcagcatatcttgagattgatgaagtcatcatggatgcctcactatcgacgtacgtcacctaccactgataaaataaatatcttgagattaaagaagtcatcacgggtgtctcgttgtcgacgagtgcgttgcctaccactgaaagaataattagccgtaaatgcgagcgcctgtgtcgaatttaggatttgaacccatgttaattagccgtaaatacgagaacatgtgttaaatctagaatttgaacccgggtggattggttccatcacaagtaacctaacaaattgagttacgctcacttcaaccacacaaattaagaaaataggttaaattaaatgggaaatattgtgattgattaaaaaaagaaataaggtggaaaaattaaaaaaaatggttataattggttgagatataaaagtatatagagaagttgttatactataaaataaattttaaattgtagaagttgatatacgtggggatggaggaaacaatacctatattgtcttttacaacttaaataattttagaatactaaagttcaattatgagtgtgaatgaatttacatccgcatctcacattctgcggcgaaaggtgccccctgacgacatttttgccacgtaggacccgcatgtcaaccgtaaatgctaaatatcgttctcggtttagtttacatcatctatgcatattatataaaagaatctaaaagtataaaatttgtcaaagggggacagagagagatgggagaaggtatcagctcaacacgtggaccatttaaaagctccttataatatcaccaaacagtgtttgataactagcattatgggttcatcaggacgctaaagtaagatatctcacacctcctgtcattgagttgagtttcgaatgagaagacaaacttgtgcatttagatcgactataatatagccaattatgctcgagttcagattaaataaattatagccaattatgtagcccccggcccggtcactagacgaaggctttgaataatgcaatttggacagtgtcacacagagaggatcgctgacaacatcacgtcatggaagttgctcttgttgagttgttgtcacggccaacaaaacagtaacattaaacacagcacatacgtcaacagttcagtggtctttgcgccttacgttgcccttctgcatcgtgacagttgatttgttttttctagtattactgtcccgttcaagcaaaaatcaaagcagacaaaattctgtggttcttgtttgatattttcccctctgtgattagtgaatgtacggaaatttgcaatagtaaaatcaacaagaggtcttttaagttctcctgccgaaagtctagatctcaaagcttgtcaagttgcacatggcattttcatactgattctgtaacagttaaaccgttctatttggggagggtcataccatatacggtcaactcgtccggcacaggggaaagaaaaatgtgcgcccgtgcctgatgacctattgatgtcgcaagctaagcaggcttcttgattacttccg

SEQ ID NO: 23153 - DNA, 14791 bp, Oryza sativa
  unsure (1)..(14791): unsure at all n locations
gggaactaaactggcccttagtgtataaaagttgtactaatagacttatgttttaaagtggaatcatagtagtagttcgttttaagagcaggctataaacatatttttgaagagataaaggaagagagggaagagcagcaggctacagatttgtaggccagctacagcacggacttcaagacgtaatgtgtgtatgacaggtatgaccaggtattaattgtatagtaagcaactattgtatgaattgggtattagattggctatagatgatttggagctagtagttgactatactattaaacttgctttaatagcatctgggataccatcgatgagaatattttttttttgaaaggatggtaaaagctttgcctggtatatatttatagagaaatagatcgatgagaaattcatgaagaaactttaatgttgaagacttctccaattggaagtatgtccgatatatagaaatcaacacgtacaagtacatggtatattagatatcttaaaggtgctagttaactctaaacacggtgtgcatcaagtagcagcgatgacaggcggagcaagaggctcaaccgcattgcgtctccatgctggtgatgcacagttcctatgaaattaatgttggagctggtaccatgttgtctcttctcaacgaatgatattaattgtattctcttcttcagaatttcctatgtaatttaatatgaatctagattttgaaaataaaattatatctaatactcttgcttaaattttataatcaactacattacatatacaaccatatcgatcaatatacagaccatcgatatcgtatagtgtcaacccatcgtgacaaaatagtgcatattttttggaattaacgtgataatttctacacctctcatcaaatgttgtgttttcttaattttcctcccttgtcatatttttcgcgaacgctcccttgtcatatttggttttaaaagaaacaactttcaaactgtgctgtgataattaagttatgatcaatcgactctcaaatgcgtgccatttcaataacattaatgacgcaaccagctggggtttcgatgaaaatcgttgatcacatgccatataattgagttggtgtgtgtttccccgcagcaaaagcttcctaaaaaggaactccagaacagactcagcgcatgcaccaaccacccagatgtacaagcccttatttaaaccgaaccaaatcagtgccaaattaaaaagtgccattaaactaatggagtagacacagcttgattgtgataaataattgcctcgggttaaaataggtcatggtctctcactctctctgcagaaccaaaaaggatcttaagaaccgtttcacaatcttacaatgtccttcatgttcaaggtccaaatcccaagacgtgtcaattaagaaatcaggaatgaacatggagatcaaacaagatgcatatgtttgaaacttttgattcgggtcatatgtaccagcagattagacttaattgggatccccatgctctagatgaaaaagatttgaatttaatggcactaccaagactaggaggagaaaacttaccaacctagaaagtacattaagacaaagtaagggacagggttgtcatgatgttgaaataatccagcaagttcatcatatcagatggaacatctatccaaggactagtagtgactgtgcacttccatgtaggcaaggtaacttgttgagcatgggatttttcactatcaattcttaattactcaaactttatgtaattgtaattaatctatagaagaaactgaggtactgatgtcacatcaagctaaaaagtcataaaacatacacagaaataaactttcatagattaaaataacacgataaatcggagaaaaaaaacatttactctatatagtcaaatcttcgtgagtataaattatatcgacaatgattgatcgatatgtttgtacaggtttggcaacgcttttcaactatagttgtatttatggaaacgtaaataacaattgtatatccaattcaattcgatccgtgagttaaggtgtactttgtatgtagacataggggtgagtatgtgctatttatattattgccggtacgtgtgtatgtgtttcaaaaataaattacgcgcgaaaattcaccaaattctcatttctttttcttataatggaataaaacattccagcctttactcatcagagctacagccaattcttacaaaagtaacacccaaacactgagtgtagttcaaatgaattaaacacacccaacaaaataaaagatcaaactaagataaggagagcacatttattcaagtctatttgtgaatctgcatcatagtttgcaaggagttgcatgaccgttgtctcaagccaacgacctgcaaccttcataagctctcgatcatcttcacacatttgcagctgtgctctaaatcggagccaatatgttgcactgaaaattacctgcatatatgagatagatggtgatttgtcaaaacgatatcatttctagtcaaccacagagcccaacatatggcagaagctcctacaagtatgagtttactcttcttcttgtctacccccaagagctaaccatcaaacataaaacatattagatacggtagtaggaaggcataaaccaagagagaactgtactgctctctaaacaaattttgcataatggcactctataaaaagatgttgaatagtttcatttttcataaaaaaacaacatcttaaactgccattccaatttcgtcttgccaaattatccttggttaacacaacccctttaagcaagtaccacataaaaatcttaatcttaagtggcatcttaagcttccaaataatcttgtttatctcaatataaccattattaattaaagctagatacatcgacctaacagaaaatattccattctgatgataattccatctaaagctatcagaggattgattcaattgaatatgtccaatagaagcacacaattcataccaatatgcaagattctgaccaactaatgatctcctaaaggaaacattgagtggaacagatctcataacattagtaatagtagaacttttccttcggacaatagagtataaagatggatatttgtctttaaagccaggtttcctagccatttatcttcccagaaccttatttgtttcctattatttacaatccaagaactcatatctaagaaggtatctttgatcttcatgagacctgaccaaaaatgagaatcatcccgttttttattaacttgggttatattatagactgattgtagagatactttcataaaaccggttcaccgagctgatcctatgtttccctatggtggctcacacgaacgagacctaaaaatgccaagaatctgacactgaaacggacggccgagatgacgcgtggcccgccgaactgggcgtccacgcaaggccatgaccccatagatgacctccccatagaccaggccgcacctccgtgtcgccgtgcatccatcccaaggccacggtgatgacgtgcccgtgcgccgtatcccgcacccgcagcccccgtcctgagccgcgcgcgcgcggtccacacgcgcctcccctcgtaggacgggtcggtcgcagccgccgcccccgccccgcagcgatccgctaagcgaagctgaccggacttcgttaaccgccacctcctccttgtcggatcatcggatcggcgcccgcgcgcccgctaagatgcagccccctcgcgccacgtcacctcccttcccctgggcgccgcgcggtgccggatcaccacagacggatccttcttcctcctgttctttatatgagcgacactaaagaaagcgctacacacacgcgaccccataatctttcctacagatacaccacccacgccagttagaggttagaaacaaggcgtcgaacaccttaacgccattaccgaaaggcttcgagaattcggtggtgggtgtgcgagggagagagagagagggggagagagggtgtgtgcagtgaggaggggccctggcgatcgccggagggatgactacgggcgcggcggcgggggctgctgcggctgcgggggcggcaccggcgtcgccggtggccgccgcggccgcggccgcgcccgaggtggcggcgagggacgccgtgatcgggtggttccgcggcgagttcgcggcggcgaacgcggtgatcgacgcgctgtgcggccacctcgcgcagatcggcggggacgccgagtacgaggccgtgttcgccgcgctccaccgccgccgcatcaactggttccccgtcctccacatgcagaagttctactccgtcgccgacgttgccgccgagctccgccgcgtcgcggacgcccgcgcctccgccgcctactccgaggaggaggcggcgtccacggtgatccacgagcccatggacgagctcgtcgccatggccgccgagccggagccggagcaggagcaggagcccgaccacgaccatgtacctcaggatccggcaccggagccggagcctgacggcgccgtcaacaaccccgtctcccccaccgccgccgaggtgctggaccacgaggcggacggggaagattcctccggagattcgtcggagcgcaaggcaccctccacggaagatgacgccgtcgctgacggacgtaagtacaatcaccccccccccccgctaattaatcctcctacgcgcatattaattacatgtgcctcataggccatagcttttccaaccatcgttgcttcctattttcggcatcggcattttttttcttgctaaatccgtcatcgtttccgttagttcatccgtagaatggatctccagttttggcccgcttcagttggatctggtcgtttgctgtggatttctctgcaagttttgtcctctaatctcctattttttggggttaaaagaaaaaagtgattaatttagactttcaaacgatgcctttctacggtaaataccattgcaaaagctgcatctgcatggttagtactactagacctggcgcgcgggtccatcacgcttggtggttaggagaaaaaatggaggtcgagagggccaaattattcagcgccgcaccaaatgcggagccatgattcttcctgggacggggagatcgtacggcggggcagtgctcctccctgtcaatcgacgccgtccgtgccggcggcggcggcccgtgacctcgctaaaaccctaccgctttattgccttctctcctctccatccacgccgttggattcctcctctcttttcctccgcctccttttgtttggttttctccgtctcgtcgcctccacgcgcgcgcccgcgcctcggccaccccttttggcttggtccccctggaaagtaccaccgctggtacggccgcttctgccagtgcgattagcaaaaacgtgccacgctgtggttgcccttttgacgcctccggcggcctctcgccgtgggtcggcggttggcttcagagcggcggcggcggtggccttgaattgaatggaaaacatcgtgtgcgttggattctagcggctctcatcaacctgggccctgggggagtggggggctccatatggtgtgaggtagccgacgctgattggctcggcgtaaaatattgccgtgcatgcgttttgcatgtgtggacggccggagatcaccagattcgggttgctggttaacccgccgggcaaaaagactgtgtgcctcctcctcacttggaggagatggagatggagatggaggccgtgatgcgtggcagtgtggcatcaactttgaacaggcgtttttctcttcaaagaaataaatgctcttgaaaaaaaactgtcatgaaactgttgacttttttttatttgggagaaatacagagtaagttggtgtgctttaagttttgttttgtgttgttgcatgctagtatttcggttgtgtgtgtagaattgtcatcatcattttgtcctggtttggggggtgtcaaaaacgtaattagggacggtcgttgtcctcttgctcgagtgacctctagtcgtctccttctgccttaggcaagcacaagtgtagtgatcaaacatgagaaatcatacacactcatttaaaagaacaaaacaaaaaataggaaagtgtgaatatgtcatcctcgccttggggctagaagcctagaatgacgaaggatggttttttgccattgttttgcaacaaaagcaaacaaatagaacgtgattctttttgaaagtaaagaaagtggattagtacattaagaatacagagctgatagattagatgaaaataaaaatagtactcctactaagtggcagtatcgagcgtggtacacacgagagggaacttcctcccatcctccgtgctactagtactgcaacgtggatctcatgagatggtgtcaggccatgtcaggtccgcgcggtggagccagccggtgcgccgcgacggcacggcccgtctgatcgcaatcaaacggagccagacgctgggcagagttaaatggacccgcacgagactcgccgggcggcgggtcaccgtggaaaaatcaattcgttcgtgcccaaccctgcacgtgtcgatgaccggctggacccagatcgggttcgagaagccagaattcccggggtccgaagggctggatctggtgccgtgccgatcggatcggtcgggacggagtctgagctgtgttacacgtggttggccgacatccactggctggtggggtccggggccaatcacgcaggtggtagctcgggcccactggcagcgccttctcgagagaactctttgtctccgcatggtggccactggccagtgacaggtctttgtgctctttggctgctctcgtgttaagtctttactctttagccgccttgaggctgcaagcctgctaccatcagcccaagtgtgtgggtaggtgtggcgaccggcgacggcgtacacaacttttgaacttccacatgattagatcaactgtaggtgatttggaattgataattcaggttagggcagcgtagccagtgcgacgctatgtttgtttctgcgttgtatattggtgatgtgatcgtgttccgcgatttggcgacttgctagttgctgctactagtcagccacctttgcaaccagtccggatttcagaagattttctgcaatctcttccaaattgactactgacggactacacacgagtaactctttttttcttctaaaagataggaggaaaaacaatttcttgagtttcttgtgctaaaaggaggaaaaaggttttgctgtgcgtgctgcatagggtggtctgatgcaaatcgtctttatacattgtcttcgcccaattattgaacacgtattggtccctgcttggtgctcgcccccacacttatgccatatgtactaatgaccatctacgcttcactcaacttgcgggaagaatctcccgttgtgctcgctcttctctttattgcgttatcacgaaaggttcctctttttttctcctcatgctgtccatcgaaaatgacatgaaaaggactacagcgtaggagtcctcgacactaggttatttcttcctgggctatgatggaaattttggaagatcaaggggaactacagcgtgtctcaaaatgtgatggcaaaacggtaggtgacaacaattttgtgtgaatgcaattgggcgatagacttggagaccttggtgccgcgtgactgtgcccactaacgaactctcactgaggatctaattatgccaggccagaaaagcgggtagaaagtacattttatattttattttattaggaggtttacgattttattaggttctttagacagcctcaacccataatatctgtcggtgattgtttagtaccctagctagcttagcttggtttctcatttcctgaacaacatgataagagttatcagcttttagatgtgtatcctttgtgcttgcaagctaaaagatgaacagttaaactgaattctcagaatgcactttcttttataaaaataaggcctacggcatgggtgcagttttttttatagcgtcaccagtcatatatactcatatccgtgattggaagttttcatgctttctgctgtttatcataagttgattgctctttgaaatagatgttttccttgaaacatggtaccgcagttaaaagaactttatatctttattgtttgaaaacagagttcaaatctaattgctaagaacatatccactgtttggatgcatctgagatctatattacttagcagatgatcatactgaccaaggatctcaaggggaacacagcctaccagagagttaccctatctgctctgatcacgaggagtgcattgtccgccccgagaggatcaagattcagaaaggttttatggccaaggagtccgtgaaggggcacatggcgagttccttctttacatcactcggcaaactttctgtattgaagaactaggagatgctgtaggacttagcagcacttccattcatctaatacgttcattcttctaattgctgtttttgactggtgtttatgacttctgtatgatcaggttaacgttgtgaaaggcctgaagatttatgaagatgtgttcacaacttcagagctcatgaaggnnnnnnnnnnnnnnnnnnnnnnnnnnnnnttcgtcaggctggcagaaatggagagctttcaggtaagttggtgtttttgttgcttaaaaacatttttgttcgtcaaatgtagttttaaagatccctgatatggagtatgtttgcattattaacgttaggtgctatttattttcatactttttacttttgtccatatctctttggtgctctccaattgattcttctaagataccaaaaatattcttgcgtccatagcatctaaaggtggtcctagttcaggcattgctacctttatctattggtggtgatgattttatttgatattattttgtggtaactgactccgatatctggatatccagttcataacaactgtcgtccatatatttcacataatatcgtgctagaagcaatagaaaatgaagctaagacattgaagtttatacacttcttgcatagatagattttttttagacggaaggccagtggcccggcttttaattgaaagccaaaacggcagagttcagctggggttgccagcgtactgcatagatagatgccacctccagtcatcctaatcaagtaaaagtataatttgcatttgacaagatcacaagatagtcacaaaccttgtgcctacgatacctaatggactcgagcatgtgtatttgctttaacttaatctaactagccatgagttctcaagttatcttaaatgacaatagaagacgttgagcaagagtatagtttaattatgacaacatgttagatcgcttctatcttatcggaatgggttctgcaccacaaaacattgatccaagtaagatctcaactttgtagccttatttggttcttgagtagagaaattttatggtccttgaaaaggtatctcgatgtacctaaattttacactaaaaattttagcatctcgaggaacctagtagcatttccctattggttctgttgattgttcatgtttggctatgttgattgttcctgcctaccttgtaccttgaaatgcgaccctcctattacctttgcctttgctgctatcaattttgtcagtttggagctaactctctagttcaaaatttaggtgaaaccttcatattcttcaacaagcagattaaagggaacaagagggagatcattcagcttggcgtcccactatttcagcccaccacagaggaatctaattgtatgatcgaaaaactagacaactctactgtgatttgttctacttacttacagttgcaagaatattctttgaagtgtggcatatcatatttgcatgaacatgtcttatccacacaacgtaatggcctactgaatggtggtttacaactgttcattccttcctctgcgtacaggtcacatagaagcaatcccccttgtcctccaggctgtcattgatcatcttgttctttggcgtttaataccagaaagcaggaaacctaacagtgtcatcatcaacttcttcgatgaggtaggtactggttcccttataaaatagtatgacagtacactcgacgaacccaaatgccccttttcttctatacttcgttgaaacttgtcgtataatattgaatagaattggaagtatggttagcctagtggtcctagggaaaaaaaggaaatggataaagaatgtgattttaagaaaggaacatcattataatataataaaatcactcttcatgtaaatgccagaacagttgtattgttcacttcttgttctacaagtggaaggctgaagataagtgtaaaaaatatgagaacgaagaaagttcgaaatttctgacatatctacttcttccatatactttgtttatgacttcctaaccattttactcgtttggatacaccccaaacccaacatctgcttgtgtagaactataatccagacccatacctacggatgggcctggatttgttttagactagtgatgggcctggatttatccaatggcaagcgtaggtgatgaaaaatcagttggaatttaggttgaatcttttatgaagatcttgagcttgcttgatttccaatgatctgctttgactacacaaagtcaacttgagtactaggacatcagtaatttccatataggacatgcatgcaccaagaactcaactgcatagaatagacgaacaaatatccttgctcaaaagtcttgtccaggttgtgctctctgacaatctgacgctatggtggatttgtttgacaggatgagcactcgcagccctacttcaagcctcctcacctggacaacccaatctccactctcctgctgtccgagactacgatggcatttggaaggtcacttgtcactgacagcaatggcaactacaagggaccccttacgctctcactgaagcaagggtaaaacatcgaatcgcactgacatcatctgcttgtttttagagctaagctagtatagttgtacatgggctcatggcgtctctgcgtcgaatttgcaggtcactcctggtgatgcgcgggaacagcgcggacatggctcgccacgtcgtgtgcccatcgtccaaccgccgcgtgagcatcacgttcgtgcgcgtgaggccgtcgacgccggtggacctcagcccgctcccgtcgcccaccaaggccatgacgctgtggcaggcgccgccgccgcagcagcagcagacgatcccggcgcccggcatgcagcagaagccgcagcacggcggcgccatcatcggctacggcccggcgccgcaggccgtgctggcgcctgcgtggggcatggccgtgcgcgcggcgcccgtcatgatggtcgccgcgcccgcgccggcgaggccgatggtgatggcccccgccggcggcaacaagcggatgagccgcagcggcaccggcgtcttcctgccgtggacggtcgggcccaagaggtacaacaagcacctcccgccgcgcatccagaagcgccggttctcggcgatgatgtcgccgatcgaggcccagggctgacatcaacaacgtcacctcaccggacctcgccacgcctcgccggcgtcgtcgtggtcaccattaggccgcattttcttcttctttgaggcaaacaaaaaaaaagaaaaggaaaaaaaaagtcgaaaacgcgcgggaagttcagtcttaatcggtgtgtcctccctgtgaattttgtcgtcgaagtggtgactggttgtttttgtttggtctgcctgtaatttagcccgggtgtgagtagcagagatggaagcggtagaatatatgggtaggcatagttgagctcaggatcaatcaggaacagtgttttctttttccctttttggttgcgagaaagaactactggatggatgttcatgtcctgctgagtttgcagtaagctctaaatagtagaggtagatgatgcgtctggtgttgctcactttgtttggtttgtaccagcagatgtacctagttatgcttatgcatcgattttaattgtttgtatataggatttgccagcaccaatcgttgagttattctcctaccagtaaatgtgatgaatggatactccaactgaagagataggagatgaccaagtgaaagttgccattttgtttgagatacatggttgccatttccattgtatagagaatgattatagataattgtaatgccgtttatcctaacatttctccggttggaaaatttgtttacaattgaatttgcagtctcttaaccagttaacttccactgactcggtccaagaaggtttcatcccctcctttttggatttttaaaaataacaatagcttttattcaacttaaccaattacatagcctatagaaaaaccaattacatcgagaagacacatctatatgagaagtgagaacaccctcagcttttacatagcaaggacacatagttacacacacacaccctcaagtttataaaataaaaaatacatgaagttttatggccaatcaacgtctagatggccatccacatcatagggtaataaacaccttgaccactttctctagatgcagacataacgcaatcaccaaatcttgcatactcctaaagtataacctatgggagccaatggattagtgaataataaaacatgaaaagctgaagagataatgtttttctaataaaaataaccatatcattcacgtacaatcaaagcgaccagcaaatgacatccgcctttaacaagacatgaggtttcatattattttggattccccaaagccatctccaaacccgtgagaaacacttcaaggtggagggagatctcacaccacttgaataatagaccaaatcgagtgagcacaattacaatattagaacatgtgtttaacaggaacaatgcttttgactaccttactagttgtggttagttatgttgccttagctccacattgcaataccaaacaaatcttgaccttaagtggcagctttagtttctagagatgtttggtaagtacataagaaggctgctaagcattaaattaatcaagggtcaattccttaagtacccttgaaacttcacgcggtcctttctacgcccacgagatttgcttgatcccttgtatacatcggagtatttttgtccttgacatgcctattctgttagtttactattagtttttttttaaaaaaggaaatgatcttattgtttctttaaaaaaaaagatcttattgacctcggcatattactaaaagttagaaatattctatatagaaattgtttgggctgtgaaaaaatggtaagcagtaaattaccgaatatgtggttttgaatttaacttttttgaaaagacaattcattgaaatttacataacattttgaagctttgcgtcgaatttgaaaattattatttgaatgaatatgcagtttgaaaaatgtggaattttttcataaccgtgtattcacctttcgccagtattgacactatttttatttagttcaaaattttaatatttttgcgagtatgtattcaaccaccgtatattttttataactacaaaatttttattagcgaggacacttaccattttgtaatacacaaaatagggacaatatggtcattttagggaaaacataatggtcaactaatggaaataggcatgtaggagatcaatatagaaactcaagggtatgaaaaggattggttgaatcttaggggtatggaagggattagttagacatttaggggtatacaaagaaattagtgcgacccaacctttcttggatgaaagttttcctttccaactacagagtatgttcttagttttggggtttatgaccttctctctctccatggagatctagctaaccctcacactggatctgccactggggacagcagggaggaggggagtggtaatgtgcatggcctaaggcataggaggattccaccaaggaaccacatagggtttggccaaaggcagaggaaacatgatgcccattgcttcatccttgtctgcctaggtcgccatgatcattctgggagcatatggtataagacgacgtcaggccctatactggcttaatagccagatttaagaccgccaagccatagcaaatgaccctaccattgacgcacattgcactagtctccatggtaacaacccccttccccctcccccacagccctagaaatacattaagccagagttgtggaacgattatctattaatgttcatttccctagggtgtagtgtatgatcaagatttgtagtatgtatgtgcgcagttacatgtgaatataagtcccatcttgtagctcttaaagatatagtgtaatatctgtcaccttaatctccaaatgtaattcgccatcgatatgaattttcatacaagaatttaggatacgtgagttaatatctgtcaccttaatctccaaatgcaattcaccattgatatgaattttcatatagaatttaggatatgtgagtcaaatcgttgttgttggataaagattataggcgatcatgcaaataacaaaccaaatatgcatgacacatgcaactctacatgcaacacgctgttaacgaccaaatttggtaatccaaggatcggatgtgaagaaggaatcgagacggagttcgagatagagatcgtccggaaacagagtgaggatcggctgaagtccgaatcggctgtgactaggatcggcagagttcgagtcgaaca

SEQ ID NO: 23154 - DNA, 22198 bp, Oryza sativa
  unsure (1)..(22198): unsure at all n locations
tcgccacccttttactttcgttttgtttcgacgagttcttgctttcgggttgagctgcatcggtttcgatcttcaacaagaggtaaaacttgttatggggcttgcattctcaggatagtgcttacatctttatgatactctaatctcgtttatgtaattcgtcgagttatcatatatcttatataatctctggcaatatcgctatctgaccttcaatcggctaacttctgttgctagaaggcagccgattaggttaagtaccgatgttgacttagattatataggatatctaccaccctatgaagcattcaacgacttgattgtttagatattgtctttcttttcatacttatagctgcatcagttgagtttgatcttacgaatcgtgattagaatctcaacctctagcctgtctttggttgacgattagggtagtatcggggtttcagccaatcttatctgatttaactacatttatcttatatgctttattgacatgttaaatttgccctttatgttaagatcttattgccttcaaatatattaggatttctgtttagtatattcttcttgctttaatatcttaatatagagtggtatcgaagtattagccgatacatgctagatctatctgatcggctatgctatgaacatatataatcttgttgtcaatatatatttcgatctaagtgatttatactgtctcggcatggtgaccgatctatcccaatcacttgatttaagtatatatcgacataaagattatataccattgatatctacagccgatcgagtagatttagttctttcttatttcttaatgactgccgatcgatgcatatatgacatcggctcaaagataaatgatatgtcatcgccaattagccgatcgggctatcatttatggatttaaccacggtttctttgtctttgtttgtgttgacgaaaaaatcgaacacaccggcctgggagatatgcttagctccagtgcaggtccaaatatgatgagatgcgggcgtgccagtcaatttgatcctgcaactgacaagatatgtaaacagcagataaaacagccgattggctgacaagccgatgtagtgattccagtcgatagcgataatagccaatgccgataccagccgatagcgatagggtttaagcaatcggctatatgtccaatgtagatgatgatataaaggcaatcggctgatgatgatgtaataaaataacaatataatatagtataaaccaatcggcaaataatgatataataaataagcatcgatccgaaggttaaagcacacatcggctggaggtccaatgtcatgaaatccacaagattagattaaacagtgaaacctttgttgtcatcggctaaatccaacttatatgtatatgcaatccttatgggccgatgcaacgtctagataactcatcggctgaaaccccgatgaaacccttattggcaatcaagaagcaggctagagattatggttctaagcacgacttagtagatcaaacttaactgatgcagcactgagtatgaaaagaaacataatatctagacaatcaagccgttgactgagttttcagggtggtagatgtctaagctaatctaatctagcaacgtgatttagccgataccggcagaaaccgtaaaacgagaagtagccgatagagctaaattgatatgctaggactagattaacatagacatatgataaacatgtaggcaaatatatcatccaaaccagagcaatccaagaggtcgaatgtactgatgcagccttgaacgacgccgacgtagacgatacaattgcctggaccggcggaacattggacttaccccttagccggagatcgaacaccgatgcaaccctgcgtcgggtgccaagttccgccggaacgtaaaacaaaagtagaagtaaaaagggtggcgatgcgccgaattgtattgatcgtggagatagattacatagaccccaggtgtacatatttatacccatgggttgatacaagtccttgtcggacaagaaagaaacttttctaaagataaaaggaaaagataaagtccttataggacactaaacacactttcctaaagataaaaggaaactaacaaactattcctaattaatagataacttgccacgccgcattctctttgaacttggtctcttctggataagattcctttagtagatcattttccttaaccgaatatagcaagaatccgacaactgacgacttgacaactctcatcggctaatctcaggacttcgaagccgatgctgactctaagccgatgactactccgggcttaccaaatttcactgttaacagtttcttgttgattgcaggatcaaatcaactggcacgctcacacacccaaaggcatgttttggacctgcactggagttaagcagatctcccaggcctcgtgtttttacatcaacacacgcatataatttttctacatacttcacatccatggggaattgatttcgacttaccattaatgaatttctttgttgctactatgatgaactagaagttagataatcatacacctatggtcaaaaatatttgagatgcataattaactcatgccaagctatggctagaaatttaagatagataagtcagtcgctagtttgggcttgtgctcttgtgagtttggcctggggcgagtcatgtgtgagaaggagctcgggctcccgagaggagaggtaactaatgaacaagcaagaattatataggttcgggctaacacccaactccagttgtgttagtgatatctctcctggttgtgaagcatcttacaagtttatcatagactcaaagtagttcctcttcctttctcctctggattttctaagaatttgataagtatgcagataagtgttctacccactaggtatcgacctcctcccccttgctcctagatctcctttctagttctctagggaagaccacatgaccaaagttcgaggaaggagctaactttacaaggatttggtgtggaatgtcttgtcagcaacttttcttctcacccgatctgtcggcctcaggaaggcccaaataggatccacagggaacaaggtgcggtgaaagctcgtgacgcacccctgcttgatgcacgcaaacatgtgggaataggattcaccacaccctcccggtggtgggacctacgtgacaatgtctggtaaaggatgttaaaaacagtgggcctagtgggaatgcggtggtcaaccgcgccacttggtttcccacatccctatcaaggtaggcaaggggtgaagtgatgggtggtaggtgtggcagttgttgccctatctctcatgcgcctcgccccgaggtaaacatcttgtcaccctcaaatggggagacatcaagggcccaagcagaaatggctcatccatccagcttcaattaggaatgttagctcaggttctgccccgaaggcccttcggtgagctccgtccaagatttaaggagttatcccctagcaaggccgctgtgccccaaggctcggggctcctccttagctccgtggggcttcgcttgccatcctattggagagccacgtgttgacctgagattggtctatgtcttgttcaatggcttaggggtgaggtaacggggcatccaaccggtctgcgccattggttgtaggaaccatgttcccttgtcacaaagagaaagtgtttgtctatgatggtgggggaaacttgagtcgtcccactaaatagtttggctatgattatgttgtctttctttgatgtcccaaggagaatcctggagaagctggattattcctgatattgatttttctggcaaagtgacttactgaatggaatactctatgtagacaaaaaaaaagggtcttggaatcctaaatctggatatccagaataaatgtttgcctggcaagtggttattcaagcttattagtgaagctagcagaacttgcttagaagaaaatacctatcaaaagtaccgttattaaggtgcgaaaacagatgggttattctcatttttggacaatacttgaggttaaaacataggctttttttttcctgtggctcttttaaaattggcacaatggatcccggttaagattggacgactgctgattgggtgatcatccccttaacactttatacccctacgttgtataatctgattagaaacaaaaaattctttcgtgagtgaagtgttctccagggttccacttgatattttttttaaagggctttagtgggtaacaatttgttagcatggcatattttttttaaagattgtggcagtgcgtttgtctggaaggttcaaaggatgggaattttttcagtgacttctatgtacagattgctcatagtgaccgtgatagttttcaattctattgccaagttgcaagattcatttggaacacgcattttattatttttggaattcgaccatcaactagcaagtctaatcttcctgtaattggctaaatggtattcaacctacactaaaggatcattttttttaggaatcacaactttatgttgtaatgtttggttaagtaataataatgtggtttttaatggagccaagactaactcctttttcaaatcattttcagagacgagttaaatttggttggaactttagaaactgaattttagtctccctcgtgtgtcttggtctaaacctgtgttaaaggatgcctttgttgtgtgttgtttgttgggtctaagtactcttgtattatcctttggctgcgtacacccatttgggtgtagaggacatgttttatctatctattatctaaaaaaacacgaccaaaaaataagatgatatgattcatctatgcagctgcggcctgaaattctgaataaatgcttggtattctgctttgcatcataaaacagacaaagatacagcagccgatcgcaacttcacgccatcatcgtcccactttgtctctggagcagtggcaccggcaatatatgtctgtccacacaacaccacatgtcaattcaaattaaatactgtgaccgaaataggatgccaaagtccagcaattaaaaagaaaatgaatcgataatgtcattaaatctctaagataaagctacagattacaagctttcggcacatctgtatatttggtccattgttgttcccagaacagaaacaaacatgaagacaggaaaacattttcccagaacagaactgcccacaaaaacataaaggaaatgagtgaatacctttccactattcacagtagccattacagcaacatgttctttgtccacaccaaactcataaaagtaatatgtcctgcagaaccaatctctcatgaccaaaatcaaaatacaagaacaattctgtccaaattgggacacttattgatgagggataagattttttttttgcctcaaaataaatagaaaaggtcatatagtaccttatatcatcttcatccttaactttaattgttcgagctgagtataattttgcgccacctatgaaatgagacaaaagaatttacaaacaaattggaagagctaagtcagatatttccaaatgagtacattatgctagcactacatgctaacagaatatttttgcttcatgtttcctcatataattttttgaagtgatggaaacaaaaaatggatacaagtttatatttctttgaatattttaaccaagcatcaatattgatcatacaaagttttacgaagacaacagtagataacgacaaagttgtacaatgtgaaagaaacagttcaaaatagaatgtagtaagcatgtgagtacattgtgcaactcattaagaaagcagttaatagtgcacttccttgctggacatttattttaaaaatgatgcaaaattaaccaacatcataagaacattgttaagataagatgccccttcaatttgtaaacatgatgttttagatgttaggtcattcaggtgaaacatcatatatacagcagcgcccacacaagaagctagatcaagagttagcaatttcctttgataagtgaaaactgtgaatatgccgtgtccttattcatcttagaaacttattttaaaagcaaagtacatctctgaagtctaagataacagtaatcaccaggtacaaatatctttgatgcctcctttaaagtgcccaggtctgttatatctttggcctacaaaccaatgtttgtgtcagaacataaattttttggctgattgtgtgcaacataaaataattcaaaataaaaaacatgtctttgggccttgattacagagaattgttgatataaagaaacattatgaacactcctgcacctactagtgcagtaccagtttctactagtcagttggagcaaaaaaagtaatgtttgtcgcctctctgtgaatcaatgctactattgttcattataaatataattaattgggacttgacatgtgttatcaatactatatttatttctatataattcttattattgtttaggggtgtttatcaaaggatggtaaattatcaacatataaagcaccatcaaacttgtcatcatttcgttttcgttaatgaaaacaggaggatcctgcctctctttatcaaaaaaataaaataaaataaagtgccatcaatcatactaccttgcataacacagtgagacaactgcacaatattgtaaatcaatttatagtaactactaactagtgtgcaaagctaagccgctttaatgattaggaaatgggtcgttggtcattccaaagagttgagaacatcagattatacaaatcatcacattatcttgcatcacgaccaactaaaaaaaaaacgaaccggtgctctaccattatttttcttttagacaaaataaatgctgcacatacagaaaaattcgggagggagaacacaaaacaatcaaactatagtaacagaaaaataactagttgctgtgcaaacctctaggaatgtgattttgagctgattcgatggcttaattaccacgcttacaagttcagacctgcattacagaaaaataacagggtaatcatcttagctcgttgaatgtatttagtgatacaaattctacccaatttcttcctagagctattttcgtaggcgaatttgagattaatagtattgtaaaatttataatcattacgcatatctcgaaatgctagagagctcgataagtcaaacgggaccttacttacctacctgtccggagacgcgaagcgagcagcgtatgtcctgggcttcgccttgtcgccgtagtaggtcatcccgacgttgaactcctgatttgtcgataaaattccgaggttaaaaccaaaatgttgagctcgcggcctcgcgcgactacaatgcctgaggaaaccgaacgcgcaaggggacattgggaggagaccagagacctcgggctccaagatgtcgtcgaaggaagggggaacgcggatggagaagccgctgccgtagtactgcgaccaccacttggtgttcgcgatgccgcccagcagaggggagcccttcttattttgggaaggctcccccggtggccgcctcctcttcngcggcggcggcggtggccggacaacggagaaccgcacccccgcggaggccgaggcgatggcggtgtggatggcgaagtcccggcgcgaggcgccgcatgccgaggcggggctccgccgccggggcggcgggttctggggatacgaaggcgagggggcgaggcggaggagcacggcgggggccattgcgcggcgaggcggcggcgccactgccgagcggacggcgcggaagccgcggcgggagaggctggaagttcgccgtggtgagaggaacgcgcacgcacacggggtgaaccgattttttggtggataagcacggcacggtggtgggccctcctttccgcgtgcacggcccacggcccacggaccacggaccacctcccctgcagaatcaaagcccactattcactagttcacctttctgtagctgaagagtccgatccattcacttgttatctactcacccttggttcttcctctctctcttccaaatctccgaatccagtgctccacccgtccatcgagcccggctgagggacggagacgtcttcgccgccgacgaggcgggtcccggccttgtcaggttagggcattcccaagcttcgctgctgtcgaggcacctagtcccgtcgcagaattttttatttttctccatatgattgcatcagtttttctcagtaataactagtatattttttgttgcaaattatcttccattgttttgcttaccggggtatttgtggcccaacaaaaggttgattttctcttgcagtcaagatgtctgtgtcctgtgttgcatcgaggacaatatctgtatttttctttctttttgctggaaacatgtattgatcatacaagtctgttacttttgaaactcttttacttgggtattgaagctagtaaatagaagttgtatgatggaagtgttatctgacatcttttatgtggccaagataattatagaagttctaaaaaattagtggcatagataattgtatcgcgtgtcactccacagacatgtaggtcaaatttgtttttttggatggaagagtaataacaaatccaaatgcaaatgcttttgcaccttgttaagtctggtttgtttttctattttctggtgcgtggattgaatttaacttttgtttgtgtagtgttgtattcgtcataaatgtatttattagccatctcatgtttctttttggtcatcagttgaccaaacagaaagatgttggttcgtttctgtcaagaacgttttgttgtcatcattgcaattgaaactctttgtttttcttgttgcaacaggccgctcaaatttccgtaaaaaaatgacattcacaaatgtagcatgttgagtgtctaatgggattaatccatcagatattcaacccatagtcgcatcctgttttatgccattaacagtgataaatggttgtcgagcacattgtgtgaagggtgatccaagcatctaagttgcatcttttttcttcttttttttttttactttatgcatatgccatatgctatccattagcctatctgtgacaatttggaatctgaccgatccgtgccccgaatttgtatgtaggtaaaccatattcgtgaaaaacagtattaaacagcaaattggcagtggacaccctcagcaactgcacaactcttgtggccgaacgtggagttcttggttacgaggtccgtcaaaaagcccaagaaaaaaagtgaggcagatcaaataacaagcttgagtgcttctctattcgatagaaggttcagagagtggaaaaaaaaaacaaaaagctcgaagaaggtcaggaacataagctgagggagccatgatgtccactctctcattatcttccccactcttcctggcagctcctcccaaaggtaaccatctcccaatccaagaacagctctttctcgcactaccatgggctcctgccatttatggtagataacccttgctgccagtagacgatagtgacaacttagttaccacactctttctcttgagtggtgagctttgttagggtggtgagtagtggctactgactcgtttgtgccatgtttattggagcaagaggaattcaggaccttccatgtgaaactgcactagatcttgagatgagaagctagcactaataggcttcagttgtgcttaagccatgtacttgctgatatgtaaagcgagataagggaactgtccttcattggaatagtttgcggtggtggtgactggttgattacctgcctcctccatataccagaaattattaacagagactgtgaaaggtcacagctttgttgcagctagggtcatgtctcacatgtatttgctatttttgtgatcagtcctgaattaaaaagttgccgttgtttactacgatatgatatactgcattgctgttatcataatgttgtacatgtgaggtgatttgttttttgttctacttctgcagttcaaggtgtgatttcgtgtcgagcggctttagctagtgcatcatggaactctgttatggtacatggtgggaggcaacggcgtgcaacaatagtaaacgtggttagactttgtatagtttacccttcctttttagcacctcttgatgtggttcaatttaagttgtctttttcatgattgaagaggcttaaaatttatttcacgaaataatggcattgatgcaccaattaaatcatccaaggggagcggatataatgaaccagcatagtttataaacatttcatgcacaattgcattaaaaatcctggcttgcccaacacccaagaatttaatttaccagtgaaatggaatttgagtttgttttcattctacagatttttcatgtgcacaagataacttagttcacatttttttttatgatctggtaacctgtgtccttcttttcagcttggaagaaagtcgaagaccagagagactatcgtccctgaccctgactatcgattgccaattgttatacttggtgagccccgtgattattgagtagaatatttctagatttgtacttatacgtgaagtctaaagatgcattagttgttagcattgcgattcctcaattcaactaattaactagtattatccaaatacagggatagctggtgcatttgcatatgcagacaatcttcttgctgctgcacctgtaggcctactggggtgtcttcttttgttccaggtcagcgcaagcctgattaagctctggttttataatatctgcttaagatgttgtgatactatcttttctccgtaggatataatctttaagaccatattgagtaatctgaaatcaaacttcatggaccatactgcatgaatgcagtgttgcaagagctcctcttgctaattaattcaaattaaaactagttgttcataagcacttccatcatcaactagcacccatggcttattttttcgtctctttttgaagagcacctttttttttgcctttttgtactttgattgaattttattggtcatttttgagcaatcgtttgcttcattttcatgctaacacggatctcaatgttttgcagactactagagtacgatttgtcttcgatgatgaggccctggtttgtgttctctatcttctcaagtaaaatacttatgttgctaagtaaatgcattactgctaagatctgtaaatctgtaatgatttacctttttttataaaaaatctgttatgactctctgtcacatgaatgatgttattcttttcacatcatagcttatgtggattaaggtgtatttctgggtcttcatatctataatttcatgagtgtccttgattctatatttgtgttattgcaggaagtgaaagtgggcgatcagttagaggagtcaggtgaaaatgtatttgtcggtggcaagaatcgttggaggtaagtaggcatgtatatcttttacaccatatgtggtccagaacagaatacttttggcaagtcagtcgaaatgatttcgtaagggaaagatatgtcaaaaactaagcattagttgcttgttctatgtccataaaactaaaacatgtcgatcacgcgccaaaggtcgggctatcttgctcgataaatcgctttgatcatggtaacagtagtaatgcctgataattgaatgcacccacaggtactcaacatttgtgaattgggaactgtggtggccacaatttcctatcttggtttatttcaaggagacccaaacaaaacccgaagggcaaattcatttcttccctgtgatttttgtaagtccactaattttactaactttgttgttgtatcatatggaatttgatttggtgttggcgtgttgcaacacagaacggccgacagctttatgatgctatggtggagcgtgctggaccttcggaaactagcggtcctaaatagtgagtgcttccctcagggaggccatgagttgggctccatggatcctgtagatttagttgatacattttagagggacaagacctactactatgatgtacaatattagaacatgcaattaaccttttaagaatgatgtacacagtatatatactctgtacttctgtatgactatgtataaaaaaggctgatttaatgcaacaccaacacggcatattccaatctaagtcaatacgcaggagtttaccttcttatatacttcctccgtttaacactgtaagtcattctagcatttaccacattcatattgatgttaatgaatctatatagatatatatgtctagatttattaaaatcaatatgaatgtggaaaatgttagaatgacttacattgtgaaacgaagggagtagttgcatttattattaactagaaaaaaatatctgtacgttgcaacgggtgaagattattttaatcttattattattattttacggtttagttaaggtaaaattcactgtagtattcgtttagatatatatttttctagaaaatcatgagctataattatgagtccgatcatctcaagttagcatgtgagtttttttaaagaaagttcttatacatctccttctgtattttcaaaaccgaacgaatttaaaacccgactcaaatacagatttgtatttctaaaagcgaacgaacttaaaagttgactcatacatggatgacgtaacaaagtatcggtaaaaacatatttaatttttataatagtagagatagagatagagaagagatatgccagatgttatagtccatcaaatttgtatcggtggaattgtatgcggtaatggatttgggtattgaaccaatgttttgccatacagctgatccgaaaaaaggtttatagcaaatccggaaaaataaacataactactactaaaaacacggcaaagaggtttatttttttatcctatgccatgggtaatttactagcaatataaaaggacaaatatacgtctggttagagaagagtaagagggagcagagcgaccgtcctggaggcagaaacccttgtgcagttctgcccttgtagtatggcgaccagacatggctgtccacgctggcccctcgccttatccggctccagaatcccatccacccaatcacaatccaacccacgccattgcaaccaaatttccaatacacaaaacagcagaaactctagtgatcacaagctcagctcagctcagctccctccttctccccggagaagcagcggccggcacggcagcaatggagaccctcctctccccctccacattgctctcccctctccgcggctccaagaagaagccggcgagccccgccgcgtcggcgtcgtcgtcgtcgtcgtctcccgccaggtccgtcgtctcctgcgcgctcaggaggcagcagccgccgccgcaggcggtcgccgcttggcgcggagacggcggccgcggtggcggcgtcgggagctgggcgacgttcttgcagcacggcctggccgnnnnnnnnnnnnnnnnnnnnnncagcatggcgccggcgcccgcgccggccgtggcgtcggagttcgacgtgctgaacggcgggccgccggaggacacgtacgtggtggacgacgccggcgtgctcagccgcgtgaccaagtccgacgtgaagcggctcgtccgcgacctcgagtcccgcaagaacatcaggatcaacttcatcaccgtgcgcaagctcacggtacgtacgccatcacatcgcatcacatcacgccgccgccaagccaccgcgcgtctctgaccacctcgccgccggcgcgcggctcgtccgtgacgttaattccttgcagagcaaagctgacgcgttcgagtacgcggaccaagtgctggagaagtggtacccgacggtggaggagggcaacaacaagggcatcgtcgtgctcgtcaccagccagaaggagggcgccatcaccggcggcccggccttcgtgcaggccgtcggcgacgagatcctcgactccaccgtctccgagaacctcccaggttagccttcgccccagacgccggcgtgctctgccgttcacgacgcagaacaaaaccaacaggtctgatcgtgcatgcactgcagtgctggcgacggacgagaagtacaacgaggcaatctacacgacggcgaagcggctggcggcggcgatcgacgggctgccggaccccggcgggccgacgttcaaggacaacaagagggagtccaacttcaagacgaaggaggagacggaggagaagcgcggccagttcacgctcgtcgtcggcggcctgctcgtcatcgccttcgtcgtgcccatggcgcagtactacgcctacatctccaagaagtgaacagcagcggctacctgttctttccaacaaaaaaagagagaaaaaatgagcagcatatggtgctgctctgtacagtaaatttgctcaggagatggctaaatctcccggttttctgtcggaattttagaggcgaaacagagaattatgatgaacacaggtgcaccaccgtgccggttaatttttattgtagtagcataactgaggcactgagcaattaggtgcaaatcagcacttccttaccccgattcctcttcttctataaccattttttttgttgttagtttttgctctgttttatccttccagcaatgctgcaacagttcttgcaaaatgtgcaaactctccagcaaaaatttcatgctacaacaatgcaactaaacctgtcttttagtttttttttattattttttttagagaagggtattttctacccggcctccatatccaaccggatatatacggccattgagataagaaacttagccccgcaaacaactcaatctgaaattcgctccataggagatttgaactcaggacctttgggtactactcaggtcactgtaacccctacatgtcttttagttaatcaccgctgaggctttgtagcagtagtagtcgaagtatatatgaacaactgaaaagagctatatatgtgattattatctattgacaagtaacaaatacaacgttttttttttatcaaatacaacacctcgtagtttataaaagcgaaaaaaagatctgctcattagaacttcggttttatgagaaatggcatcttgtcagcaaatggagggtcagagtatctccctgtaaggatctgcgacgcgatgtggaaattcgcagcttctgtgtaatggattccatcccaattgacaaattctgtactgtccttgcaccctttggctgttacaagattaccattcagagacgctgtctgcccacaaggtactctactgtcatagttcaagggtggccctccatatccacagcatgcttggatgggattctcgaaccctgtaataatgcaaaggcagaaattaagagtgttgtttgaagggattattgttttgaaagcctactgcttaatattcttatgagctagctacaatagtcatcactgatccagcatgtgtccaaatgcatagtagaagaaagccaaagaaagaaaatgttgttgtgtagtgtcttgtacaattccattgtctttaaaaaaaagtgtagcagtgcaagggaatgagcaaatagcgaaaaaaaaagggtaaaaagcatctttatttccctcaagcgaggttcataattagaagcctagttcaggactgatggtggcaattcatcataagtcttctagttgaagcatgttaatgttaaaaaaaagctcccagcattgtaatatactgactatagaaatgataaatcatgtatttgatttcaagataaccaaacaatgaggaaattagatagtttggttgcataccatagcgcgaataattagcgatcaggctgtacttgatggtgtagatgtcaacataagtgatactagccccagcgaattcacctcttaactttgtgcaaagtgcatgcagctgtaagttgaaaagctttgcaacacgattatgctttgctacacaacgaagttcatccagctgggatcggtctttgccgaaaaaagctacgttttgaggtaagcagccaagaggacctgtgttgtgaatccagaatttcctggcaccttgctcatataatttctgaaaaagaaggaaaacgtttagagtaggtcctttcccaatcaaacagtacatagttggaccagtatggaaaaatggcaaactgattattttttggccaaggcaaacagattattttttgaagactgaaaaccatattctacaaactactgaagaccattgaagaaaaaaaaaaaggttccatgcactgcaaaagcttaagaatgaaaatactgtgtatacaaaccttcagcccagtttcgaattccaacaaaatagtcggaatggatgcagcaacttggtcctctgttttccagtagaattcaccagcaaggtcattttgacctatgtcaaacgtgtaaagtccccgcgaaaagtaatccgactgaggaatatatctcctgtacgtatctcctgcaaagtaaataaataagattccatcactaataaagttacatagcctatattagaacatggaaaatcaaagacaccaggtggttaggttaacagaggagaatatcattctaattcttgtactgatatatacttcctccgtcccaaaatgaagccatttttgaggttggcacgggtattaagaaagtaagtgagaatgattggaggaagtgtgtgattggttgaaaagagaaagtaggtgaagaagaatggttgtgattggttgagaggaggaggtaggtgaagaaatagcttcattttgggacaagacactgtgctagaaatagctacattttgggacggagggagtattgattaaaaaaacataatggaactacgaaaaaaacttgctaagtgttaaaatctagtcactgcaaggattccaaaaaaacttgttatcattgcgaatgaacaatgataaataatggaaacttctacaattttccagaaacacaatattggcctaaaatgttctgaaaattttcattcactgaaactcactcaacgtctcaactttatgtcctctttaatttattttaagtttgatttgttaatcatcttggagtattttctaggtgcagttctttattttcccctattaatcctatgtaacacaaaattgccaccttcagtcaaaattcattcggtctgcgtgacttttatgggtacatactgcagaagacattttccattttgctttgtatccacaacatctaaagatgtgacgtatggaaaaccttgccatacctttagatagaagcttagtaactttgtccttgaatgcaaagaattgcttaatctgaagaccaaatgaaaatgggctgacagatgttgccgttgctggagtaattgaacagccagcttgagcaaaattaacacccgcacgtaagttaggtgcaccaacagaatccaaatatgcattgaggaacggcatatccattgcatccactgcaggaggaagtttaaaatcatgtcagatagtggcccacataagtttctcatgtgcaaaagtgtgaaaatagaatttcctagtcatagtagcgaaatgctttttttgaaatttatagtagcgaaatgctattgctattcctatcaaaatgtaatgcattaacccactaaagcaacaatatttagaatctaaggttccaggtttatagtgattatatgaaaactatatcactagacctattgttcagaggaatgttttcagaatactaatcttctacatggaccataattgtagattgcacaaaccaattgcaggtcacatctcaaaaactgtgaaagttagtaatgtgaaataacgaagagaaggaggtggggggagggggtgatcaatagcaacttgtgatagtgttttctacaactaaaattgtgctggccatttagatttccttcatagttacgcctccaactcccatggtttcttagtgacaccaccacaccaactccaataataaactgaaaagcagtagcctagttaaactaaataaatggaaacacattacacacggtagttggtgggtcactcttaagtacacccaagaaattaggcactaggcaagtaggcagctggatggagacagagcaaagctcaccgcgagtcaaagcataaaacaacagtgacctaatttccccaaatgcgatgaaaccggatcaagaaacagcacatcctttcctccagatctaacgaatatcccaccaaaatgctgcaagtaacagcggtacaaatggcacgaattggaccacccacatccagcacaattcctccggtgttagaacagagtacactgctatcattgaccatcggcaattgatgccccaatccccatcctaaatcttctaaccaccatcacggccgttctggtgatctggtatgttctgcaaaggacagtcctaactaattcgcccttttccccaaccaccgtgcggaccaaatggcctcactgccgtcaagatcgacgacgaacagtatcaccagcacgccgattctttgtttcttgcaacactagattgggtaccaagaaccaatcggcgacgagcaacgatttttctgatgcaattcagacagaagccacatcgccgatgcccccggttaccatgtgggaataagattgcaacaagcaatgtgaacgacgcactgccacccacatgaagaatctacaaggaaatgggtgagaacaagagaggtgagcttactgaggaagtcgatgatgaggcggccgtcgcagaaccggccggagggggagccgaagaaggtggagccgtagggaggcgcgatggactcgaacccggcggccacgcgccctcccgtgtcggagttggagtcgccgaagttgaacaccgccgggtagttgaactccggcgacgacgcctcgagctcctccgcgcggccgccgaggcagagggcggcggcggcgacgaggagcaccgccgcagcatgcggtggcccgcgcatggtggcttgcgctcgctagctaaactccactctgcttctgctctcctgctcttgcttctccaagcgaagaggaggagaaggttgctgatgcttgaagctcttaagcagtggagatttgatttgagttgattttgggttgtaaagggaagacctggccacccatgattagtgtactgccaagctttttacaattttactgctatttgtttttgcattttagcccttgtgcttttggggctttgcgttagatatggcagtatggagagatgggaggtaattacataaattttggaggggttttgtgaagctggtttctgaaattggaagcgaagagaggtgagctagaggccctagtagagcttgttccgaaattcaatcttgtgtaaagcattcagctcactgcattgcacggaaagattgccgttttatactaccttgctgctttcgtgagaatcggaacaaacataacgtagctgtgcttgtgcttgtgcttgtgctcttctctctctcacacacacatagaaagaggaaaactggagatggaaaaccaaaactttcttatgactaaaattccacgcaagttctagatgaaccatgtaggtttcatgacttcatctgagatttcctattactagaaagtagaaattaatcatgcattcttttcctccccgaaattatacactactcatacgttagaatgaaaatattagcacgggacgaaaacgaactgactggaagggtgcagaggtaaccccaaaaatcactattggtgtggtggaaatgaggggcataggtggggcaggagccaggagacggtgaacaacagtgagaggtggactagtaggcgacagagtaagagagcgagtgtttcgcatcgcattgcaccaatacatccaatatataacacgcaccggcggtgtctggccgactggccctaggcctcaccctcacgatgcggttgccgcgcagctttacccgagtgtcaccacttgcgtgcggaagtgcccatgcagccatgcgcaacgaggcaacgatcgggaccaggtgataattttttttaattttgctttcgtcaatgcctgcctattcgttgcattttcccgtacggattcggttgccttgtcgtgtcatgcgttctcaggctccatgatacagctataaaatatagcaccataaagagatttatttaaatttgtaatattataatgtatcatatttcatataaagtttatttattttgggaatgatggagtagagcctagccaactacatgcgttcgccgaaatgcctggccaaatcggggcatcctttgagagtttggattaaaaggttgaggtgaatctcagagtaaatagaagtaggaatgatagaactgccagggcgttcacaatgcagtgaggtggcattctttccccaaccatccacatcagatattccaccccctctcccaagatgcgtgtgtggcgttcctaaccgaagtccgcggagccaaactaagtcacatgttcttcgtcaaaacttgcaggtgcaggatgaggtacgggttgagcggcgcattgggagagaccgtggcctaatgcgacacccccacatccgtgtgaagcggcagcggtcgccggcgaggccaccgccccaatcagctgcatcgtccccaaagcggtgccgctcgccagatccgacgaacccgaggctagatttggcgagctcgatggggcagcaaaactacgggcataactaaagtgtgacatgaaaaaatgtcttacacttccatacttgaaaaatcaaaagtattgtaaccactacaagtcatcagcttgatacgccaatgccaaagattgagtatgagtagtgacgccgtgtttagttccaaaatatttcttcaaacttccaacttttccatcacatcaaaactttcctacacacataaactttcaacttttccgtcacatcgttccaatttaaaccgaacttccaattttagcgtgaactataaacacagcctgagctgtggagttgtggttttgcggatgtatacaggagatcacattgtgttccaccatcaaatgggctaactcggaacgtcaagaccatctttgcagtgccaaatacaaaataaatcaatgtagtgccaaactatttttgtatttttgcactttagaccttgtcttaaaggtattttctgtggaggttggatggcgcagcagcgtggtaagctaccgtaattaaggagattttggaggggtacgatggaattgatttctgaaattgtaagcaaagagaagtgagctagagcctagaacttgttccaaaattgtgtaaagtatattcagctcactgtattgcgcgaaaagattgccattgtacactttttgctgctttcgtgagaatcggggtaaacagaacaaagaaaaatgagacactgaaattacccataaatatttttttttgctgggatacccataaatattagatgaaaccaatatgatttcttctcaaatttcctagtacaagaaggtacaaatcctgcatcccaaaaccatgacgagtaatctttgtggaaacataagcacgaagccaaacgaacgaactagaagagctgacgaaaaaatttcactgcgaaaaggtagttgcctagttggcgataaggaacgctgaacaccaacagagtagaagcactagagttaatagcactgtagtccaaccggacagcgcgagtgtcatgccaccgtggcaccacatggcggcccatcgctgatgtggcaggaggatggcatcaacattactgccattgccccccctcccccccacggcgccaatagagaatgtcacgggggaatatcaccgaatcccaatccccccttcccccacccatttgccccccctatcttttgtcttagcctgagcgcatctcgtgcacgcgcgctctctctctctctctccactctcacaaatcctcaaatccacttgatttggagccatttttcataggatttttaaggaaaatcgatgagcaaggtatactcctccattccccttttttttcgttttaatcggtggaatttgttgattggagggtaaccctagaactattttttgcccaatttcgtgatcttgacagttgaaattggggatttgatgattgtagtgttacatgcatgcaatgtgctcgttggtgctatgttttttcagtacatatatgtggtatgatattttttagttaag

SEQ ID NO: 23155 - DNA, 12884 bp, Oryza sativa
atctcaactaaaaattatcattaccacatatatgtacttaaaaaaatcataacactaataagcgcactgtacacatgtaacactacaatcatcaaaccctcaatttcaacggtcaagatcactatattagacaaaaaaaaataggttatagggttatccttcgatctacaaattccactaattaaaacgaaaaaacaagagaggggaatgaagggtataccttgctcttctccaagaaatcgcgtgaaaaacaactccaaatcgaatggatttgaggaggaggattggggggaggggggaggtgagcagtgccgcgcacgacctaggtagcgaatggtgaagaaggggcaggggtagggcccacacggtttaagtgcgcccagccctggagggagagcgccagcagtgttggcatggggaggaggggcagtgctagcaagattgacacggtggcatcgtcctcttgccacgttagcacttggtggccatgtggcatcatgatggcatggggccacagcagtggtctaaaagaaaccattaaaagaaaccatttatagaacaagttgtttaagagtttatttataaaataagtttttaaaaagagttaaattgtaaaaaaaattcaggcaccgatgtctgggcaggctgcaggcccctccacctccaggctccttttttgtctattgcacagctttttccagtgtcgccactcgcgttgtcgcgcgccacgcccgccaaggtaccaacccctacaattccacatggcccggcgcaagacatttgccatttcgccgtgaatgctgatgctgccccaacgatcacgaccaggataagatattttatctttattttaggtctatttatatccccataaaaattttatagcccgtcacaacgaatgtttggacatatacatgtagtattaaatataaacaaaaaaaaactaattacacagattacgtgtaaattgcgagacaatttttttaagcctaattgcgccatgatttgacaatgtggcggtacattaaacatttacaaataatggattaattaggcttaataaatttatctcgcggtttacagcagattttgtaatttgttttgttgttaaactataatttaatactttaaatgtgtgtccgtatatccgatgtgacacgctaaaactttacacatactccctccgtccaaaaaaaagataaaccctgatttccgtgttcaacgtttgaccgtccgtcttatttaaaaaaattatgaaaaaaattaaaaagataagtcacgcataaaatattaattatattttatcatctaacaacaataaaaatactaattataaaaatatttcatataagacggacagtcaaacgtgagagcggaaactcagggtttgcctttttttttttttttgacggcgggagtatgtatctagctttgctttcattactgctgtctgcgtcaggccgtgccggtgccgtgccgtgccgtgccggtgcggtgcgttctactgcaatctacagcctccattgttcgtttagttacgagcctatccaaaaagccgactagcggagtcgctaaacagctaaactatagccttgtttagtttcaaaataattatttaaactttcaacttttccatcacatcaaaactttcttacacacataaaacttttaacttttccgtcacatcgttccaattttaaccaaattttcaattttagtgtgaactaaacacacatcgttttaattttaaccaaactttcaattttaatgtgaactaaacacagccatgtactactccgtagtatgaccaaatcagaccatcgttggcaaaatttgtcttaggctgtgtttaatttttgcaaaaaagttgaaagtttagtgaaagttaaaagtttacgtgtttagaaaagttttgaatgtgatgtaatggaaaattgaaagttaagagtaattgggggtgaactaaacacggccttaagcaaacttcggcacccacgaatatactatggcagccaaaggcaaaactgacggcgcaagaaatctccagttctgcaccacatcggtgtcagcgccaacggcgcgcaacaaatgcaggtccttgtaaacgttgcacagagaatacaccgtactatgccagcggcagtgtgcagtggcatacctgcacctgaaggcgggtgcgggatacacactgaaaatgggattccttgtgaaaatactagtacaatcacaagaccaacaatatgcattaatagttccaaacaaatcagctcttgcattatgaactgctgagaagttgcaaatggtgctttgagatgttttacttaatccattactgagcagtactccacagccaaacgtcgccaatagacccacaggccacatggccacattggcatgcttggcacacataggagtactgcagtagggatttcacatgacctgcaggaaattggggaaatgaccacattttaagtggggcataaatccctcggcccacttccaaagaaaacacactgtaaccactgcagcttggtacgccaaatgttgagtatgattaatgagctgtggactagtggaggcccccattatgtttcaccatcagacgggctaactcagtagatgtgcttacatatcatgttaacagtgttttaatctcaaaaacatatagtgcagtcgcttgataaacagctcggccagtcctcaatgtaaagcctagttccagatccgaacaaaatcgaacccttcagcttgaacttataccacagaagacccatcgaattattcgcagtacaacacttgagaaaatgcattagcattacttctagaccctggaggtctgtgcataacaatcgagctgatggaacaggttaagcattatacctctgatatatcatggttggctaaccatattttgttccttgtgccaaagaacgacgtccttgtagggcaaatctcctccgaatatatcaagggcactcccaaccgtaacatcaactcgactgttgcctgctctttttatcctctctaggtcatccattgtagacacacccccagcataagttacaggtatctacagagccaaagatactattatgagttcataaacaatagaactaggaacattcaaatacggttaaagcaaggttttattggtttgcaaactgggagcctgcctgcatgcatgatcactgtcacaacctattgacctgcctaaaccgtatctgaacagcccgagtaaatgtccatctcccaaaagttgtatcagcatgcccatatttatatctaaatggctaccagtgctttgttcgacaattgttttgttcaaaagaaacaaggatggtaaaatgcctagctgcagcttgatttagcatcttgagtttaagaattatgaaggccatggtcatcttgttatatggagtagcttttgaaataacattgcctgtgtagcatttttcttcgctttcaaaaatctagatgctcaactacaatgcagtcaattcagccatttaaatacttggtttattgacagctttttcaattatagataaagcaagaatctaaatttcacaagaaagactaaacttgcagatacagaacaaacattaaggatggaattaagaaacaagaaaaagctggaagaatttaaattaatgaatcaagaatacaattgcacgtacaggtgaataacgtcccaatagttcgacaagttcttcatcaattcctaacctgcaattgccaaactagcttaaatcagaaaagataatggtacaaaaagaaagctgttcactactaagtgaatacacaagtgaactggatatacaaattaacaacctatccaagatatgagcagttgcactactgaagaacacaaataagcttttgaacattagaactcattccaatcaagacaaagaaaaaactaaaaagtgaaaaaaaaaacctgcttctattgggacgatcatgttaacttcatttgctcaatgatgtgtcattaaatttaaatacctaactgaaagcacaaaaaattggatctttaccgagtaattggttatgaaactaagggtgaacagtagcatatagaaagttttggcagacagacatttaaagtcttattacaatatttcatgctgccattaccaatccaattctatcaagaaagcatgaaacagagaaaaggtataaaacacaccttttcccctccacatcaacaccatgaaccaaaaattcatctgcataggcagcaagatgttttaatgttggctcatccacaaagacatcactgaatttctgccatctgtcagtcacgatggcatatcttccatcctatcaagaaatattattgtaagaacgtaattaagtatcaaagtacctgtcaataataagataatgacaaacacattagggtaatcctaattgttctttcttgtatttacagaagagaatgtagctagcttgtgtttctctaacttcgatataaactattaaaaggactaacttgtttaggttaaattttatcttgtttcaggggtaaaatgctcatatctgatggtatgactaattatctttatcagtaaaaatcattctgaatatgaaaaggaatacatggagtaattacacctaaaatagtgatatacacttattgttgttggttcatgctcttggatgtcagtttatcacagaaaccagttagttggaattcaactatactttggtatattgtatactgctctctatataactatcagggcatacatagtgcaaattatatttcacaatcattaaaccattttaggttaaacttgagcagatcaaattgaaaaattcaagaaagggaccctcatgaactgttgtaagcgaaattccaaaaagatgtaatcaaccatgccactgttctaacactttttgcggtatgaaatgccatgcatgccatgcgtttggaattgtcagtataacgacatgcagcataggcatcacactagaagagcgtgaactgcaggtacaaaaggtgtaacatttgtaagaatgtaacgagaacagctcacgtgaagtatttgaagtgctaactttctcattgcacacgcagtaatgaattaattaaatttgaaaagaagatgtccgaagtacttggtaccttttttctacaactaaggtccaaaacaagcctatgtttcccaaccagatcgacaagttgcttcagccgttcaatgttcattttgccttcactaaacacatactgcataaaaagactcagatgcatgattcacaatattcaactactgataagcccaagtacagtaaaaacaaaatgcaggtaaattacacaaaaaaaaatcctatcaagcatttgtaaaatggggtcagctatgtgcaagtgcaatattttgccaacaaaggcaaaatttgcctggctgctagttaggggagaagccagagggggcgagaagaggcctggcctcccccaatgcaaatttttatatcattgatattgatatattatctattgggagccttgaattcacatatatttctacactattttcttcaattgtagggctcatttggtttggtgccccaccaaatcatcggtaagtgccaaatcatgggcaagatttggtactactaatgttttggtagagttggttcataggagttgtattaactttgtcaaattttggcatcaatccaaacatctataaggtactattcaaagtgccaactatttggtagggcaaattttggcagcaaaccaaaacagcccgtaatcacttacaaaattggcccccctcatacataaatcttggcttcgccactgctgttagtaattatcggctatgaatgtattttgttgaactaaaagtaaaattaacattttataccatggaagcgacctctataacagaaaacatgtaagtaatttgtgatgaaccttaatcaagacattgcaatatgctttgacatctattactagatttgatagtactcacagagaatgatgagtaaagaaaatagaaactaaacaaccaaaatactcaaactaagctctatggttcatgtttatggtatgatgggttcatcaaagataacagacatgaccaggtggacatgagaagcttcaaatttatctcctgaagtcaccatgatgaaaaatccacttcatatcaatttactaatatacagtgaaatagctacatctatttatgtaagtaggtgcatcaatgagggatgagcgatagtcatatgatcaaatagatcaaatgtctcgtcatgtcaactggtgttgaccatgtttcagttgaaaatcacaagcaattgaagttctaaaagacttgactcgttacatgtatgcaaatgaagcatgacagcaatgaggaacaatattaaatacactttttataatatgcaatctaatgctgcagccagcactcacaaatagcaccgacctattagtagctgttggcgatcagcctggaaccccgaaggtgttcaacgaaatgcaaatcatgaactggaatgaactcgaacttgaacgtaagagaacctttgtgctggtaaacttggcaatgttttctgatacattgatcaactaaaatagaaaagatgtgatgaaagtctgtcaatctccctacaggaatgtgccatcccacattcggaggcttgccacgccatgtgtcctacaacaaatggttcggaggcttgccacaccaccacgtgggatggcgtggctaagtagggaagcatgcagcgcatggtgcagcaagccccccaacgtggatcgcacattcctgtaaggagattaacggacctgcattgcatctttgctatttaagttgatcaatgcattagaaaatgctgccaagtttagcaacacaaaagttctcttgtgatcgcatttgagtttgttccagttctaaattgtcatttcatcaaacaccttcggggtttgtggctgatcgccaacagtagccagtaggtacaaggctcctaagccccacaacaaagactcccttagattttacagtgatcacccaaagagaacaggagattccttagaccttgtggcttttggaacacttttccgtcaagaagaaaaaaggaggcaaccagcaagcaaattacaccaggaaggagaaaccaccggaatgttattgactgactggacaggactataggcaatgccattgcctgtagatcaatgactagtggtagggtttttgataggttgctcttatatcatgctaggctttggggtaacgttacagtgaaccaacaaattgtatttaacaagaaatggatatgaaatggaaatgcaatggggccaggcttaattttgttccggttaactgatgcacgtattaacatacacaactatatgtggtttcaaagaatgaaagagaaacagaacttatatacacggatcaaggcatgaacacgtacagaagtaacaatcacgtgactggcaccttcattaaggtaagatatcgcattctccaaatttattccacctccaacttgcaaaccacctagtattataatagcccacgtttattacaaatacttcaaattgattttgcttcatggccatagtagaaacaaaccatactagcagaagcaccattagcaggtgaaaaaaaaactctccaaaggctccaatgaccagaaccataataacctaaattagcatctcttgggcttaattttatggcaatgaacatgaaacatggctgtcagcatgaaccatacataattcaaaccccgcaatagtggaatctgacaggtataccactggaaaatatcatgaaacaacaacggaaaaggaagaagtgttattaagttttttcccctagagttgcattttggcaaagtatttttcattgctctcaaatagctacatgatattttgtatcagctagttttttttagaaaataaaaacaaacactgcacttattaaattatatacactgtaagcacccatatattcaatagtcacaaatgtggctttatatcataattattattgataacagtaaagaacaaacaactacagacagctgctcacaaaagaactagtccaaataacaacataattatgctaacaggtaacagctagataacattctcaccaggatatgcatgtagtgcttccatggcagcagcttgactagcaggatctgcaccaagcatgattacatgtccaccaataagttcatcctctttatatatatttgcaaattctgctggaggtttgtctgattcaaaatttgtaacaagtgccgtgccatcgtttgatgaatcccgaagagtagagccaacaatctgtttaactttcccctgaaaatttatattaagaaacagcccatcagataaatgacactgttaatgccagaagtaactgaactcacatggttgcaaaatgacagtagaaatcaatgcataagcctttagttttaatatcacggtgttccaggtgaatcgcatcgcaggaaaatttggagcatacaagctgaaaaaacttctgaaagtactttgcttacaaagttggggtatcaatttacgatcatgttaatgttcagaacacccatgaaacataagaggaagcaagtgttccactcgtacggaccttatgaatatcgatacacggcctgaagataacggcgcacaccacagcacgtcctcctgccaaaacaaacgagcaatcccagtttttcccccaattcgcgacaagcagtaacaaatcgagccatacagagaatcgaatcgaaagggacatcatactcgccacgccggatctcgccggccggacggagaccatcgggacagcccaaccggaccgcgccgccgcgcacggtggagacggaaccctcgatgccatccaatccagtcgctgccacaaccaacaaacaaacacccgcgaagcaaattcagaagcaagcaagcatgcgggagccccccccccccccaacccaggacacgattcggagagaagaagaagaaaccagcgcgtacgtgccgcaccttcgcagccgccgccggcggggaggggagggctccgcggaggcggcgcaagggcggcggcgagtcggagtcggggtcggagtcggagtcggtgcgaggcccaagccgaactaggtaaagagatttattggacggccaggatatgcacaggggcgttgatccgacggctcgaacgcctcgtcagggctaataatattgcctctcgcgagagagaagccaagccagttgagtcgaactgttgaggaatcgctcgctcgctcgctcgctcgccggcggcgcggacgaggagggggcgagatgttcttccacatcgtgctggagcggaacatgcagctgcacccgcggcacttcggcccgcacctccgcgacaagctcgtctccaagctcatcaaggacgtcgagggcacctgcaggtagggctcgggattggttgggcaaaccctagtagggcggggaggggatgtggggttcgacgggattcattcttgttcgtccttttgcagcgggcggcatgggttcgtggtggcgatcacgggggtggaggatgtcggcaaggggctcatcagggagggcacgggctacgtcaccttcccggtcaagtaccagtgcgtcgtcttccgccccttcaagggcgagatcctggaggccgtcgtcaccatggtcaacaaggtgggcgatgtgcctccgtccctcgccggattggtatttggtgttgggtggattagggcttgtttgtggttagtggctccaattcgttttcgtgttggttctgcagatggggttcttcgcggaggctgggcctgtgcagatcttcgtgtccaaccatgtgagtgcctgcattgcttggagctgcttttttctaatgctccaaatttgtggagtaaaagaatcagaatttatgctagaatgatcgatagacgataatggttcagtaccattttcatacacccagtttagctgtaccatcaactcgaaggatggtttttgtcatagaaatttctgatactaatttatcaaacatgttggtttgaacaatcttaaagtgactggaaggcaacataaggttctagttgaatttgtgctttctaaccaactaatgttttgttcttgcattttcccgtttctatttttgttgtgcagttgattcctgatgatatggagttccaatctggggatgtgccaaattatactacttctgatggatcggtatgcttcttttctacagttacttcttatgtcttgtcctctataaacattgacaactgttgacaggttatgattttttttcctgtttatttatgcttattggtgatatgtctgacttaaaaagaaatgctggggaatgtaatgtaatgtccattgtatccaattttggtatcagcatgtcataactatgcttgaaatgcatacacatatatgttcattgtttttcctagaaacgaatagatgtgaatactgtactactgttgaaggctaattgctttggccatcttcttttgcttactaggatttacttgtttgtccgatgcaggtgaaaattcagaaagatagtgaggttcggttgaagattattgggacacgtgttgatgcaacagaaattgtaagtttgttgacatctagtttcgtgcaaaaaaacaaacgaaaaaccaggtgttccctgtcttttagatttttgtagcattgctctcagagtaaccaccatatgcaattattggtgatgtaacccacttttccataccagtagtttgcatgatgtttttctttcctaatgtgtgaaaaagaacagatgtggttttatcagcaaagatcaaccttgatgtgtgtcaagtaaattagttgaaaagtatatcaaaatgaaaatttgacatgtaatcttgtagcaacaaattgcaagtaattaccatgaatgctcataagctagccactagtatggtatcataatagataattgttgaatgcatgtggctatattcttccctgaggcatttctgaatccatgttcttgctgtcataactcataaccccgtttaagctggtgatgtgcaatgctctaacagtttgaatatgtttgttgcagttttgcattggcacaataaaagatgacttcctgggcgttatcagtgatcctggtgcggcagtgtaaattatccggtgacaagattacgcctcttcatgctcttgaacgggaatattccgatgaattgtagtgttaaaatatggaagccccactggaaggggctgtaagtgggttggaacctgtattttcatcactataaatggcgctttaccaagttggcactgttgcttgagtgtgttgtgggattcaactttcaagcagtcatttaactaatcaaactctgacctttttacggactgtacaattttgcactgtatccttgcaattaaacattcaatgcttcgaactgcatccttgcaaaataaaactaaagagaaagaaagggctaagtaaaaaagataggtttacactgtcagttgttcatgttaggatcaagctaagggcagatacaataagttagcaagaacacagcggtcaccccacttaagttcttgacggcacttcctaatgaagacaggaagtatactttgattgtgcagttatactcaatattctcacgtggtccttcaatgaaggatctgcatacggcactgctcctgcggtattaacagaaatcagatgacaggagataaaacattggtaaagagcaaaaattatttggatatataagtctcaactcacctgcaaggctgcaaagaagttagagccagaggttaacctttcagtcttccttccaaaggggcttgcggtgcatacacttgatcaaaatgatcttccaaaatgatcttcctgacgattcaatcgttaccatcgtttccacgattccactacacagaaggggctcctaagatgccccaaaaactgattttgcaactcagcatttttaagcaattaaggggatgaagttgtcgtgatagtctttagttcctgattcctgaaacaatcaagaagatactctcatatgtaataagttcaacactaccatgacatcaaactggtgaatagatcacaggtgccttatcataccatcaaaccaatttgtccgaaatggaagccagggccactagagcaaataggcaaagtaatgaaaagacatccacaatgccaaaagaagattctgtaagaaagtagatcttgtggttgttagggtcaccacgaaatccgcgagcaatcatggcctacaaaaatcagacagacattcagagtatgaagtgcagtcatgtgcaaagtaatttcggctatagtgaaccatgtatgtacaatataagtgcttgaaaatgttgggcagcagcaatgatgtaatttaagttttatcctccttacaagccccgcagtactagtacaagatctttttatcaaaactgtatgttacttttaggtcataaccagtaaaattcttgataagttctcacaatcagctaaccagacaacctgcagtatgattgccttcagcctaaactttggcaagtttaaatagtgtgataagactaaaagctcataattcttaacccagtttggttcaatacattcagaccataataaattttcctcttacacattcatattcaacttaacagacgtgcaacaccactttcacaagaaaggaatgaaggattagacatggacttatactattagtattatcatggacgtcctgtatagcaaaagcccatttaactgtcaggctagccagtacattcatggccatgtatgcaccagcagttagattttgtaataggacccccagctattaggaatagcatatgggtcataagcctatgcttatatatagcc

SEQ ID NO: 23156 - DNA, 11159 bp, Oryza sativa
aagttaacaaaagttctgtattacaacctaaatgcataaaattatcctacattaggtgtttcaatataaacagaacaattgaaaagccatctgctgaaattagccaaattcaccaagtccaacctttgcaagagttatttaacctcacgaactcaagtaaggtttggacttgcaaaagtatatactgcttccatgatccatcccaaaatataagaagttttatagttgggcacgagtattaaggagaaaggtcaaatacaattatggttggttgtgattggttgataagaggaagtaagtggaaatgttaaatgggagatggttgtgattggttaacaggtgaaaaggtggctatatttttgggacaaattttgaatgctaaaggagatatgttttgggacatagggagtagcagacataaaactgctaagtgggtaaatgaattggaataagaaatattggaataaatgaacttgtcggtatcaacaggactacaggaccagttgatataatccattatttacctctgacaggagaccaattctctatagctagacagcacaagccacaagctacctcaaatgaactagactaagaaacagaactcatatattaaagtctttgaatttgaactgagcagaagcacttgaagttggaccaacttcaactaactgtaatcgccttcatttcagtagcgcaaatcatgaaaaacacttagttaaatcttgctgacaaaataaatcaaggtacataacaactagtaaattcagtagagattagttttctgctgcaattcccccaccaaaatcagccagcaactggttcctgactaagtttgtcagctagttcactcccgggcattggttacagaagtaggaagtactcactgtcaatagtttccatagttgccagcttttcccaatttatccgacgtgctacaatcgccagtgctgaattgcgaacctaatgaaaagtatttaaaataatgttacaatcacaatgcatgttctagttagaaagacaaatatagccgatgtttacttgagcaccctatacttgcctcatcaaatacaagattaatgaacctcaaagatagtaagagtgtgagtattatctcaggtactggtacgccgatatgcttcagtggaatcataaaccaccataaagcagaagcaagctgctcaggagtagttgttgtcaagcagagacttgcactttgaaatatctgcatcaaaagaaagtatgggagattatacctaaatggtttattaaaaaaagtgtattgtcaactcaggacatgcttgtcttatgtgccaattgctagatgatgaaagtattggttcaaacaaatcctctgggctttgggttgctggccatattcttttttatttctttggcaagtcctttcatgctaaatctttctctaatgggcttgtttgaattttttcagactcttttctttcttcttaatataatgatgcacagctctcatttgcattagagaaaaaaaacaatttgtatggaaaatattacccataaaaggaaaggacataccgcaaatgagaggcatgctgacgtactcgctactgataggcctttccttgtaaattgcagtggacccagtttcatgattgtgtaagaatagccatttgtggatgtaggtatgtttggcaaacctataacagatgggggaggagttcttgtctggactaatgaaggagcaccatcagaaccaaatcccagcattatgaatatgatgcctgaaagcagagcgacccttccaagttggtcctatagagaatgtaatttgtataaagctaaacagcaggttcacttaaggggtaatattttaacaaagaagatagcataacggcagagactatgtatcgaaggagtgaaaaatagccaaatcgacaggaaaatctataagtaaaacatggacagctttcattggtatacttaaaagtcacataaaattgtgtgtgtgtgtgtttttttttttgggggggggggcgatgaaacgaagccaagcatgatagtttgtcagtacaaaacccatataacttgtccagtacttcacagtcaccctttcaacagtaggaaatcataagccacactcatgtttttttaaaaaaaatgaattgcattcaacatcataagggaatctccatatatatataaagtagtagacaatttaaaccacaactggcaacccaacaggccagcactatttgtgcataaaatggtgaatgcccattttaacagtagatcagagagcgtaccttccaaatatggtttgggagaacccacatagagaggagagtaaggtatgctactaaaccaaaccgcaagtaaatatttgatctggctggtaggacaacaagagccaagagccacacctgagaacaaaagtgattggtcaggttgcagcatgaaattggacgatcatttagttaatcatcaacttaatcattatttttgtgcacaaaagacaattaaatatatactacgaaatttgttaaaacaactaccgtgacaaaatcaaaattccacaaactcgggggaagggaaaaatccgtcggacactatttcttaacttacataaatattctaaataatcatcagacaaagtgtccaatataacttatagatatactgacgcaggttcaatggttaaggtcagtttctaaaatagcagaaaacaaaacgtcaaaacctaatgatttcacagtttgtggctccaatgagaatcagccaatcattgaaaaaacatactagtatgttgtcatgaaagttcacgacagcattatgtatgctcaaccaacaatccaagttaacccgagaataggcacagttggtcagttgcacacgctcacgttggtggtacaaatggctcttagcatataaaattgagcaagatttttggcgatgtatttgcatcagcaattcagcatttcattcatcccttcatagcccaggggcgaacattttcacaagcacttactgtgcatccttatcccctgccgtttactggcgattcgatccaaaaacacggagcagataagcgtgaggtgaggcaaggtgtcttgtctccggggaaatcttagttaccagcttaacccggggatcgatggcgtggaggaaggtgcggggcgagtcgacgaactggcagatgggcgtggccgcggcgccggagatgagcctgaggacctgctccgggccggcccctcccaccgcagcccgcgggatccacgccgcccacctggcgacggcatcccccgcctcgcccttccccgcggccttgctggggtcggaggcggcgcagaccagcaagcttctcctcctccctgcgcctggcttcgccgagagcgggagccagccgggattgggcgtggcggccttggctgcgaggagagggagagggagagacagcgagtggatagggcggaggtggacggcggcggccatcggattctccgctccgggcagcctgcgccgcgccgtgcgcggccggggtaaggataactcggggtgccgaaacgtgatcgcggtggcctatgtgcggcccgtttcagttgggccggaccatctcatgggcctccgtcgatggcgttcttgctagatgtgcccaaattgagggttggtgaaatgaaaatttttggtgttacatcgaacgtttaacccggatgttggaagggattttcggacatgaataaaaaaactaatttcataactcagcctgaaaaccgcgagacgaatcttttgagcctaatcaatccgtcattagcacatgtgggttacgtaacacttatggctaatcatggactaattaggcttaaaagattcgtctcgtgatttacatgcaaaccgttcaattaattttttttatctacatttaatgtttcatacatgtttctaaagattcgatgtgatgtttttagaaactaaacagcccctgccgtacgttccaagtctattttcaggggaggagcgcagttagttggtttgcagtggtttgaaccagccagcacgaattcgactcccacatagcgaattttcacgtggccttacccattaggaaacagggtacatatatgtgcgtgttcagtgaaactgcacgtttccgtaatgtgtgttcgtctgtgttttgagttgtaccataaaagaaatttggggatgtgtggttgtacccttaaaagaagtccattttacaatacagtaattcgtaatcacaagctttagatcaaacttaattaaaagaattaaccgccggagacaatttacaaatgaacaaattcgccacgaccacacggatatacatccacacacaacacactagcataaatcaacacaacgttcctcctcacgcgcgtacacgtacgtacgcacgtacgtacaccacaaaccaaaccgtcgcccaagattgatacggttttgcacagaatcctcctcctcgacccggtcgacgacgccctcacactctgctaaccatcggattctgtatgatggctacgtgtgctccggcgtgcagcgacccggcgcacagcagctgcgtcccggccaagatgatggtgaacgtctccagcgctcgctgcacagagaggcaataacacacacaagaacaattaatctcagattagccacgaaaacgattaaacgacgcgaggaaaatggcgtaattggttcagttttttttttgttgatgaatttaccaggctcggtggcctccagccgatgctgatctccttgcacgccagcctgcaattaacgagcgaatcgacggtttgattaatcagtgataaacctgcgtgcagatgaatggcgaattggttggtggttttgacggttgctttgcttaccccatggcgaggagggtgagggtccaggtgacgatggaggcggcggcggcggacatcatgctggcggggtacccctggctgacgtcgtggaggccggtgagcgaggtggagacgccgacgacgccggcgagcagcgcgaagatgacgaagaaccccgtcgccaggttgccgatcgggaagtagatcgggaacagccgcaccggcggcgacaccccctgcactgcacccacaagcaaggcaacacacacatcaaccaaacactcgagacagctcacataggaattggatggaatctaaaacgagatttggagggagaaatatccctccaaacagatgatttgtgagcgtgttgaagatttaacatgggatctcaaggttaaaactttaaaccatactccccttgccactatacataggaattcggaccattcgaggcgtcgaagttgaaaccacacgtcccttgccactgcacatggaaattggatggaatctgacacttacgtgagttgaagctctcgtcgatgctgtagttgatggcccagccggcgatgacggcgacgacgacgtacaggacgaggttgaggaagaggaggccagcggacatggaactgggacccccggtcgccattgctgatcttccctcttgctctgctctccgaggcaggagaagatcacaacggcgtcgcgagaaaacacactctgctgctgctgctgctgtgttgacgcttcgatcggtcgggagccaatatatacgctaaaaagtgcagtttttctaactgaaaagatcgcagcaaatatttctccttggttgctttgcaagtaagccagccaagtattcctttgatcctttctgccacctggagagattgctctgcttttgctctccacaagggaggaatatccaattctccatctctcatccacggtccatccatatatggtggtcaagaatagaatctgttcttgtctttgatcacaagtgcatatccatccgtgcagataacttagtttacatgcatcgatcattgctggcctgctgcatctgttcttttcctttgtgttcgacaatgtacggctgctgtgatgctgtcctcttagatgatccgttggtagaagcggttcagtgttttagctgagaaggcttatgatcaacattcaataacaagtggtttgcgccaaaaatgtggaattgccaaaatttttggaagaacaaatttgacctcaaacaccaaccgaaatttggcaacaagccaaaaactatatttacttttttttttactattgccaatcttttggtaatgtttggattgaaatgatccaaacaaacggtttgagtatgatttgtgaactataaaattattaatggttagtagcacgattgccacgcttcaagaaatttgaaacacttaagagcatgaaaaaaatcggggatcaaaaatccatataggattttgtgataatatgaaggagagaggggaagagaaaatatgcgagtgactaattagttgcctggctgcactgggcggcccaagattgtggagtctacccatggtgatggtggctcagacaactgtgctagccgctgttgtctcctgcatccgtcgggtcgtcgtcctcgttgtgactgtcgttgtcgcctgcgcctgtcggaccattgttctcgttcaccatggctgcgcgtggggagtctaccatgccctctcccatctgcagcccattgtcctcaccgggcactcgagctggcatcatttgcgagagagagtcatcgagaaggtaaagaaaagaaggaagaagattagaatgaagggtgggatgaagaaagagaagagatagaagaagatggtggatccataaagataatagaatatctgtgttataggaaacataatattttatagacatttggttacaatgtttactatatgaattcgaatgatgtgaccactcattacaagtagtagctactctagctctctttttttttattacacggcagaccatagttattagaaccggaccagaccgatgatccgactggaaaaaaaaggaaccagggcgccggctggtccggtccagctaaaagatcggtgtgcaatcaaaccggtagaaccgggcggtttaccaaaaaaccggataaaaaccggagctggttggaccgctggaacggcgtcacatggaggaaacagaagtgcgcaggttgcagccttacaggtgcatcacgcggagttagaaaatagggaaaaatgctatagaacttgtgaatcgaacccaaaacttccatctttccgcatagagtcttaaccaccaggctgtgaaacttgtgataatattataacacatatctatttgaactgcaataaaccggtggttggaccggtccaaccaataaaccagtgaaccgagtgtcttaccggtttgatcaccggtccggtcttaataactatgtggcagacgcatatgcacacatcactacacgcgtaacacttacacctcgcaaatgcacaccggcaatacatccctgatctctttaaatttctattgaaagcctatctgtatgtgcgtaatattcacgagcaccagaatttaaaccttggtaggtaaagtcaatcatcaatgacttcatcacttcacagcaggtgttttccaagctttgctctagttaggacgcaattgaacatgagaacctgaaccttggcttggtcgcaaactccattcaatttgccacttgtttgggtattctcccaatttcaccaatcttgtggttttatagctaaagcctgaagaagaaaaatactccctccgtttctgaatataaaaacactgttgaatttttaaataatcattcgtcttattcaaaaatttttatgaaatatgtaaaactatatgtatacataaaagtatatttaaccatgaatcaaatgataggaaaagaattaataattacttaaattttttaaacaaaacgaacagtcaaacatgtttataaaaataacggcgtcaaatatttagaaacggaggggtacaaaataggatgtacaattgcacaactcgaaaaaaaaaaaaactgttccttaatttccataccacgacccagcgccagcggcacgaatctcaaaagatggatcggaccgcttggcgcgcccgcctaacgtggggagtcgacgcctctagaaagcgagaggacgccacacgccgagccatctctcgctttgcccccaacgaatccctcccccataccaaactccgccgccgccgccgccgcccgccgccgccgagaccgacccgaccacgatgggcctatgggacgcgctctaccgcgtggtgatgcgccgcaacgcggtctacgtcaccttcgtcgtcgccggagccttcgccggcgagcgggtacgcccaccctctaccccccccttttttttttcttttccctcagatctgtccgggcggcctcgtcgccgtttgacccgatctcatgttgttgcgctctcttggtctcgtcgcaggcggtggactacggggtgcacaaggtctgggagatgaacaacatcggggtaatttttttccccttcactctctatgaatgctttcctatttctaggtttgtttgtcgcgtgtttttggatcgtggcgttctagatcttgcatttgcgatctgggtagggctatatcgacgctgtccttgaaattctgttctccttcatgatgggaatgatccgttgcggaggtgcggataatcttttggtgatggttgtacgtgtgcaaaatgaggaggaagagccatgcgaagagaaggcttggttgcatctagtgctatacttactttatttttctagatttaccgtttctaaattggtagctagcaatgtcttttgttctgatattaaaattcctgaatgaggatctgttttgctttggctgttacttgattcaatgtcatgttaatgcaatgtgttttaccatgccagcgaatttagagagaatagcataaaacaactgagagtgaattgttctatttttgttgtgcatgctcgatttcacttttaaaaaatctgccaccatctgttgtttgttgtgagtatgctaaacaacatgttgtgaagttaaagtctagaatcagggctgtagatatcgttcataagaaaacttcacttgtgctatggtattttgatcagcccagcttgtctgtctactctgcatggtttcttgcggcttcagttgttaattttgctttctgaaatctttgatcaaaatactaaaatctttgatcaaggaatacgcttgcgttatggccatggctctcagatgcaaagccaatggcatgcatatggagataataggaggtttagattgtgatctcagaagggtatatgcactggatgggaattatggtatcagcatcataagaatattttagctcttaaacattaagtgctgctgaaacacgttcatagtttcaagtcagcatagtacttatcaatcaaacatgttcaaagtttacaacagtaattattccggttatatatgaaaaagccctcataggtgatttgatctttgcatatactgccctctactgcttgtgatagtttaaaagggttctatctttcttttactcctaatctcatgtttagatttaatttcttaattttatgattcattagactaaattaaaactgatagctctcatggaacaaactccatgctgtgagacaactcaagataactttgccacatccaacaggactacaggggtatagtacacccacctgtagctggtaattttcttaccatgagatctgattttggtctgcggcttccttcccatctgtcaactaaaaatataataatctgatgaaatgcagctgtagttaattatcatattacctccggactagcacaaaacaaatcaattcttctatcacaaaaatatgtggtgaagtactgaaaacaagagcagatcatgtttaatcctttttttggaaggtattttgatactcactattacgtgacaacgatgagggtggcaatcatcatattgtagaggaaaatacaagaaattatcaaaaagccaatcgcttgtatatataaattaaattaaatttgaacttgtcacttgtataaaaccaatttcttggtgctggtagtaccttttttattgctatgttctcgatttccagaacagcaaggagctgctgttgcataggaatatagttaaggtggagctgagtgtccaaattattagaatgttctcatgtcatagcttatttctgcagtatatgtgctttgttatcttacgaatgatatcttggtaaaccgtggttgaattgtttagtaattttagtttctgttgcagcacatgggcagtccgctagtatattattatttagatttgagcctgaactacctagcaatcttttttgctggatgtgtgtaagtgtatgtaccaaagtatatggaatctttgtctagcctgaagcggagccaggcattatgtctgtggggattcacattcaagtatacaaaatatacctattgatttttctatgggcaactttatggttgcagatgctgatttactacattttggtgtcacatactccctccgtcccataaaaaaacaaatctagtacgggatgtgacacatcttagtactacgaatctggacagactgtcacatcccgttctaggtttgttttttatgggacggagggagtagtatttgcacgatgtttgtttgtttgtatctgcatagcttttgtattgtatgcaactacattatgacgtgtttccccctatctttaattgtccactttcattgcccataccccttaagtcattaggtgaaatgaggactaggttaaattattttttttgttttgaactgattgccatgttcttctcatttaactcattatggatgtacatcattacccattaatttctgaatttggaccagcttagcacaaaaagctgaatgccctattctccagaaaaaaaaaactcatccattttagctgcagattgcctcattgtttcccctatttctgtgcaatattgtttggatgaagttgttctctagaaatctaaatagtctgctgatagttgtttgtttgttggaaatgcagaaaaggtacgaagatatatcagtgctggggcaaaggccggccgagtagaacaatgaaagcccagcactcatcatcttgcttgctttacgtgaaagtagacactcttttaagctctaatgtcttgtcattttcttcggcacaataagcaatgtaaaacccctatctccgtttctgagagtta

SEQ ID NO: 23157 - DNA, 31948 bp, Oryza sativa
tggccaaaacctttcctgtagccatgtgatggtgcgctctggaatcagttgaaaactatacaaactcctcggaatgaaagttattttgaggttttgtttctgtaatcacccattgctgctatggaacgcttggtttttgttgtggtagtggcactgcgtctcttcgtattgcagtcaagcaagtcagtatttttaaatttaggccgagtttagttccaaactttttcttcaaacttccaatttttctattacatcaaaatttttctaacatacaagcttttaacttctccgtcacatcgttccaatttcaatcaaacttttaattttagcttctccgtcacatcgtttcaatttcaatcaaacttttaattttagcgtgaattaaacacacccttaaccctgttagctttcttgtttgttttgttctgttggagcacaatttactggtcacaacacaacgctatacgtgtcgatcggtgatgcacggttttatgacaacgctggatgttgattgttggtacaatgctatacgtgtcgatcggtgatgcacggttttatgacaacgctggatgttgattgttggtacaatgctatacgtctcgattggtgaagcgcggggtttatgaggtacacaaattgtacaccaaagaaagatatgcattacaacatccgttgtagtctagctggttaggatactcggctctcacccgagagacccgggttcgagtcccggcaacggaattttggtttattcataaatttaatatttgtaaatcagtttagtgtttaattttttccatacacttatttttttattcgttgctctctatgagagtttttcaagaaacataaatttaatactccttccttctcgtctcacaaagacttcattttttttctctattcaacgtttcctacacttagtttttctaatttattcataaatttaatatttgtaaatcagttttgtgtttaattttttccctacacttatttttttattcattgctcttatcagagtttttcaagaaacataaatttaatactccttccttcccacgaagatttcattttttttctctattcaacgttctaccgtctgtcttatttgaaaaaaatatatttttttaaaaatagtcacacataatgtattattcatgttttatcatctaacaacaacaaaaatactaattataaaaaaaatttaaataagacaaagagtcaaaagtatatcaaaaactgaaaaatagagtcttcgtcgcacagaggcactaagtgatttgtacctttgtacatcggtctagtgttttattactcctttcatctaaaccatattagctttttacatggtctccagaatcatactttaatcattactttctctcataatttgtacgagcatctataaaattaacgtcatatgaaaatattttcaaatatgaattacactaaatacatatattattggcaaaattggttacatagcattgaaagttcacgtttttggttttataacaccgaaagataccggtttattttaatacacccaaagttcaccctgctccatttcttaagcacttttcgtcaattctcaatcgttttccgtccacattaatcgtaattgactcagccacgtacacgatataaaatttctaccctcattgccttgcattctacttatacttgtgaggggtagaaacgttatatcgcgtgtgtctgggtcaataacgaccaaggcggacgaaaaagatcgagaattgacggaagtgttaaaaatgggaacgggtgaactttaggtgctattaaagtgaactggtatctttctgtactacaaaaccaaaaacgtgttattaattaaaaaattacaaatgttgactttagggaacaaggagaccttatattttagaacgggggagtaaattaattaatagtaaattttaactaacatgaactcttcttttccaaagtaattaatatgtttaacatactattaaaattttaatatttatagtatcgctaataatatcataatacacatcctgtcatgacgcggctgatgaaataaattcaataattactgcaactgaaactctccgtgctgcttcagatactcgtcgaaccactggaccatgtcagcacgagcttcttctgcagttttgacggcgaacggatcgctggcgttgtatctgcaagcgaaggcatggggcgccttggggaaggtcttcacgaagtgatcaacctgcagtcagcagagatggatgtgcttcaaatgaaacgagcgttcacgctgagctaaatcagttgagtatcatctgagtgatgcaaagctacaactgcagtctcagcgatgatttaaactgaaaaggcaaatggaatcagttggaacttaccctgttgttctgatctaaggcatgctcaaactggtgcacaacaagtggtggcgtgatggtatcacgctcacctccaagaatctcaattggacgtttgacctctgagcattacaaaatataaaagtaaaaaaaaaacgaagttggagaaatgatcattgaacaatttaaggttaagtgaaggaaaaagacatatcgacaaaagtatatactctatctattctaaaatataagaatttctaaaattttcttttagcaaaactaaggttaggtttaaaaaaatcttttcaatcacttcagttgttgttttttgaattttaaattgctcagattccttttttatatggttggcttggaatcattgaagtggtggaaattatagaaatcagtataaaaatgcttatattatgattcaatatttgaatcctacatatttttgtattttgaaatagaggtagtattgtactcctatatttgtacctgtcatgtcatgtacggtcactagcgaaggatgtgaaatgactaccgcttgggtttcttcggtctttgatagttccacggccacctttcctgttgagaatgaaataagaaggatgaaagatttacttaattagaattagagaatgaacccatcctggcacaaaaaagagaacaaagaatgaagattcattcacttttacgaaattaagaattgtttgtggttgattgcttagtgctcatgttgtttaactgaataactcaccaccccagcaataacctccaaccccaacagaggacatcccttccttcttcagaaccgcaatgagcggtttagtcttttcagctgcttcctcctgcaatgaaatggcaacaaacattcagatctaagtgattcagttaacattcagatgacaaaaaatggcgtctaactagcaatcattttttcacaatactgaatgttccgtataaaattgcattggaacagtgacaggtttttcttttcatcatgtactttttcttttacggagtgaaaagtaatcaataggtcaaacaaacgaaaagcaccgtgatcaaagaaagaaacacacaccggagagtgagccatgatccacacccaaaatggccttgctggatcatccgtgtaagggtcaccgtacaacaaatcaggaaccacaacgtagtatccggagtatgcaactttgtccgctatttgtcttttaactcaagcaagttgggaataaacaaaaagatcaaatgaaaaattgagttgagaacgaactcagctgcacacgacaaatttgcgtgatgaagacttgaagtttttgtattaatagctttaataaatcgttttgatcgacgatcaaagcatgagacaaatttgtgtaacgcgtattttcagattttgcaaacgtgcgtacctcagctttggtgctcggaaacctgcaaaagttgaagtgccgatattatcagacaaaaaacagaagaggatttatgagatactctcttcatcaccccgccccccccccccccccaaaaaaaaaaacaactctttcaaaggaaaatcaaacttgataacttttaactaacaattatgctaaccatatatatgccaagtattatgcatgttgtaccgttagattcatattttaaattgctttcatgtgatgctaatttcatattcattgaaaatataacatgaaataaattaatagtcaaagtatgttattaaagaccgtgtaaaaaaaatacaggccttataatttgggacagagggagcatatacgagtggctactgtctctcaaggcagtgtttgcaatttttggaaatccaccccctccccctcacctacacacgaaactatttcgcttgaaatttcaattattttcacgagttagcaaaagttattcaggtttgttcaaaatttaaattattctggatatttcgaatttatcatgtctgttttcttttggcgttttttccccaaaattgttaactactccttccgtttcaagttataaattgttttgactttggtctaaatcaatctgttttaagtttgcccaagtttttagaaaaaaatgttagcattttcaaccaaagacaaatttattatgaaagtatattcaattattgatttgatgaactaatttagtattgtaaatattaacatatttccttacaaagttaaacttaaagtagtttgactttaaccaaagtcaaaacgactttttttttaaaatgttaagtcaaaacgacttataatatgaagcggagagagcacgctatgctcctaacatgtatgcgtgcactgaccgtaatagtcagagacgaggatgatggcgcggccggagcggcgggagccggtgacgtagcactccaggccgccgtagtcgtggacgacctcgccggcctccccacccgtcttctccgtcatgttcggcgagttgtccaggcacgggtgcttccctgtcgacggcgccggcgacggggacacttgccgtcccgcgccgccggtgttctcctcggccaaggagagcccagcggaggccacgacgacggcgaggacgacgaggaggcagcgaagcagcgccatggcgagatttcagttgatcggtgtgtgtttcaggttcaggcgttcaaaaccaacccgtttattaatttggtgatccatcaagagctccagcctcagataggcgcgcgtacgtgccgcgcatctctgtgcagaggcttcaggacttcacgcacgttgctcgatcacaaaatcacatgaacgatcgagtcgcagcgatgataattaattgggggaggtatatataattaagattttagtaggttgagtgatgatgcgtatcatgcgaacggatatcgtagttgtgctgcattttgatcagttatctgaatatttctaatctgatcaacgccacgcgaagattaattatatatgagcaaatcaacggacgcgatgacatattccagccaactcagtgtatatcttggtgtttgttagagcctgtggctccgttgtatatgtggtgaagcagacccaatgttatctgggtggtccacggatggtgggtcgggctgcgttccctaataatgttttctaagttgtgagctctagcccgctaacacagcaggtcaacagtaactactccctccatctcaatatgttccaacttatgatgggtctctaaatctggacgtacgcatatctagattcgtagtaagcttgctacatattgggatggaaggagtagctcatatgctttctggtgccattagttctcaacggtctatgcattttccaacaacttattatggtgttgttacttcatacttctaaaacatggcatatgtattcgatataagaaattttacagtttattgagaaagtaactagattttatactaatttgtttagtagtactatgttttatactatagtccttctgatactttcttaagaatgataaagttatccattggataatagttctacatatgtaccggacacgctctagtgatacttcccatatggatatcattatatatttgaagctaataaaaagtctaaatcaaggttatcaattaattactcccacatcctaaatatatataaaatgtgcatgtattcagataaattaatatgtgtaacttttaactaataattatgttatcaatatatttgtttaatgacatacaagtaacactattaattttttattttaaaatacctccaagtgatattaatttcatagttgtaatggtatatactgaaaaaaggtaatggttaaagtacaacatttaagatcgtgaaaaaaactatacactttgtatttttggagtggagagaaatatgtgttattgtcctatcgatcaaattgaatagtcaactcttttatatttaaaaccttaacattttatttcttcatattatattatcattaaatttcatttactattatacatataaccatatccatgtatccatatttctggaaatgcgatctatcatgtatccatatcaaattatcaatgtgacatactacagttagccatcaccaatgcaaccgcctagagtaattaactatttgccactcttacaaatggtgatatagaatttgccactggatccacatgtcatggacacatgacggcccacatgttatagactacgagtgacaaattcttaattgccgcatcttaaaaatggcaaaaagttaaatgtcctgcagcctagggcttaacaaattagctattttagctactccctcgtttctaaatgtttgataccgttgactttttagcacatgtttgaccgttcgtcttattaaaaaaattgtgaaatatgtaaaactatatgtatacatgaaagtatattttacaataaatcaaatgataggaaaaaattaataattacttaattttttaataagacgaatggttaaacatatttaaaaaagtaaatggcgtcaaatatttagaacggatggagtatgtggttaggttagtaattctattaatcaactagaaactaccaggttgacttactttgtaaacatcttagataacttgcttctgtggccgaaagaattaagcgttattagccaaatttttatatcgaattaactaaatcgataattcttgcaaaatatagagtttatagtcttaaacaaaactgatctagacttttatgtttatctttaatgataaaataagcggaaacaaactaaatgatagagtaagatgaatgatcaaacaccgatctacagtgccatacatttaaaaacagagataacaaatattgttcatatttttatcagttagattgcttgtttgtttgttttttatcctcttccgcagcgcaattagccggtcgcaacatgtttaagctcaaaagacactccaccttttatgttcattttgatacaacagtgtcactttgtaagttggcaaactgacgctctaaggtgaatttataggtacaaatgtgacttataccagcatccgtgatctagctttttttttttaacgaatcgatgaacgcaaatttcagtgaataaagtaagtgctctagctatttaggatatactccgttctcaccgaagagacccggttcgagtcctcttttttttcccaacctatatagcttttctttgctttattgcttttcatcatatgcttcaggcaggaaaattttgatgaaactgtaagccaaataattggtttgtaatttactggatacatgaggcgcctagtggttcattttcttcttatttagtagtattggatatccaagtccaaggaaccgtgcaactgaatctttcaccgcttcatgatctccagatacttgtcaaaccatttgaccatgtcagcacgagcttcttctgcagttttgacggcgaacgggtcggtagcgttgtatctgcaggcgaagccatggggcgcatccgggaagatcttcaccaagtgatgaacctgcatacatgcaaccaacaagatgaatgagttcaacacacatcacatgatcgtttcaggccgagctaatttggttgagttaaatcatctgatcagggtcgccaatctgcaactgcaattacagagcaaatgaaaataaaaatgaaatcagttggaacttgcccttttgttctgatctaaggcatcctccaactggtgtattagctgtggtggagagatggtatcaagctcacccccaaggatttcaatgggacatttgacctctgaacatcacaagaactcagaaaatttgagagataataactgaacaatataaggctaagtgagtgaaaatgccagaacaagatcgattatctgtacctttcatgtcatctacaaccactagcgcgggatgcgaaatgacaaccgctttggtttcttcagtctttgatagctccacggccacctttcctgtcaagaatgaaagaggaaggtttgatacataaaagcatatttagaaactcagaattcaaagaatgaacacattcctgcaggcacaaaatgaaaaaaaaaagatccattctactttgattcaataagaactgttcatgtcaggagtggaggcaagcctaaggcagctagagcttgtgccctatgcttctccaaaatcatgtacaaattctcttaaatcaccatgaaaattttaaaggaaacaaacaattcattagttgaaccgttagttccagtctttagcaatttctggctcggttactggttcatgtcatgtctgaatgttttatgctcatggatttaactgaataactcaccaccccagcagtaacctccaactccaacagtagacgtcccatccttcttcagagccgcaataagcggtttagtcttttcagctgcttcaacctgaaatggagagcaacattacggaacaaattaatatccttcattagaaaaaaaaagtgattcagttcaaattcagatgaaaaaaagatggcgtttttagtacgaatcatcttctgcgatacagaatctttgcgtaaattgtactggagctagcaattacagggtttttttttcatatattttttctagaggtgacaaaaggaatcagagaggcaaaacaaaaagattggaaaggcacggggatcaaagaaaagaaacaaaccggagagtgtgtcttgatccactcctcaaatggcctcgctggatcatcggtgtaagggtccccgaacaacaaatcaggaaccacaacgtagcatccaagctggtatgcaactttgtccgctattttccttcagcccaaccaaatgggaaaacgaaaacaaaaaacaaatgcacaaatgagttgtgaacgaactcagcttcacgacagcctgttgcttgtgtgatgaagacatgaagtagtttttgcgatttgatcgatgatcgtaggggtggatccagcacgggggcggcgtgatcttgagcccccactactagcgtgaagactatgagattaccatatatagatgaaagggggactgtaattctatctagtttgctcagactctaatgctatttctttttgaatccgtcacttcatagcgcataagttcatattctgtgcaaacgtgagtacctcagttttggtgctcggaaacctgcagaagatgaagcgccaattaatgttagccacaataattagacgaagaggattaattttaattatccgattcgtgtggacaatgtaaatgtcgtcgctaagctagcctaacatagctctagtggctagtgtctccgggaaggcatgcaggcatgcacatgctgctgcaccgaccgtagtagtcggagacgaggatgacggcgcggccgccggagcggcgggagccggtggcgtagcactccaggccgccgtagccgtggacgacgtcgccggcctccccgcccgtgttctccgtcatgttcggcgggttctccaggcacgggtgcttctgcggcgacggcgccggcgagtacacttgccatctcccacggccgccgttattctccttggccaaggcgaggcgcccagcggcggcggccacgacggcggcgagggcgacgacgaggaggcagcggactagcatcctcgtgaatccggcggcggcgcgtcgcccgtggcgaattcagacgtgttcggtgatcggtgtgtgtgtgtgttaacgcttgagcccgttgattaatttgctgatgtgatccaggcactcgagatggagatatatataggtagcgggacggagggagctagcgagcggtgctgtgtgcacggaactccagaaccatagagcctgtttgatgtcattttcaaccataatatatttgtttcgcaaagttaaaaaacaatatctacgtttagtttattaccaaatttagtcaatacataagaaatcttgccattgccaaaattttagcattgacaaaacttgttaatgtttattttagttacaatctaaacatgcccatacatatatatttaacttttttttctattatgaagtcgcatcatttcggctatttttagcttttaatgattcatcaagaattcaaattgtctatcttctcaaaaagcaacactgtacatcacaatcatttataatcgttggataattgatcagggtaacatatatagactatagagaacatatgaaagaaaattatatagtaagaaaattaaattttacaactcatcaatactattttgttatacagttttctcgtagcaacgtgcagaattcccattagtatacatgtgtgctgtgtgcaaaattgtcagatgtacgcgcgtccacggcgcagggaacgtacgtacttaccgggattcaggaaggtccaggaacggggacaaacctaggacaacgatttttatttttttccgaatgatcagcatccgcgataggacaacaattatgactttatattgcacctacggagagagtatatattgcactacggagagagtactttataaaccatgtatagtctaaagtggcacaagtgaacaatactaacatgatatacacttaaacttgtgaaataaattaaacaaccagaataaaacaaaatcctaaccaatttttttagactaaatagatataaaattgagaagatcacggtaccttaccgtaaaacctagtcacgatgtgatgaagtgtaaccacttgggagttggacattagagcggacaattaatgacgtcctgctagctatattggttagtgatggacccctgaccggcctaggctctaggcgatcgcactagtggtctaggcccatggcccttcttgagatactcggacgctcatttgttcagatcccgcacaagtggtctaggcccatgatctcacccttcttgagatacttggacgtccatttgtttagatgcctgtctatgtatcttatgatagtttctaggtttgcatttcatatggagtttgcactatattttcccatgatcgatgcagccgcccagcagtgctgcaattaaggacatacttcacaacttttttaggagtatattgcctgatcgtaaatcaaatacttgattcgaagtttggaacctttgtagagacgaatattgtttggatgtcccctctttatgcagacactgccctttatttttataggcgggttaaaagaagacctgttttttttttaaaaaaaatgcggagggagtctctggtcaagacctacatatttgtgaaattcgattttcagaaacgaacgcttaagccacttgcgacaacattttcacagacgggcgatttaagtcactcacatttggaaataaaatttgaaaaacacgtatctatacttagtttttcatataaagtttgatgaaggacaactttataataaaattgtagattttgataagatctgcaactttgtagctaggtgacaacctttcattatagagattgtttagagacccaaatattcgttacaagatctcaaatttattattataaaatctcaaatctatattgaaacgatctccaaggctccaatgaagacatactctacactatacgacccccccctactactgagtaatctaagagggattacataattctagtaaaagtgaatacatgagatatgtggagggggaattaaatttgaaaatatactgttgatttgttttttttctcaaaaatattcaggatgtaaattgtttagcagaaatatactatcagtctcgcacatccattgcgcgagagtgacgtaggcgtgtgtcacgccccgaactagccccgagtggaactagcccgtgacgctccgaattaacctgttaatcgataccagtcccaggaaacagtgctggtatcacaggaagacagaatatcacagcaacagaggtctctttattatagagtaggagtacagtcatgttgggctgcggacagatcccgagctcacaactgcattacaaaagggaaacggaagccaagacttagaccaaacatcacaggcgtgacttgggaactaggccgaaaccctaaaactcatcgtagccgacttgctcctggaagaactcctcgtcagcgggatccgcttcatcttcttcagcaactggggggagattatttatatagagcaagggtgagtacgggagtactcagcaagccatggggaattaagtgtttaatgcaggcttcaaggaaaggctgttgtttttgcaataggttttatttaaactcctttctgaaacaactaagtgagtgcttctcaaacgacacggatgagacagtgcgtctcgtccggttggagtatgtgcaatgtatcagtcttttgaattgatcaagattggcacccggccaacagctttcaaacggccacccgggcctggctgatcccatcagccgcagattttccaaacatcgaacccaaaccacatcagcaaatttcacaagcagtaggcaaacaaaactacgctaggaatcacctcacatccgcccatgaccgtgggcacggctgttcgaacagtttaataacctctgcagagggggtacactttacccacacgacattactaacccgaatcacccagcccgtgcagaacggccacgtctggtgacataaaggttttcatgacaaggcatttcgagagcagacacagggttgccatatgccgacgagaggggtcccagaccaacaacaggttaggtcccagaccatactgtgccaggaagcccgggggttctctccgacaccaccccgttgaatccacatgtctgtcagcatcaaggctcccccgcttagcaatttactcagccaggggtgtcccattccacccatgtggtcgcacttgtcttatgatcggatgaaattccaaggaaacggtccttaagtgcaagagcgggaaaccgtacacccggtacgttccccggtccgcgattttggaaattcatttagttcgcaagcaccgacccaggtgtcgggttttccaagtcttttgtaaaacccaagttttacccaagatgtttctcagattttaagtttgaaggcgaccgtcgatactcgtgcagagtgcacgattaccgaggcacaactaggtggttacaagggaacatgatataacaattagcaatagaaggatcagatgcaacaagttaggtaggcccaccggtctgccttgcagacgggcaaacagattaagtgcaatcctatcaatgcatgatattttgcaagcaatataattaagttcaaatataggctcaatatgttcaaaggtggcttgccttgctcgagatcttgagcttgatcctcgaattcctcgcactacgggtcttcgggctccgaaactacacgcgaaacgggacaactcaacaaacagtgaaaattaagccctattaatgacctctaagcgtgccattagatagatctcgaaatttgaggaattttggaagttgaatggagtcaaacggccttacggttgggaagatattgaatttctaagattattggatttttggtctaaaggaaaaaggatttatttaaattatttttgaaaagaaaagaaaagaaaagaaaagaaggagggaggggaattagacttcccacgggcggctagggcgcggcccgagagaaaggagcggctcggcagaccttaatgggccggccggcccaagaaggcggcccaaggcacgcgcacgggcggggggaagagaggaagccgatgggccgggtccaccttgcgtggtcccgggtgggacccgcttgtcggtgactcggctcaccgtgagcgaggagcacgcggggcgtgctagggtttggggaggggaggcgcggcgcatgcgcgcggttcgcggaggacgcggatgcggcgggcccacgcgcagcctcatggctcaccgcggaccatgcgcatgggggaggggggaaacggagggagcggctggccgggtcagccgatccggtcgtgccgaggtggctccgacgtggcgcctacgtggctgccacgcgggccggctggaggaagacgaaggcgccggcctcgaatggacggcgggcggcgacggtttctccgggacgccgtgcgacgacgaggggcgacggggcgtacaccgggatgacgagggagaacgagagggagcgagccaacggcttggattcgccggagggagtccgtcggcggcggattgcggcggcggcaaccggcggagagaaaagggggaaacggcgacgaggtcatgagggaccgattcccggcggtgagagcatctacgcggctacgggaacccaccccttgcgccggattaggaggaaacgcatcgagggaggccggcgacgagagacgcttccgagctcgggcggcgatggcggcgagcacacggcgagcgacggcagcagtcggggcgacgccagctagctactggggtactacacacgctactaaccgagtctaaggggaggagatggatcgaggagggagaatgggggaatgcactaccgagatgaggcggggcgctgtgacgagaggctgacggcatgggagcgatctctccggcctcgtgccggggaagaggaagaagagagcgcgcccggagtccccttccgtgtcctcgctcgtgccggctcctccgacacgcgcgacggcgaatggcgaacagagcatgggaggcggcgacaatggagtggaggcgatgggacaaaacgagaggagaagggagagagggcgcctgggctttataggatggcaacgtcggtttgggaaccgacctagggctgtcaagggagggagctagcgctcggcggtcgcggccaaagcggcgacaggggggaaatgacgccgacgggagagaaaagggaaaaaggaggagggaaaaggggcttgcccccttgccactttggggaagaagagagggcgacgcagcagagggggggagctctgcctctgtcccttggaagctagcgcgcggagtggcggggctgggttgtgacgacggcgatgacggcgggggtggtgtggagcggagcggcgacacggacggcaggcgcggacaggcacggcagaggctgacggcggcggcgaccaggcggtcggccaccacggcgcgcgcgcgcgcgggaagcaacgggcggcgcgacgatttgggcggcgtcggcgggaagcggcagcgagagtggagggcgctcggctcggcgcggctcacgcgcacgcgtgcgcagcgcacgggcagagcgggggagagggagagagagagagagagatggggagggagggggagatgggccgagaggaattcggcccatcgaacctaagggaggcgaaatagacttttgcggagggatttgatttgggaaggattttgattcgggattgaacttgacgatcgatcggggatttgagatccggaatggcacggacactagacaataagcaaggaaacagatttcgaaattagggtttttagaaattacattttcccgctaggcgccacgacggaacgggcgctacagcgtgacgacacggacagtctcgcacgaggatgacgcgagaccgcgcgatacggcgagagtgacgtgggcgtgacgacacatgtaagtctcgcacgaggatgacgtgagaccgtgcggtatcgtggcgagactgtgcggtctcgggcgagcaaacagtgagagcgaacggcttctctgctgagcttccgcttaattaatgactaatcacctcattagcgattaattaataataattaatgagtaataccttgattagcgtttaattgatagttaattaatcactaatcaaggtaattaaacaaaattgaatcagccgcacggtctcgctcgctgctaatgcgagaccgaccggtctcgctatttcgtcccgcgacacctcgcgacactcgtgcggtctcccggtatatatcgtcccacgagaccgcccgtgtcgtcacatccatatcattttcgcataatgtttgtgtcagaccgacggttcccggtatcgtcgcacgagaccgttcgtgtcgtcacgtccacatcattttcgcacaatgtttgtgtgagacggacggtataattctgcaaaaaaaatttatccctaatatttttgagaaaaaaccaaatcaacagtatattttcaaatttaattccgtgaaggggcacctttctcatttgtcctttcatcctcagcgtagaatagtgagtctcctcttatatatatagctatatttcatatatggaatgctaggtttgggacaataaatatatatgtgcaagatcatcatgggcccaaacccatagttttttaatactctatgtcggggcagcatcgatctactgagagtcgcagggagtgtggccaccggaggccctgttcattttctttttcagtggattgggtctaaccacgggaattttttatggggattcctaatgggtgagtctgtgccagcacgctcccccacgcaggttgctcgactaacggcgctcttagcactgtcaggattatggataccacatacctaatagtagttgactaaatctcggcaggacccaccacataccatgtcctatacggaagcaaccttgggatataagaggagttccggataaggaaagacaaccagagttctacatggaaacgacgaggactacttggattgtattcatattgggttccctagttcaacttggacaaggagatacctacgggtataaatacaagcccccctaggaggagaggggacacgagacaatcaacacccaacacaatcagcatagaagcctacatacgccaagacacgccgccggatatcgacttcagggataagcacggctagtaccctacggtgtctccggatactgtcaggagaaacgaaagcgccatctctgatctcgccgggcacggattcgaggagaaaggctaccctattgtcgactacgagtcagatcgtcagaccgccatgttgacaacagttagataggctaccccaaatagtgtattggtgtgattatcatgaataagagcaatatcggctccggccaacaggatgtagggttattacctgacaattcaggggtccgaacttgtataaaaatcctcgtctccgtctcttttacctcagtctcgcgtatatcctagtaccaacgatccctatactgtccaaataccatagtcgtgacatcaaacgtcgacagtggcgcgccaggtagggggactttggtgcttcaggatttcgacgagatgggttcaagagatggattctccaacaataagctactcgacgacttcggctgtgaggagatctaacccaactgaagtacattttccgaccagatcgaaaccatcgtcgtcatcgataactcggtctatcgagatcatccaagcctcaagatacacggcgtaccaaaagatgtcagatcatatgatgtcgaacgagtacgcaataaggtaattggtagattggtttttcaaattgatctactaatttcgtagatacgtccggcatgtatctacaaaggtacgcaatattttatttgcaatttatcgtacctattcagatcatacaacattgtcagatctataatttattatgtttacctagagcatgttttttatacaatatctattgcgcgagtgtccccgatgttaaatcgactacggtttaatgctgagggcttgctctattttcttccgtataaatcatgcttgcttacggtttacataatgcctgatatttacatctgctcgttatatcctgataatactagaagatctatgcagtttttgagtacatactcgatattctctgctatatgtcttgccttctagaaaatatttttcaggaacatttgagcactcgagtaggttgtgatcgagtacaccccactatcgagaacattctcgacaaatgcggagtcgtcgcacccaacttaccaacgaagaccgacgacctatctcatagcaccggccatggctggactactcgagaaaagattgttaacggataattcctcgcaaatgccgtcggtttgatcacccgacatgattgcgagcggacatccggatatgctataagttgggtatgtgagtcatgctggccacatgatatgcacatgtaataaaccaactttagcgcccctataggtgattaagagactcctacttctggttctcgaaccagtaaaacgtagcgatgtagcgtttctcccactgtttccacttcaagtggtcgagttacgactactgcctggtcctcgaccagcgatgtagtgtttctcccactacttccactttaagtggttgagttacgactactgtctggtcctcgaccagcgatgtagcgtttctcctactacttccactttaagtggtcgagttacgactactgcctggtcctcgaccagcgatgtagcgtttctcccactgtttccacttcaagtgatcgagttacgactactgcctggtcctcgaccagcgatgcagcgtttctcccattgtttccacttcaagtggtcgagttacgactacttcctggtcctcgaccagcgatgcagcgtttctcccattgtttccacttcaagtggtcgagttacgactacttcctggtcctcaaccagcggtgtagtgtttctcccaagtggtcgagttacgactactgcttggtcctcgaccagaggtgtagcgattctcccattacccctgcttcaacaaagttgatatcaggagcacaagatcaccaagtgttttacccagagatcccttacccagatgacacctagcgttgaaacctatcctaatgtccctttacgccgtcttgacaaggcctccgaggaacctaagggaacttcggctagggacgcccagagccgataaggccttgtcggatcctttagagacgaaagaccatgtaagatctggtcgtgtaatagttctcgccgtgcgtattaaccaagctgtgtaatcggaaatggaatttccaacttcacggcttggggctaggatcagtgcttgttcaaccaaggcaggtcaaaggtccaagagccttatcatccgagaacaattctccgacgacaaggctgggggctagggagagtgtatgactccacaaactgactgatcggagtcggtaagagagaagacgctcatatacaaaacactggtctgtacattcaattcactagtatgttatattataacatgttaccctttgagcgttcgctcgggggctatttctatctaatattcttttcttagtattgatttcaagaaaattctattcgacaatgacgaaggctccatgtctctatggttgtacaccaagatcgactaaggcgagtacgacaaatgtcgacaaggctccgtcgcagactctacgccttctcgatcgctcgagaacagttgctggatcttgacaaggaatacggaatgaagaaatggtgtacccgccgagataaaatttcttgacttcaatccaaattctcgattacagcaagacgggagacttagtcgtacgctctgtactttctcggtcgacatcagagattgacttagacaaaccctttcggtgcccgcacgaggctgataaaggaagtctaatgttatctctaaactcaccgagaacggttacgtgagctcgataacagttcctccaaagtgtgtggttgagaatatgaactcgttcatttgcatcgaagtcgggggctactgtcagggttatggataccacatacctaatagtagttgactaaatctcggcaggacccacctcataccatgtcctatatggaagcaaccttcggatataggaggagttccggataaggaaagacaaccatagttctacatggaaacgacaaggactactcggattgtatccatattgggtttcctagttctacttggacaagggaacacctatgggtataaatacaaacccccctaggaggagaggggacacgagacaatcaacaccaaacacaatcagcatagaagcctacatacgccaagacaagccgccggatatcgacttcagggataagcacggctagtaccctacggtgactccggataccctcaggagagacgaaagcgctatctctgatctcgccgggcacggattcaaggagaaaggctaccctgttctcgactacgagtcagatcatcagaccgccatgtcgacaatagttagataggctaccccaaatagtgtattggtgtgattatcatgaataagagcaatatcggctccgaccaacaggatgtagggttattacctgacaattcaggggcccgaacctgtataaaaatcctcgtctccgtctcttttacctcagtctcgcgtatatcctagtaccaacgatccctatactgtccaaataccgtagtcgtaacatcaaacgtcgacaagcactagtcacgcttagcgttaatgatgagtctaaaaattttctcataataaaataataaataaccaattgagatggaaatttcaaattttaagttttctgattaaagtttaagttgaaagtcaaatttaaataaaaaacttttaagtcaaaattttaaactttcaacttaaatttaaaaactactaactcttgattaaaaattggtttaaaaaactttcaactcaaaatttcaaacattcaactcaaattatgaaaaatttcaagtcgaatttgaatctttcaagttaaaatttaaaaaactttcaactcaaattttgaaatgaaaaatatttcagtttcaactaaaatttaagaagtttgtactaatgttatcattttttattataacaaattgtacatgtttaagttttaaaagaaatgcacaatcaaatcacttgattagaaaaaaaagatgtatacaagagttgtgggccaagaaagaccacgtggcttcattggaacaggtagcggaaaaagtacaccgaaggtccctcaacttgtcatcgggatacaaaatcgtcctcaaaccacaaaaccaaatatacagggtcctttaactatacaaaaccggtcactcaagatcctttggcggttttggccccggttttggtctacgtggtggctgagtcagcgtgggacccatgtgggccccacatgtcaggatgccacctcatctcctctctcttattcccccctcttctccatttctctctctttcacttttctcaggccagcgacgggcggtgctgtggggaggaggctgctagggggaggggagaggaggaggtccggcggccggccgcccgaaacaacgtcggctcaaacggcccgaaacgatgggcatcgtgtgaatctcccgcgttgaatcttgccaatggtggagcggcaacaaaggcgtcggcggctggacgacagggctgagtggtggtggcggcggtgccgtgctcgcgctcgtcctttcccttgtcctcctcatcgtcgcggcgtggtaggagtacgacgtcacctcgccgccgccgcggggccctgcgacgcctacctcgtgttccgctcctccctaccgctctacgcctccgccgtctcgatctccaacctcctcaacgtcaccgccaccaccggcggcgaggtcgtccgcgaaggagatggaggagcaccagagctagaaaaagaacgcgccggtgctctacgacctcgtcatctcccagccgctcaagtggccgtagctcaccgtctagtggctcccctcccactcccggtcaccggactccaccctttcccaccgcctcatcctcggaacccacacctccgacgagacgcccaaacacctcctgctcgccgacgctgccctcccgctttcgccccacctagcggcgggggccacggcggcgggcggtgccgtcccagcctcgtccgtgtccatctcccgctcggtgccgcacaagggcgaggtcaaccgtgcccgctgcatgccgcaaaggcggtacatggtggctaccaagacctgtgtggatgaggtgcatgtgtaccatcttggcgacgacggcgagaagtgcggcgccgatgtggtgctcagggggcatgaagcggaggggtatgggctggcaccagctcagagtacggcgccgttccaggtgagcatcttcaccagccggtccaccaccgccgccgacgtgccgacccgccggagcgcggcctcgccaagccgtgggttcgccgcgacgttgacgaagatgatgaaggaagggagggagagagagagagagagacagacagagatagatgaggaagggagagaagaggggaaagagggaaagaaggctgacgtggacacttgacatgtggggcccacgtgggtcccacactaactcagccgccacgtagaccaaaaccggggtcaaaaccaccgaaggacctcgggtgaccgattttacatagttaagggacctcgcatatctggttttgttgttcgaggacgtttttttgtcccgatgacaagttgagggaccttcggtgtactttttccaacaggtagcatgcggagtcagcctcatgggcacttgcctgctcacacgacaataaaggacgagctgggcctgtgggccaaaccatgcggtagtaagaaagctagcgcgtatgcgctaattagcgtttccgctttgagtcacgccaggcatgcgagatctaaggcccttcataatgcagtgagttggagtgttacctagttctccagctaggccaaaatctaatgtggaggagaaaaagcagtgggccccgtgtctttgcaaggttttgtacatcctagctaggatctggtttccttacgcccaaaagagaaaccgtgcgtgcctgcgctctgcggtcccctccccaatcctcaccattcttccccaatccgatttccgtcgttggtcgtcagcatccacgcgattcgcacgggcttatagctcgccggccacactaccgagtccggcctccggtgaggaaggggagaagccagaggacggccggaagagaagtgcgacgacagtggtggggagatgtcgtcggtcgcggtctctaagcgaggacgaccacgccgggcgtggaaggagatcagagctggggtcgccgccgtgccgctgccgttgtcgacgccctccagatccgcgctgtcgtgccaccgtcgtcgacgtcctccagatccgcgctgccgtgccgccgtcgtcgagtcatcatcgtcgacgccctccaaatccgtgccgtcgctccggattcaggccgtcgcgtcggcctcctcaaccgccgttgctccggatccacgccgccgcctcggcatcctcgactgccggcgctctggatccacgccaccgcgtcgatctcctcgacatccggcggcgccggtgttcatcgtcgaggtgggggagaggggagaggccgccggctgcggagttcgtcaccgaggtggagagaggccggaggcggcagcgtcgcctgtgaagcttcggatgggttgtgtgggcggggaaagtggagaggggtagtgtgggtgcctggttagggttgagattttgtattattttctccattgtaaggtgttcaatgtaaaatttatacttatttgtaaattgatcaaaatatgagggctgaaatcaaaagtgataggggctgaaacggaaaatcaaagtcacccatgaggccatttgcactgtgggggaatcaaaacttggacacggtgctttttagcctacgtggcattttaggttcctcaagtgagtagcttgcattgctactggcctaaccgagcacgccatgtgtcagcgtgtgactactgcatgcaaagtctttttcactcttgtgtatgtttagttctctcttggttaattacatgatgagggtcaggtaaatcttagggataagtctacgggtcgggcgtctgatcggtttggagaaaaatcgggcgctgacgtcagcgcccgatttacgtgcaaatctacgttaaactgatttttctcttaaattacttatccaaatcataatttgactgcaacattaatttcgttgcaattaaatcttcaaaacaagaccacacatggatatattccgacgaaatttttttagcttattattgaattatttttaaatgttgcacgatgttccactagatatatcggaattgtttcactaagttgatcgaaaatgtttcactcgtttaaatcggatgttgtttcaccttatataaaaagaatgtttcagcaaatagcgaaagaatgcaaaagaaaatttcacttcactgctacattagatctatacatagtgaaacattgtgagtacattaggtgaaacatttttggtggaaaaagaagtaaaccaaattcccttaatagagagttttcaaaatatgtgggtgatttgttgcaaaagaatattttaattcactgtaacattagatctatacatagtgaaacattgtgagtacactaggtgaaacattttctgtgaaaaaaaataaaaccaattcccttaataaagggtttagaaaatatataggtaatttgttgcaacgttatgtgtggtggggataagtgacagtgtggcaggaaagatgtgatgggggcgtccgatttttcctacccccgagcgcccaggaaggagcattatcaaaatcttggtcaaagaaaaaaaggttaggtaaatctaagctagtttatcaaggggtgtttaaaagagagggactaaaccaaaaaattactccgacttatatttttggagagctctcttccaaacaccccttgagtacgcacgttgttgaacgcaacgactccggggggtcagtcgtcgaccgcgtgtttaccgcatttattcacacgacttttcaacatctctgcagtatccccagttccccactaataaagaaattagggtaaggaaccaagatgtacgacgattatcccagctctgttttccggtatgaccattgatttgtatccatttgataggctgatagctgcgacctgcacgcggagattctcttaagcccgagtgacggaggtagtcatcaagtcatggtttctgcctataataccgagcgtacatccgagccgtagcgagtagctcgcaaatcgcaagctaacacagaacagtaatttgatattcacttgctcggagtcggagctctagcttggttcatcggttgcatacttgcatataccaccgtgccatgccttacctcgtccagctcctcctcctaactgtggccttgactctccctacctccgtccatccacagagcggcacaccacgagaagatgatgtgcgctgtctcgagggcctcaagacatccctcggcgacccggatggccgcctcgcctcctggaccttctcaaacacctccgccggtgccatttgcgagctctcgggagtttcgtgctggaaccccgacgagtctcgcatcattgctctctcgctctctggctttggcctcaccggtgctatcccctctgagctccagttctgctccgccatcacaaccctcgacctttcctccaaccggctggggggacaaattcctcccgcactgtgcgactggctccctttcgtcgtcaacctcgacctctccggcaaccagctctccggaccaattcccgcagagctggccaactgcaagttcatcaactcgctgaagctgtcggcgaattccctttcgggaaaaatccccgcctcccttgtgctcctaggtcaccttaagtcgctagacctgtctaacaacaacctggacggcgatatcccgcctaagctagcggcctctttctccgcggacgccttcgccgataaccccgatctcgtcgagccacactccggttttaacctcggtgtcctcttcggaaggccggaggctgcagccgccattgccttcgtcttcggttttgttggcacactcttcttcggtccttccatcattagacgggtcgctggtcgcagttgttagggttaatcttgttgttcatggtttaattaggatgagtacctacttaggagtcgttgtttatagaatatgtctcgttgctgcaatgctgcgttggtttgtaacgtataccggccaggtcgtgtacgtacgtaaacgtatacgaatcaaagcctgttaatcttggaagaggattctaattcctcgaggaacatcccctcgtgtaattaggggtgaaaacggtacggaaatttctgagaattctggctaccgtttccggtttgcaccgaccgtttcagtcagtatcggtaattgtcagtatcggaaatagaaacggtaatctctttcgaaaatggtagcggaaatgggatggggttttttccgaccgttttgtcggtaactgttttttatcggtaatttccgtcaaatttccgacaaaattccgaagaaggaagccggctgggcctcgctagcaggagcaagacaggagcagcccattaggcatttaggccgggaagaaaacccatagggcgtcagccggcgtgtcacttctccttctcatccactccctgtctcgtgactctcgcacagctctccgccgccgccgcaccgccgcttgctagttctagccgtcgtatccttgtgcctcgccgcgtcccttgccggagaagcaagatggcgcctgccggagaaaaacgccgcatccatctggatccatctgaaagcaacaacagagacgaggaacattgagtttgccactgttgccaggtttgccaggtccaccaggtataagtgtatagcttgaatgcttgagcatgatttttttacatgtacagatgaatgtggaacgcctgagccttgatgtgtttgagcacgattttctgttgatgtgcaagcatgattttagtagatgtacaacttttaagccttgagtatttttttagacataccacagttaaatatgggatgataccacagttcactgtttccgacatgaattttcgacttccgaacaatatcggtagattcccgttccgacggttccgtttccgatatactgacgttaccgatatcgttaccgtttccgagtataccgttccgattccattttcgagaaaataaaatgaaaatggaaatggtagagggtttttccgaccgtttccgaccgttttcatccctacgtgtaatatttttgtcaaattcaatgtaaaatggttgtaaaaatactttaaaaaaaacaacataagtacactaacatctatcaaaagacgaagtacaccgaggtcaaaagcggagtgcggctcgacgagaagagtgtccatcgtccattggctccgtcttctgtttaattgttgctacactcttcttcggctcttccataatattggacggccgctggcaagaacaagctgtaggagacaatgaaatatatatgcatgcgttcttgtgagattgcttttcgtcgactgatacctaaccgtgtgagtcatgatccataattccgtattcgagaagatcagtactactttattcatgccatgaccatgcatacatatgggctttcacagatccatgaagaattcctcgcccgaaaccgaaaaatacataaagcaaactcactcactctggctgcagagcgaccgtgcgaagtgcgtactcacacgcaattttattcgatcgatcggggccggcacggcggcgcacacgtctacttcgccgcagacgccgacatgatgtcgccgtcgaacggcgcctggccgaagcagtccaggttgggcccgtagccgacgccgagcacgtcgcagtagcgcttgtagaacgcgacccggtcggcgccgccgttgccgccggcgcactggagcccgccggtgaggatgttcgtggtgagcccgtagcctggcgcgcggccggccgcgctgtccgcgggagtcggagtccactgccccgtgacgacggcgtgcggcgacggctggctcggcgaccgcgcggtcatccacagccacagcgccgtcttgaacgccaccgtcgggtccgttgccaccagctccgggttgcccagcaggtccgcgccgatcgcctcgccggccgccccatagttgtagttgctgaaattgaattgaaaattagattccagtagtggtcatttgttcagtccaaatagtactagtctggaaattgaacgtttcacggatgaaatcccgttgcattttaagatttttctagtgttcgtccattttgtggattttttgtttgcaagttcatttatatggacgttttggtttgctcctttgcgttctcttactatgcgatttgcatgggtccgcgggcgtggtacgccttgccgggcgcgcacggccagcgcgcgttcggcacgcagaagtctgacgtcgcgcccttcacctccttgtagcagtagccccacgagtagggcccacctgcagggacacatgcgcactcgtgcataagacatgtgtacgtacacgtgagttccaacgtgacaagtaaacgttactacgttaccagaggtcgcgtgggaagtctgggccaggaacgcggcgacctcacgcttgcgggtgtcggcgtcgcccgtggcggcgaaggccgggaacgcgccggccgcggcgacgaaggcgcggtaggcgtagaacccgcgggcggggcacgccgcgtcgtcgcggtggggcagcatgcgctcgaactggtccgacgtcacgacggacgccacgccggcgcggccgccgcccggcgccgtgagcagcaccgcggcgacgtcgtcgtcgccgccgtcgcgggagacgcggcactggctctggcagccgcccttgcagtagtcgtcggtgaggccgcaccacccccacctgctgcagcagagcctgttggggcaccgggcgccgccggcctgcctgccgcactgctcggcgcgcgccgtcgccgcggcgtaggcgagggccagcacggccagcgccagggccttcatggccacctgcaggtttgcagcccttgctgcgatcatggcaagatgcttatttcttcaacaaaatcttgcttttcagtggtgtgttggttgagtgtacgtagctggtgagtgatgaagccacagactgcatggcctcttatatagaggagatcatggcctcatctagcttgtgtaaaatcggttatgcaaggtgatggcctcatcttgtgtgaaatgagtaggagtgaaaaccgatcggatagatccgatccactctgaatccgttcgaaacgaggatatggtatgggcttttggaaatccggcggatatgaatgcggatgaggatagtataatgcggatgcggatgaggatatggtatctctaaaatccggtggatgcagattatccgacatttctatcggattatccgattggccgtttgccggataattcgaatttatcaacacatgtaatcactctatctattgcatataacataagttggtctatcgaatgcactaatttatcaattagcatagatttcttagtctgaggctttcaccttctcatggcatacttgcgtagctgtatttttatattatggacatcatgtattcatattgtttaacacttaagcacataattagtatgatggatcgtttattgattattgtattattgtttcttgcattgctaacttaatattgtattgattgtatacacatgtaatatccgataaatttaatctttttcgaactgattccgcactatttccgacatccgaaataatccgctccgcatgcgcatccgtatcctatccgcacccactctgaatcctggtttaggatatggtatgaccattattcgtctgaatccgctctgttttcacccgtagaaatgagtcatgccagtgtggagagtacactgtctttcgggcagcacgagggtgcgttgctcgttttcatctcctgcatgcctgcgtctgctttgtttaactgagcccactgatacatggatgcacgatcgaatatacagggcattaattaaactagatgaagagatagaacagtagtaaaaacgatcgtctttgtttccggggattcgatgtcacacatgcatcagccagatcgagccgtgctctggtttgattcgttggaaagtttgcgttacaactacccaggatgagacaggatctatatgaagaaatgcaacctagatctctttgtatgatagatatgaattcacacacttgtctctctcatgtggttttttactttgtaggtagataaagaatttcatgtacctccctctttgacgtcgttatttacttgtgtagtactaacgaataacgattgaatttggcatggcttaagcctgctactaaacatttctccgatatatcaactttagcatccttgagcaagcagataggaacagcaacatgaagcaaatgcatattggccagaaaacagcatcaactaaaatctgatcccacgattactcaaactgacatgaactgttcttattaacgaaactaattaactaataaaatgattgtataaactctatctcttttctcctgaaatgaaattggcagagttcctgccctttgcccctcaaaaaaaaaaaaactaataaaaccgcgcgcaacaatgcaggcaaactgcaccagaagttcagaacaacgatgcgaccctgatcaaaccaaaggtcaattaacggataagcaaaacgagcataacctgcagctttcttacgcattttttaatcaaagaatttattactaccgaagagattcagaatttcccgaatagtggtatagggttagagttgcatggctgcacccatggagcattggagcctgaaggagtgaaggtgatgccaccttgtccctgaaaatgttcgatgtgcgttgtgcgaaatccctgaacaacgtcggtggacgtggacacactactctagtcactagccatcgcttgttacactgcatcggggcgcagttcagctcgtctggaccgcgcaggccgcgaatcacggtagccaagagattcgaagggattcggagttttattctccgaaccccaccaccgcatgactcaccggagcgcgccgcatcctgcattcctgccttggcctctcgtcaccggcgaccgcaggtacacgaacacccacgcgacggacgacacgctaccgtgcaggaagaacaccctggcatgcatggtgatcccctcggctagtgatatgaaattcaggctcacgccctgcgtacgcaaaattggtgaacttgtcggtacatgcaattatgcaaacgtacgggaaccggtaagctgattgcaatctgaatcctgttttagattctgagattaatggcacaatttgcccttcttttgtcctgaatgttcaggttcatatggatgcatcatgcatgccaaacccaaactcatgcagcgattatctgcatttacatctgcatttgtttgtctgttctgttggcaatttggaagacaagaagcaaatcctgtttccaaaacgaactaccagaaaattatgtgtttctaatacactttgtttgcactttgcttgcatcatggtcaaaattgcacacgcagttggaaaatcaaggggaaaaaaatacttcaggggaagcaacttccaactagcacgccctgaacccaatattaaggacgtgcactatagtcaaacaaatctcttagcctttgcgtgttggaacggattttgcgtcaatagccaccccgcctagactgttcgacttcaccgatcatccagttccaatcaat

SEQ ID NO: 23158 - DNA, 3537 bp, Oryza sativa
tgtgaacaatcttacaaatcactttgtcaaataaagaaataaccaaaatagaagttatagatcttgatgagttatacaactttgttattgacgactttttcagttaaaatcatttagtatttgaaaatgttgtttgaagttgttataatttaaaattcatattcaaactgttcaaacaaagtcatatagaaaaatgaccaatacaaaagttgtagatcttaataagttatacaactttgtttttgacaacttttccatttgaaatcatttactacctgaaaaattatttgaatttcttatattttaaaatttaaattttatatagttcaatcaaactcgaatgaagaaatgactaaaagaaaattggtagatctcaacgagttctacaactttgtttttggcaacattttcatataagttcatttaatatcataaaatttgattcgaacttctcacatttttaaattaatttttaataactattttcgcatgcggtccacctaaggaggcgcatgtaaaaatctatttttgcatgtggctattttaagtggaccacatgtaaaaatatcttcacatcaatagttttttccctcctcaccacttcaaaaattttcatgtcttctcctctcctctctctgatatctcaccccctctatttttctttctcttcctctctctcactctctctcttcctctctctctctttctctcctcgatctacgcccggccgaggaggaggtggcaggagcgggcggcgggcggcgggggctgcgacgaggaggaggcggtgggagcgagcggtggcggcagatgggagcgggcggcgggcgacgcggccgagcagcgggcggcgtgggccgcgacgaggaggaggcggtgggagcgagcggcggctgcggatgggagccgccggcgccgggagagagcggcggcgggcgacggccgggcggcgcagatccggtgcatagggccctccctcgcgcggatctggcggcggtggcggatgggagcgagcagcggcagcgggagtgagcaaccggcgccgggagtgagcggcggcagcggatggcagcgagcgatggctgggcggcgcggatccgacgcagggggccctccctcgcgtggatctggcggcgtctccgactccggcgacgacgacgagtgggcgacgacgacgacgatgcgggtggtggcggcaggcctcgtcccacccagatccagaggcgggagcggccatcgtgatcgagggcggcaggagcgggagctggcggcggcggcgggagcgggggcaagtcgcggatttttgcatgcgggtgccctggccgcatggaaagatggtgatctttgcagaccatttcacgcatgcggctggcccaaccacatgcaaaaatcgtgtgttcctaaccggcaccagcgacgatttatgtagaagtgcttcttcgatataagagtttttctgcatgattaaaagagaattttgttgtccatttatttattctgaaatattggactgacactgtgccacatgcatatatatcggtttcagcccggttacaagtttatgacacaccatacttcgactcgatactagtacgttgtaagtacgtacttgtacgacgacacgtacagggagtgagtggcaaagcactcttattttaccgccagccagtcgccgccggcgaagctactagctgttcactgcgccgccgtcaacccgctgttgaacggcctctggtcgtagcagtcgaggttgctcccgtagccgatgccgagcacgtcgcagtagcgctggtagaagccgatccggttcgccacccggtcgtcggggccgaacccgcactccaacccgccgttgatgatgttggtgatcacgccgtaccccggcacccgcccggccgcgatgtcccccgagctcggcgtccactgccccgtgatcacgtcgtggcacgacggcttcggcgactgcggcgtcatccagaaccacagcgccgtcttgaacgacaccaccgggtcgacgccaccagctccgggttgttcaggaggtcctcgccgatggcctctcccgccggcccgtagttgtagttgctgagagatcgatcgatcaaaagttcaaaaccattcttatcgcgctgagaatttgataaaaaaaattgaacctagctttgatgtgcttactaggagagttggatggggccgcggccgaagtacttcttgtccggggcgcacggccactcggcgctggggacgcagtaggaggccgtggcgccgatctcctccttgaagcagtagccccacgagtaggggccgtcgggcgcggtcgcccacccgcccgtggtctcgtgggaggtctgcccgaggaacgcggcgacctcacgcttgcgcgcctcgtcgtcgcccgtcgcggcgaagtccgggaacgcggcggcggcggtgactaaggcgtcgtaggtgtagaaccctctggcggggcacgccgcgtcgttgcggtggagcagcagctgctcgaagagctccttcgacacgaccgcctccaccgcgccgccacccccacctccaccgccgcccccgccgccaccgccgccacctccgccgccgcagccgtcgcactggctctggcagccgtcgccgcagtagtcggaagtggagccgcaccagccgtaggagctgcagcagaggcagttcgggcacagcgccccaccggcctgcgagccacactgctcggcgactacctgcgccgccatggccgcggcggccacgaggagggccactgctgtcgtcgtggctttcatggctggacttgggagtcctcgtgcttgatttcgagatgggacgatagcgcgtaacgcctgccttttatagacggctggcgagtcggaatggacttcgctagcgagctcgagttttttcatcttcgtccacgtctgcacggaattggtggtgattgctagtttgattgtgaccgctcagctgtcagcctgggcagtacagtacgtagctagactcatcatcaatcatgaagggcaactatttggagttaatgttaagtctcattttagtttcacagatcgatcttcacatagtgagataaactgacaaccattcttgcttgaagaacactaattttgttgcctgattacttccaacctcatgcgagctattatagaacatcggtaactaaacacgaaaatacgtcataagtattcaccaagataattaaccacatcgagatatgatatttactaatgagattgtgctaaaatttatatctcgggacactgattacgggtgttccttagaaaccatgggtgtgccaatgaaacatgagctatagttgtaccccaattttttggaacttatgatttcatagctatattatgtgttttgtgatattatttgtgtaaaaacaagcattcttgagcccaaaatcatcctttctaagggtattcaaatttctccttatatactttacaaaaaaatctgtacaattgattgttattagcactaatgtcaaaattacttcttcatttcacttatagg

SEQ ID NO: 23159 - DNA, 1614 bp, Oryza sativa
aaaatctgttaggggctttctgtggcatggatggtgattctatacttcattgatgcacagaacaacacacttatactcttaatgttgatggtggagtcattgtggctatactttctgttgtcgccatattttatacagcattgttctaagtcatgaactcatgaaatcatgatccctagagctgcacattttcctctgaagtattcaggtagcctagccagttgtatataaaggacattaactacatagcacttctatcaagccattgcgctgtatatgtgcttaaaggttcgattaattgggctaactgctgaccactaaactccaagaaactgccatctcgtatttttacaatgcttatctggatgttttctcttggcagctaattcatatttttggaatggtaaacaatatttcagttgataacaattatcacttctccactgcaaaataagagtgtcttattctttttattcggagccacattaacagattgtgtgatatactgataggtgagggatatgcttggcgatggccgcctcataaaacggcgtgtagttgatggaaaaggtatgattgcatgtttatactgatttatggattttttttcccttgggttgaaacttttcacatgttcctggtatgcaccttgatattataacaaaatttatctttcataaaaattaactagaaatcttgtggtctttcccatccattcaactactgactagtgattactgaaacatgttgacttcttatcatttgggtccttgtgatacttgtgtttgctacaagtttacttttagttctttaattatttaccaggaacagattttctaccttttacttttattagcagaaaagatattgagtacataattaaatgataaaaaaaggagcaaataataatagcaaaaagtttctacacagtgaataactaccctgttgttactttaagagcatttttctattgccttctctgcatcgtgtcatcatcatgaaaatggaatgaccttagacttagagtcagatgctctctttatccaacttatagtggtaaaaagagttgcaaaatttagatgaagggaagaactcagaggtgtgaattacacaaaatgattcatcatttattcagctatttttatttcaaaactacaaatcttcaacaagccaacctttcacatggaattgttgtgggcgtgatgaggtacatgttttgattccatcatgtgatgtgcttgatgtttatacctcttttcgttccttgaaaatatcaggtgaatttcctatggactgtcctcttcatgatagcttgctaagagtgcattataaagggatgctccttgatgaaccaaagtcaatattttatgatacccgagttgataatcatggtgaaccattggagttctgttctggagaaggcctggtaaactttcacttaaatctttattgctgcaattattaactgcatcagttcttcatgtcaggtcataagacctgaccaaagtaaagaacggtgccctgcggtttcgtttaatttttcttggggaacctcgcattctcctaaaatctgttcccatttcttataaagttaaagcttcctggtgaatctgc

SEQ ID NO: 23160 - DNA, 4549 bp, Oryza sativa
tgattgcaacaggccagcgaatgttcctgaaggagctcatgttcaatgggaaattgaattacttggatttgaaatgcccaaggtagtgactaaaaaacagtcacaaaccttttgtatttccatgttgcttgtgcagtgttagaaactagaatgtttgtgatgctattcctgctctctattgcggggaacacttgggattacaagtagctgttaatttcaacccgcaatcggatcggtttgaaagttgtcctggttcttgtgagtctgtagctgtgtcccgtgatcctttattgcttctagcttttcagcgaacttgcattatgttttcatgtattgaatagcagaagaaagtaataagcattacatgtcattctgaatatttcactagatgaacaccttgtcttgtgtggttcaacactatttcagctatggcttctttatgattatattatatcttttccctttcgtttttttattaagttctgtctgacaaatcttctgacttctcatataatacaaatgtaggattggactggtttcaccttccaagaaatcatggatgacgcagaaaaaataaaaaccacggtatatcgattgagattgttgagtgaatcattacattttgttttgtttttggtgttttttccacttagtatctccctgaacctatcatgaatgcatttttccagaaatgcagtgcacttcaagaaactgttgagatgtctttaattgaaaaacataaaactacttttatttgtgttctatgtgtgcaagctgtgtttctcaattgtcaagatggccaattgtttagtatgatcatatgaaaatcctggagttcccataatgccatcatctaggtctaattttgtggtgatgtccaattccaccttgtggaccactgcaaaattgtgatcataggccccttttgaaacaaaggaaaaaccattggagttttagagaattttatcctatgggaaataatcctatggagccctttgaaacaaaggattgtttcctacccattcctttgaaattcctatggaatgaggtctaacctcatgttttcctcttcatgtgtctagaattcctgcgtttttcaggtgtgctaatcaaatgacagttttaaaactttcatgtgtttcaaaatcctgtaggaatccaataagtatgacattgtattcctatgtttttcctattactgtgttttctcaatcctgcgtttcaaaggggccctaaatatctatacctgttgtccacttggctggttttgatgtgtcttttttcactaataattagctctaaactgaagttctctctcagggtaatcgactgtttaaagaagggaagtttgagctagctaaggcgaagtatgaaaaggtatgcccttcacatgattcagcattcaatattaagggcaatctcggaacattttttttcttctccattgctatgttggtctggatattatctctttcccgctattgttaccactccatatggttaccaatttggcagtctatactatgaatgattttaccttataatttcttgtacatgtaaagggcataaatttacacgtatccatgacttcattctgtcaattttttgggtgcacacgtttttcttttatttatttttgtgcaaggatatgggtgagatgttttcaaaccttctctgcctgcaggtgcttagagagtacaaccatgtgcatcctcaagatgatgatgaggggaaaatctttgctaattcaagagtatgacagcactattttcaatctttttttccctaacaatagcatagatgcctgattagaacatttctttgaaacatgtacctctgattagcactgcaattcaacaattgtttctgctttctgaagcatgtgtttacctttcatttttgtttttcttttacacatgcagagttctctacatctaaatgtagctgcttgctaccagaagatgggtgagtatagaaaatctattgacacatgtaacaaggtatgtttccaaaaagaactttgtactctcaaagaattttcctagggtgtctatatcaaagagggtggtgcatgcttgtatgggggctgtcattggacctcttccgcacatgccactggatgagccttgtaatggatagatctggggatccaatcatccatccaaggggaagatagatgtaaacttttgcttaccactcttggatcaaaatttcgaggagggacatcacatttttagtttctcctagtctgatctgctgaagttcacgcaataacctcgtgaaatcttgatgatagatagtactcacatatgagtttgcacaaggcaaccatataaccatgaatgtgctggctggcttgttttgtacacattatggtacttggcattgatatcattgtgaagtgagcaattattccatttactctttgagcaggtgctagaagcaaaccctgtgcatgtgaaggctctttatcgccgaggtatgtcctacatgttattgggggactttgatgatgcaaagaaggattttgagaaggtgtgtttcccccatactttagtacctgcttattttctttttttatgtgtcatggatgattgtttgacctctacctaaagcactatgtcactacatcttttttagatgatagctgtcgacaagtcctcagagcctgatgctacagctgcccttaataaacttaaacaaacaattcaggtatgcaacattacatcataaggtgagacccttcagaactgttgaactaacaggagttgtatatatatatataatttctaaaacaggaaactgaaaagaaagcgaggaagcagttcaaagggctgttcgacaagaagccaggcgagatttccgaagtaggtgtaggagagccagagggcaacaagactgacacgacaggctcaggcgaggcagcgtcaactgctgacagagacacggatgcaaaggaggctattccccgtgcagattcagggttggccttcgaggaagagaggcccggacttctcgcccgcatctggccttcagcgagtcggatcttctcctcgcttgggctcaacaggtgcacaatcctctgatgcaccaccagtattcaaaccactacaaacagcagccagaaaagtcgcccagcaaagccctggaacgcattacacacgcaaaattatcaccttggatatatatctctaaaaattatactccattacatggtgtaggctgatgacctataaatgaggtaggcgtagtagtaacgagttagttaaggacatacggagtattactgtggaaatgcatttgtgcctgccatgataagaatcactaccactgccacctgatagagtgttgatgatgtggtgtgggccccctgatcctgagcgtgcgtagtgtaggtgtagtaggtaagaatgagactggcttaaccgggtgtctcttccatggctgtggctgccgctggttcttctggtcttctagaacggtgccacccgtttgtcggccaacgcgtagcagaggccatacttatgtgacatgattgaattgccattacctaacacctctgataatgatgtttcccataaaaattaaacctagaaccggatattacacatcctaatataacgaatctaaataaactcggactagatgtaatatattatagtataattaatgtggacaattacatctagttctaaatttattttctatgagacggagagagtcacatctgattttagattttttttttttttttggaacggagggtgtacatagattcaaggtggtaggcgtgtctacagtggacgtgcaggtaaaagcatatgctaatgcggcttggcctgctgctgctgggattccggtagatttgcttgtttcatcgccatattcagcccatatctccttgttggtgttggtgatggctattagtaacaacgtgaccttttaacaaaatatttcttgttctcatatcaatctctctactatttgaggaacttgcttggggcctttgagaccatgttcaattaatccctgtgagggggcctttgagaccatgttcatgttcgattaatccctatgaggaaggattaaagggaatttagtccagagttattgtggtgtgaaattatttctctctcaatcccctcaaatctttttcaatcactctttataccgaatatgaggcataaacaaggacttagggttatgtatccctcatcccttctagaaactccaggccgatatgatgaagcactgcaaacagatactttttcttttagggactggctatatgtctgttgatagaaaatcccacctcccatctttcaaatttttgaccgtcagatatgctttaagattcgtgcagatgtattaaccctaactctcctcccgttcccctcccctcgctcattccaccgccgccactccctccgatcgcgcattccaccgctatcgcccgatcctccaccgccactgacccatcgcaccgccgcccgcctcgtcggctggccgaaaggcgtcaacagcgccagcaaggtccccccccccagcc

SEQ ID NO: 23161 - DNA, 13575 bp, Oryza sativa
cccctctttttcccctccccctcctcctctctgctgtagagagcttctttgtacaagcataacggtggtgaagcagagtagcagaccctcgaaaatggatctagaggcctaggccctcctcactgctagacctgccctgagtgcacgttggctacaagctggtcttgtagcctcctccttcatctcatgcttgtgaggtatggcaacacccacaagatctagctcccatgataaaaggaggcaactagcaagtagggaggccgttggaaaggatgctgactagcgtgggctccttggcctcctgcttctaggcgctttgtcaatggtggaggagggacgcgatcaatgaagcttctagatttagagctcatcgccggagtgtgtgcatgtatgtcatgcgatgtatcatccgcaactagtacctgtaggtaccatatctggtacctatggtatcaagggtgatacctaggtatcagacccagtacatgtagataccatgtttagtacgcatggtgtcatgggtggtacctataggttttagacctggtatttgcgaggtatcaagtatcatgcaccgcgcgcctcctctcctcttcttctttcccctcggctcgaccctgtcccctactactggcgcgaccaacgtcactgcctatgtttccacaagcgttggttcaagactcggcgacgcgaacatctcgagtaggggcgggatgactctagacttacgaggagaaagcaagcatgtgggatgacatcatcctctataaagtgtcttgttcgaatggtatctcgtcctctagcagctctctattatatttaagagaatctattatataccactgagtttgttcaagttcaacgatttgccatcgacattgtctctctctacaatataccgacgactttatcaattattctatattacactattgggctgaaccttcctttcaaaaatacccaaaatacccttagacattcaaggttaacatccttacataacacgaaaatttgtatagaagttttaagttttctttgcattcctatttttttagaagaaatataacttatatgttatatgctatataaaatatttttatcattgtttttaatataaacaatctttcataccctacatacgatatttttgtgctattatatattgtataagcaaattctctttcatataccacacaaatatatatttttataaaaccaaaatataccagaaaaaaattgaaacttgtatacaaacttccatgcatgttgtgtaaggaggccacacaatttttttatatttttttgaaacttataatgaaataaatcaattcttaatcttatatgtcactaagggtattttgggtaattttgaaaagaaggcccagaccaatggcgtattgtagaacaattaataaagtcaccgatatattatagaaagagacattgtcgatggcaaattgttgaactcaaacaaactcagtggtatagaatagattctctcattatattttgggtaaatttcataaaacccctcattttaggtcaatgtttaagaaaaaacataagtattatatatgacttttggcatataactatttataggttttatgatctaaatgttttattaatccccacctttatttgaattttcaattgattttagcatatctgaaatatttttttttgaaagtagtgaagagttaaacgaacaaccttaatcaagaaatcaacaactaaagatttcatatacattctctgttctgaaatttttaagtaaagatttgtcaaatatgtatagaggtggggttttgtgaaactttaaaaccataattgttagggttatatgccactagtcataatgccttagggtttgctaaattttgctcttatattttacaagaatggcattagagggtttgtttggcagcaaggttgctgcagccagctgcttccgcagttgtgtgaaataatgttggcgttggcggcaaccctgcaaccaagcagctgaacagatgcagaatgactggcatcgattttgcggcaggtttgtaatagcttatttataaaacggtttcatatttacagtgttgccctaaagtttggcacttttgccgtgggatcaaccatctcaaatttgaggaatcagagtaatttcccaaccgttggtcttgcgttgagattcgtgctccggtggatgttgacggaggcaaaggcagccccaaaacgggatcgtagatatataaaggcgtcaagcgagcgcacaccccttgggggcttgggcagcgcgcgcgcaaaaccgagttcgccgcccacctcgccgccatggccatggagctcgccgcgctctgcaccgaccccgtcgtgctctccgccgccttcctctgcctcctcctccacctctccctccgctcctaccgcccgccctcccccggcggcggccgccgcctcccggcgggacccccgggcctccccgtcctcggcgcgctgccactcgtcggcccggccccgcacgccggcctggcgtcgctggcgcgcaagtacgggcccgtcatgtacctcaagatgggcacctgcggcgtggtggtggcgtcgtcgccgtgcgcggcgaggtcgttcctgaaggcgctcgacgcccggttcgcgaaccggccggcggtggcgagcgccgtggacatcacgtacaactaccagaacatggtgttcgccaactacggcgccaggtggaagctgatgcggaagctggcgagcgtccacctgctcggcgcccgcgcgctcgccgactgggcggcggtgcgccgcgacgaggcccgccggctgctgcgcggcgtggcggaggcgtccgccgccggccgccccgtcgtcatcccggaggtgctcgtctgcgcgctcgccaacatcgtcggccagatcaccgtcagcaagcgggtgttcgacgtgcagggcgacgagtccaacaggtgagctcgccgccgcgccggtggtgccattactatctagcttaattagctaattatttcctatctccactatagtagtagtatagtttcatcttcgttttcgatctttttattctttttgaaaaaaggaagaaaatgaaatggtgtgcaaatccaatgcatatgaaccttttttgtaaaaagaaattggaactatgaatgcaatttaagttgtggtggaatagagccgaccactagtgtgtagttatcatgggataggtaggagagcatgcgtgcgcaagtcagcactagcaatgagtcacacgtcaacaatcatcgatcacctataaaagaattaccgaaagcgagacaaaatccactaacctttgttattcgtaatattagtagacatcagcatcatctaaatgcataaataaatacaaaaatatatactccgaaatatagctatttcttgtacaataccttatctcgaaatatacgtacctaatcctctcaaccattcaccaccattctacttcatctattttctcttttcaatcaatcatacaatttctctaattattctcacatactttttttaatacatatgccattttttacaatgtcgatatcttagaacgagaacggagtaagtactgattaatgcatcgatcgatgtgcacgcgcatgttgatcgggtcgatgacatggaaaatttgcagctataaggatatgatcgtctcgctgttgacgggtgcggggctgttcaacatcagcgacttcgtgccggcgctggcgtggctggacctgcagggagtccaggccaagttgcggcggatccacgaccagttcgacgtcctcatcaccaagctgctcgccgaccacgccgccaccgccgacgaccgcgcccgcgccgggcgcaccgacttcgtcgacaggctccgcgccgccgtcggcgtcgacgacgaggacggcgagaccatctccgaggtcaacatcaagggcctcatcttcgtaagtccttagttacctcaccttgtaatgattaattaactgcattatattgttaccactaattctgttttataagttatttttttattataagtcgttttgatttttttattaaactttttaggtttcactaagtgtatagataaataaaagtgcactacctacctaaattagttttaccattgaatgtatattgataatatatttgttttgtgtttgaaatagtgttatattttttataaacttggttaaaattttaaaaatttgactagggaaaaattaaaatgatttataatataaaacaaagaatagtggaataatttttagcgtgctgcatacgtatgcgtgacataggcgccacgtaacagtgaaaaccgtacacgtgtcagttctgctcttttccctttcttgggtggaaggtgccttgcaatggtgtttgtttgtgggggcagcacattgagctatggatggtacttgatttcattcattgcagtggagttgttggaaagggatactatatcataagcacttgaaatgcacatgccaacctaactgaatgttttttcccaagggaatatatatctcccatgataagtgtcctctagtatctttcagaaaaataatatatgtccttgcagggtacctacacttgatcaatagtaattattagggatccaccgaattttctatgcttcactaaccgcaaagaaacttgtttgtttcctactaattgtagaaaaacataaacttattttcatcctaaattataataataaatttaaaatgttgtaaataactatatatatatatatattctcaatggagagatatgaatttactacctccatttcatattataaatcgctttagctttttctctaataaaaattctttaaatttaaccaagtttatataaaaatatattaatatttttaacacaaaacaaatataatatcaaaatatatgttagttttaatgaaaataatttagtgttgtaggtgttactaaattgttctatgaacttgatcaaacttaaagaagtctgactaaaaaaatcaaaacgacttataatataaggagtagatgtttccttttgagggaaatgataggggctctgtagttcgctatattcatttatatgttaatttggagcaagcatcccctgaaaaagcttgaaaactgtaccaccacaaaaaggaattttggtgttttacaacttgagccaaaatattaaatacgtaagttgcttgacaaaaaacctaccggagttgttataacatcctaccagatcgttacatttggtcgtttgtgctctgaaaaacaacaaaaggaaaaaaaaatcaactataatcaggattgaattgtactatggctagctagctagaaccatatggaccgatctttttagcttccatcagtttctgaaaaccacgtacacttctgaattcaattaatctcggcgatatatgatatgatctgcctccactccacacccacctaaccacttcagaaaactgcatgagtgagtgagagtgatgcttcaaccgcaatattcttctacctatatatctatcgctccaacacgcgattgattaattaaccacttaattagctcgataattaagctggctagccttcagggttagtggcaggtacttgtgagtcagcagtgtcaacacgaagtaacacgcaatctgtagtacattgtccatatggcagcatcattattggtgccacaatgacttgatgcttcaacttaacttcacttaaactaacggattagcggcaccagccgggactgatgatgaagggtaatcaacatctctgcttgacattgcaaccaaattaattgcagctagctagctactcctacccccgatgcagctatctgaagttcctctttagcttaggcaataatgttcagattagtataagcctaaacagactaatcaaaatgcatgtgcatgcagtggtagagtacttgttatgcttatgcttacacattctgcttattagcagctgaaaataatttgtagataaattttttatatatgtatgtctttagcaattgaaaataaatattagcttataagtataagcataaatgaaatggtgagactatcgtgctctcaattagatgattgaagtatatacgtacatacgagtgttagttgcaaccaaatgtttcccgctactcgtgataaaatggatgccttaattgggtacagaaactattgatgacttgtcgataactaccgtaccttggccagtatatatttcctgattgtacgactgcgacatgtagacgtactgacgagacgaactgaacctaccagtctaccacactgtactgtacaagagtcaaattaagatgactgaagcaactcataacaatgatctgcagccgtcactagcttaactaccattaaaagtttagatatagatgacagctgataatatggatggctaattatcatgctgccaagttacatctatatcgatttcacttgccttccaagttccaacgcactgctgtttcccactggaatctatcgatttcactttcatttcaacgcactgctatttttccaatgaagaaaaaaaattgtcggtataggagatcaccgttttcaaatttcttgaccatacttgaaagcaactcatcgttaaatatatatatttgaataaattgtgggcttgatatcaacaggacaacaagtatattaattagttaagttagtcctttttgggttggcgagaagtccacctacggcacacttgatcgatctctccaagtagtgccccatcatcggttggtgcagtgtggctaccccttgctttgcttctcttaaaatgatggacacatacatatctcagtagctagcactttctctgtgcagtaataataaaaacaatttaatcattatgaaaaatagcactgcctcaaattagtgatgttttgggcatcaagtttatatcttcttttcttatgtgattggccatgcatctgtctgaagacacaggaataattcatactaaaactaaaattccccttcaaactgtggtgaacttttcatcatgaccaacaagtgcaaaattgtatgaatgattattaagactgtattttcgttaagcagtttgatctaagtgacatctttccattacgttgactatttcttttactatttatcaatcaccttaattttgcacttcttccgtttcatattataaatagtttaattttttattagtcaaatttcttgaattttgaccaattttatagaataatatactaatatttttaatacaaaacaaatatattatcaaaatatatttaattttaaattcaataaaactaataaggtgtagaagatgttgctattttcttctgtaaatttagtcaaacctaaagaactttaactaataaaaaaataaacaacttataatatgaaacgaaaggagtaacttttttatcgtgttcgactacctccgtcctgaaaaaaaaagtcttcttgactacttcctctgtttctaaatatttgacgacgttgattttttttaaatatgtttgaccgtttgtcttattcaaaaaatttaactaattattaattgttttcctatcatttgattcattgttaaatatacttatatgtatacatatagttttacatgtttcacaaaaaaaatttaataagacaaacggttaaatatgtgctaaaagtcaacggtgttaaatatttagaaatggagggagtataaaaaaaatgtagtacaattttcacgcatgttaatttgatgtatgcatgtatgtacgcaggacatgttcacggccgggacggacacgtcgtcgatcatcgtggagtgggcgatggcggagatgatgaagaacccggcggtgatggcgcgggcgcaggaggagatggaccgcgtcgtcggccgcggccgccgcctggaggagtccgacatcgccagcctcccctacctccaggccgtctgcaaggaggccatgcggctccacccctccacgccgctcagcctcccgcacttctccttcgacgagtgcgacgtcgacggctaccgcatcccggcgaacacgcggctgctcatcaacatctacgccatcggccgcgacccgtcggcgtgggaggacccgctggagttcaggccggagcggttcatgccggggggcgccgccgagcgcgtggacccgctcggcaactacttcgagctcatccccttcggcgccggcaggaggatctgcgccgggaagctcgccggcatggtgttcgtccagtacttcctcggcacgctgctgcactcgttcgactggcggctccccgacggcgaggacaaggtggacatgtcggagacgttcggcctcgcgctgcccaaggccgtcccgctccgcgccctcgtcacgccgcgcctcgcgccggccgcctacgcgtgacggccggccggcgacgacgaggacgacgccgtgtatgtgatcgatcgagttcgccgcggcggcggcggcggcggcgatctgatgttgcggttgtctgtacgtaaatatatttttcgtttgttggtttcgaaagcaaaacacaattaagaacgcccaaatattgcaagcaaatacgcctgtgaattgatttcttctatgatctgtttcatcgatcctagctaacgtgttttatcgaggcaagttaattagaacgaattgacggattgtaattgttggggttaacttaggacaacgtacgttgataatggtaggaggacaaatgtcatccaactttgaaaaatgaaaatcgagtttcaagaaataaagtttattgagtaaatttcagaaaattgtacttttattgactaaattatcattttgctgcaatctttgcatcacatttcagaaaaactgcaaaagtagcgttggaaattatcacatagctgcaattccgtcggataccccgttaatgacattctgggcccacgtgtcatacatatatatgcttgagagaggaagaaacggagggccatgtcagcatgccacctcatgtttttactgcagcaatgccacatcagtgcatgcttgggcgggaaaaatacgtacgtagtccggctgcaccactttggcttgttcaggggcacaggccgacaggtccatcaaaatacacctttaaagtccacatttccttggctatcctaccaagttgccaagaaagagtgatatttgcatttgaacacagcaggaatacgatcgtcaacaaatcacatccctaaccctagaaaaatcaccctccaataaacccgagaaatacaccaatcggacaacaaagaaccattatccaggtgcaaaattactcaaaatctaagttattccctcgatttcgacaacttcagctcctacctgtactaacatcattgtactccactcaaaatatgtgacaaaacgagattcatattgaatatattgaaacattttattaatttaaaagtaatttattacatgttagaaagtaccttccatgttatcaggaagtaactattacatcttatacatggttaattatcattagttattgcatcaatgttatttacaatccatcaaaggttttatcttcttttctcattttacatgaaaaacaaaaatgaaaggaaaaaaacaatcggtgattaaacagatttatagagttaattccgaaccatgcaaaagttagttccaattaacattgaagttacttttaaaaactgttaaacttacgtgtgttgatttatactgattaaataaagttttctagataaagtcatatttttatccctacaacgaatttacttctaatgtcgtgacaaagttactttcgttttattttaagttacttttataatatatgtaaataacttttaaaatttattggatttacttttatatgtctaagaagtaatttagtcgaatctaaaagtaacttatatatatatgataaaagtaacttacatatatgataaaagtcatttgcaaatataaatattttttcatcataatataatcaagtatgatcttgttgtgaagatttaattgttgtgaacacaatggtgtaatcggataagtaatttgagagaaaactttatatttaaagaggaagaagacatacatgtctattaaaaaaatgcatgcatgtagtagacttctccacgtgcatgagacggttcggatgtcgctcgttaaggcaaaagcgagatgcctcttcaaatagattttaccaaagaagcctccacgtttgctctcatggcctaaaaattcctacgttaatcggagaaaaggaaaagtagagtctatataggaatacaatttaaaaatagctgaaatacagaattaaaaataaggaatatggaaagaggagactagggtccatacaagtatataatgtagaattaattaaaattcggaattaaaaaatatgaaaaactaaaagtataaggtagagtccatatagaaatataatttagaaataactaaaattcaaaatgaaaaaaagtaagattgggagaaaagtctagagtccatatataaatacaatttataaatatctgaaattcaaaattttttaaaaaaaatattagaaaaaaaagtctagagtccatataggaatacaatttataaataacttaaattcaaaatcaaagaaatacaaaatattgaaaaataaatttagagtccatataaaaataaaattagaaataacagattgggaattagaaaagtagaaatattggaagaaaagtatattgtccataaaggaatttagaactagctgaaagtcggatctaaaaaataagaaaattaaaagtagagtttagactccatatagaaatacaatttataattaaaaaaattgaaaattgaaaaaataaacaagattgggagaagagtttagcgtccatataggaatacaatttataaataactgaaattcgaaattaacaaataagtaatattgggaaaaaaattctagagtccatataggaatacaatttataaataactagagtaaaatttttaaaataagaaatattggaaaaaaatgtcaagagtcaatataggaatacaatttaccaataattcaaattcaaaatttaaaaaataagaaatattgaaagaagagtttagactccatatagaaatacaatttataaacaactaaaattcagagttaacagaaatgaatattggaagagtagtctagaatccatataagaataaaatttatgaataaaggaaacatgaaatttaaaaaataaggaatatagaaagatgagtcttgagtccatatacaaatacaatttataaataactataatatacaatacaataaaaatatcacacatttgttaattagttcaaccaagaatttaaaattatgttgccattttaatatattttaataataaaatgtaaaaatatttaagctattatatgagaaaatataacaatgctagccgcacaatctacgcggatcaccatgctagttatcttaaaatatatatatatatatatatatatatatatatatatatatatatatatatatatatatatatatatatatatatatatccgtgtcgtgtccctagcttcaactttgggtgtgccttgccaaccagcacgcatatcgaaagggaagcatatagtagtagcatgtgggctacgactgtattcgttggtgagagtttggatgtaaactctccgtacggaaaatagagtggtctcattatgcaccgtggatttataattcctaaacctcttagctatttttttaaaaaaaatggatcaatatgattttttaagcaacttttgtatataaactttttacaacaaacgcaccgtttagcggtttgaaaaacgtgcacgcggaaaaagagaggggtgagttgggaaagggggattcggaacacacccctaagtacatatatacggagagaattaatgccaaagtcacatgcaaattaatttcagtacactataaattaattaatacttctaaaattatttcacccggacacaactaaggtaaggaagaacaagaaaactctactcctcattaataatattgggtgcttggcaatgccatgcatgagcttttgaggttgttttcgaatgattaatccacctttgggtctaaaatattgttgttttcgaaggattaatccacctttgggtctaaaataaaagagtaaactgcatcttgggctactttttattatctatgttgcaatttggacccgggtaaataaaacttttcattttggaccgggtatctttacacaaggttttaatttggactctcttcttctgtacaagatgtagcactagcggaggtcgagcatgagcttgagcgtggctgtctgctacttggcttagttcttatcgtcagttcagtaagtagcaacagttgtctatcattgccagtcagcttcttcatatgctagttgctactagtaagaatacttgttgtgcaccctctgttgtccttgaaattaagccacaagcactagctagtcgatgattggaaatgcaaactaccctttgaattctttggaagactttacagactaaagggaagaaaggaggaagagaattggaggaagaagacgggagtccaaattgaaacatcatgtaaagatatctggtccaaagtgaaaagtttggctttagcctagtccaaattgtagcaatgataatcaaatttggctcaaggtgcaattcactcaaaataaaatcaaatacatgtattagatagtttgaagcaaatctcgacaaaaaagtcaaaaaatttaagcaaatctctctcaaatatttttttttcaacaaaacctaattgattggacgcgcaaagccatcttaggactagggttaaagtatagcacgcccgcccagctagtcctagtatatgggacaagaattttctacacctaggtgccatggcacccaacattcgtatgcgacttaaatagttataaaaaaattaaaaaatatatagtaacatctgacggagcgtggggctcctcaccgggagaccgcgcaggcccccctttgccggttcggccggggactcagggtgagattctaagctctctgtatgtggaaggttcgcgagacaggaagcacacaaaacgccggcgatgtatacaggttcgggccgctgagaagcgtaataccctactcctgtgttttgggagatctgtatatgaaggagctacaaagtatcagtcagcctctcccttcttctgggtttctaatctccaaaagtcccctccctaagtgggcaaggtcctccttttatatcttaaggggataccacatgcaccatttctccctttttttttgtggggacttcccccaccttttcataaatggatggagatttgtatcgttgccgtccgagtcaccttctgatgggacggcccacaactacctccactttcgccgggagcagatgcgacgtggaatcgtggccgccagctgacgacatgaccggagtcagaccagtcacgtcggtcattcttgtccaccacatgtcagctttagcaatctacatgttcgcccttcttcacacaacatcttgcttgtaacggttaggataaa

SEQ ID NO: 23162 - DNA, 5597 bp, Oryza sativa
ccatctctgggaggtaacacgctagctccagctggggacgagcgcctagaagccctcgtcctgacgggatggggcgaggcgtgcgtcagaccgcctgtcgccacctaacccgcgatctgaccggtctgtgactggtcacagaccggataaatgagtgcactgcactgcgttacatgcggcgtgacgcgctcgtccaaaccgcaataaatgtggctaggtgagcgccgctgcgctcacctaacccatacacgcggcgcaaaacccacaaggggtcggggcgcctcggccctcggggccgaggcgggagcggtccgaccccctcggggagacaaagaggagggcgaacacatcaccctcgggcccgacgcctcccgagggtgccaggccacgtgggcgattgtgtctgcctcaagcctctagtcatgatactcccggtcccatgtcaccgacagtagcccccggcgttatgccagggcgatcgccctccccgagggaagcggtcgggcgtgacgccacttctaaggcctggtgacaggtggggccggttcctacaggtgccgtcgaactacatcacccagagggcggtgtgaggcagctgcgatgggctcgagctggcctcgggggcggagacgagctcgggagctggggtccactccaccacaaagtcggcgagggcctggctcttgatcgcgtggcttggttcaaagcgcaaatcgaattcagagagttcgattgcccatttcaccacccgtccagtaccctctcgattatgcaagatttggccgagggggtaagacgtaaccaccgtgacccgatgcgcctggaaataatggcgcaacttcctcgaagttatcaggatagcgtaaagcatcttctgggcctgagggtatcgggtctcagcgtcccggagggcctcgctaacgaagtagacgggccgctgcacctttcggcggggccgatcttcttcgtcaggggccacatctccagggcgctctcctatccgagaggccacgcggggcgtactcggcttctgtgccgacgacctcggggtcagagggcgacaggcgcggcctcccgcagtggcctcggggccatcctgggggtcgggggcgcctggcaccgtcggacaagcaggcggagggccagctccggccgtcgggggcgttgggccgccgttcggctcgggggcctctcctccctgctctctctctcttcgggcagaatcccggcggtcgcaaatcgcgcgcatcagcaagggaaaaccgaccgacaataatgagcggcccctcggctcgcgtttgccttcaactccgacgaggagtgcggtgacgacggtgcagacgacagcgacggcaaggccggctacccgggcgcgtcggagtgagcccccaggcctccgccaatcttaatagcttttccttcttcttccgaggcattcgggcccccttcttgttataggctgatttaatctacaatcaaataaagaggaaatttttgtgtcaatttcatttgttctgtgtatgagacgaggatggtctgtgccacggtccttctgtgtcttggcttgaacaagggctcgtgcccaggtcccagcctcaaacggcgcgggtcaaggctagtgcctggggagatccacatgtcgagactggccaggccgggagcgtggtgaccgagggttatgggtgacccgattgtgggtttttgccgattcccccccggagttcaccacgccccggggcacggctcggttctgggccccgtttggcgattttagcctgacccgagcccccgagggtaggattgagcacgagtgacctatttcaagtcaagattcttcaaaaggaaacaaaagcacagacacagcctttaggaaatcgaaaatgcttttattgaaatacggaagagaaaaaagataagcccccggccaaccctgcacgcccgggggggtgcggggttggcccgagcccaagacctgacacccgatccccttttaggggtagaagcgacgaaggtgttcgatgttccacgggttaggcagctctgtgccgtcgcccgtggccagccgaacggagcccggccgggggacgccgatcactcgatacggaccctcccacattggtgagagcttgctcaatccagcacgcgtttggacgcggcgtaggacgaggtcgtcgacgcagagtgatcgggcccggacgtggcgctgatggtagcgccgcaggctctgctggtagcgcgcggctcgaagggccgcgcgccaccttcgctcttccaagtagccgaggtcagggagcgtcggcttccttctttttgtcgctcgcaggcctcccctttcgggtggccagcgaaacgccttcgacggcgaggacatgaccctcgtcgtcggaatgggccgacctcttcttcctcctcctgtcctgccgccctgaccgagcggcggacccgggggcggccgaagctgccacaccggaaccggaggggttccaagtccaggcctcctccttgcgagccactcggtccgcgagctgaaaaagctccgcggtagtctggggctctttggaggcgatcttttcgagcatgcggttgtgccgcacaccccccctgaacgcgtagatcaccgcgtgtgcagggatgcatggtatggtgttgcggacttgacagaaccgctgaatgtacgagcgaagtgactcatcatcccttcgctgtactacgtgcaagtccgcttcctcacctgggcgcggatatgtgccttgaaagttcatggtgaactgttggcacaaatcctcccaagagtggacagatgcgggtggcaagttcattagccaaccccgcgcctgtcctctcagggccatgggaaagaaattcgccatgaccctgtcgtcacccccggcggcctcgatcccggtcgtgtagacctggagaaactcggcggggttgacgctcccgtcatatttttcggcgatggtgggccggaaccttgggggccaacggacattccgaagactcgccacaaaggctctacagccgacaccaccaaccgggggtacggagggctgattcccgcgtccgtgttgaggtgacactctggacgaggaagcgccctccgttgcgtgggtagcacgtcggccattacgccgccgctcgatgctagtgcgggcgtccggccccccacgcagatcttcccgggtcgaaggagtcgacgaaggagtggtggggcgaggcgtgcgtcagaccgcctgtcgccacctaacccgcgatctgaccggtctgtgactggtcacagaccggataaatgagtgcactgcactgcgttacatgcggcgtgacgcgctcgtccaaaccgcaataaatgtggctaggtgagcgcagcggcgctcacctaacccatacacgcggcgcaaaacccacaaggggtcggggcgcctcggtcctcggggccgaggcgggagcggtccgaccccctcggggagacaaagaggagggcgaacacatcaccctcgggcccgacgccccccgagggtgccaggccacgtgggcgattgtgtctgcctcaagcctctagtcatgatactcccggtcccatgtcaccgacaacatcgattgcgatgatataagtctatatacaaacatgcatgactaaatttaatctacaataagagaaacaaaaataataaaatcagatagtgaatacctgtacagcgtagataaaatttattatttttgtttttcatatgtcgatcgaatttataccttttttttttcaagtgtcttatattattatagtctattttatcaaattttttgaaatttttatataactgtttaaattaacagcaatccggagataacaattactactactaagcagcagttaatgcctgaagcgaagcgaaagccagcaaatcgagcttgtcgaatcgaaggaaggagttggaggaagcaagcaaggcatcgaccggaccggaacgaacctgcgtgcggttgtcggagctagcgagcgcggatgccatgcgcgtggccatccgccgcgtccgcgcgctgatgcggtggaacggccccacgatctcctcctcctccccctccatcccggcaacggcgagcgaagagcggcggcggcggcggatggcgagagagatcctcgagcggagaggccgtggggagctttgcgtgcggacttgggctggtctgctgcttcggcccattaactaacctgcccaccgaggcccggctctccgcctgctcatgtgaagcaattgggctggtctgctggctcggttcggcccatcaaccagaccaagacgacgacgaagcaactgtttcgatctccataaatctcgcaactattacctgcatgcgcacaagatcgtgagcgtctccacatatggacaacgcggcgccgccgccgtcatctggagcggcggggaaggagatggccacggcggaggcgctaccggacgacctgctcgacgagatcctcctccgcctgccggcgcgttccatcctccggtgccgcgccgtctgcaaggcttggcgctcccgcacctcccacccctacttcctccgagcccacgccgcccgttccaggataatcgccgccgccgtggtggacactactgtaattcccgacggcgaagtctgcaccaccatcagcatcagatcttttggcgacggcgacggctaccgctcgggggcggccgtgtcgtcgtcgtcgtcgttcgcctcggtgcggttcgattcccggccttttgtcctcggctcctgggacggcgtcgtgtgcctggtgccccgtcctactgccggtttcgttcgccctcgcaatcccatcgaccgatacgtgctcgtcaatccgctcaccaaggcctgcaccagcgtgccgccgccggcaacccgcggcatcgtcatctgcggttacgcccacccgaccacgtcgcgctaccacctcctgcacgccgacagcttcttttcctacgacggtacggcgagggcgaccatccagattctgcgagtcggggagaagaacaacgtgtggcgcaagatcgcccgccaccctgcgcctgcgggcgtcgtggagtcgaggacctacattcgattgggcggcgctccacccgtcagcctccacggctgcctgcactggctggtcgccccgtcgtcggcacggcctctcctatcggtgttcgacatggaacgggaggagttccggcagatggacacccccgaacaatgggctcgccatgggaacctgccgcacatgatgagtgtacagatcgctcggcgctccggcaagctgtgcgcgttcgtccacgagccgagcgccagcgcgttggggatgtggatgctcgaggactactccgacccgagcagctggcggctggagcggaggatcgactactcgcgccacggcgccggcagccggaacgtcgcgcgcacgttccgcaacaagttctcggcggccaccaccgcggtggaggtgctacccgatggtgtcaacggcggcggcggcgaggaggagatcatgttccagttcttgatcaaccagttcgacatgagggaggctgtgtacaacgttgggcgcggggcgtggcggtggcgtaggattt

SEQ ID NO: 23163 - DNA, 2729 bp, Oryza sativa
ttgagcatggcgcgggggcggttggtccgcaaatttctgaagcccatcgacgtggacctcaacctccatgccggggcagcaaaaccgcgcgggggaggacctgggagcaagggatggggaggagggcggcggaagaaggggcttcctcggggatttgcttgacctgtacccgcgtagtgggaggcgatgatcgacgaacggcagcaagtagccggcggccatggccgactaggggcggtttcgttttctttccatgcgtggtttttccccttcgctttgactgcatatgggccgaaccatcgcgcttctggactggtcgaaagagggcggaggctagagaaaaccggcgctgccgtcagatgcgaaataaacggcgctcaagccttctacatccctctgacgtagaatcttgggaaactattctaatccctcgaggggatgttccctcgtttgctcaaaaaccatctaaatggttatgaaaaattctagaaaatttgacaacattcatacaacacatatatacaacttcacaaaatcgtaagtccaaactcaactcacacgttgagatataaaaaagacaaattcagcgtatgaatagtagcatactgtttatatctaaatttgtcttttttgtttctcggtgtgtagatcgaatttgaacatgaattttggtggactagtaggtatcattatgctctacattgtcattttttttagattttttcacaactatttgcatcgaatttaaaagaaaaaggtatacgaggggatatcccctcgagggattagaatccaccccctagaatcttctatgttagaggatctggttccggcattggaggggaagaagagactatttgcattgagattcgtactggatcagcctcgtagccgaagcgcgatgtgattctattcacatccaaattaatttcagaacactataaattaattaatacttctaaaactatttcacccggacacaactaagctaaggaagaacaagaaaactccactcctcattaacaatattgggtgcttggcaatggcatcactggtggagaaaccctttgtagtcccggttcgtaacccccctttagtcccggtttccaaaccgggagtaccaatccgggactaaagatcgctatctttagtcccgggtgaaataaccgggagtaaagatcgatctttagtcccggttggtgttaccaaccgggactaaagatcgagctgaccatttttttttgcatggccctgttgctgcatggtttatatatatatatagtttatatatatatatatatatatatatatatatatatatatatatatatatatatatataaaccatgcatatatatgtttcaatacatatatatgcatacatatatatatatgtatatatatatatattatattatattatatgtatatacatgcataatatatatgtatttatacacatatatatgttatgcaaattaatgcatatgtatatagatatatatatatgaccaaaatatatttacattatagaaaatgtgtacacatgcatatagaaacatatgtagtcatgtattaattacaatccattatatgtcctagctagctagctatcatttcgacgtagtagtactcgctgctagctcagaagctaaggaccggtgaattgtgtttccgtcgtagtagaattcacccttgggattaaggatttcttcgttgatgaatcccatgagttgttcttgaaccgccgtgataaattccttgtgtgtggtcaggttatccctcatgcgaataaactatatgaatgtatgaaattgattagtaattaaacaagaaatcgctacgtaatgaaattttgaatttatttgtacgtacatcgagctctcttgtggtgatgatttggtttgcaaggcagtggcaatactcgcacacgtaatagccgcacaagttatttccctgcttttgctttgcgcactacaaataaatgacaaacaacgagagatctaattaatatacacttgtatgtatttgaatcggagaaatataaatatagagcatgtgtactcacaggaaatttgaacttccgcctaagtctttctctccatttgccgcggaccaaatgacggaaccgataccaagccctacatggagtttaaagctatgattcgtagtagcaattaacataacaagattttcttaattaacaaaggaacttatgacggtacctgtctataagttcgaaaaccttgtcaaacgtagactcttttttatccattgagtcatatacgttgacggtgcaggcctccaggtcgaagagtaaaagcacccagtggaatctgcaatgtgcgtgggatgcattacatatgaaacacttagcaagttcgtacgggaatgaaatttggtatgtaggaagacagtaaaattaaactaactctgtgttgtatggcaacagtatgaacgtcttgtaatgctgcgccttcaggagatggacgagattgtcctctgtttcttgtggatattggtcgagcaatgcgacgtttactctccgagggtcgatgaatccagtatcgaaaaccctccgccgtcgggccctttgaatctccattctacaacgataaaagggagtatattattttctatagtctacttatatacaaggacctaatttattaaaggagacgtatagtaagaaatctaaccgaacgatatacttacaaaatccagcaact

SEQ ID NO: 23164 - DNA, 784 bp, Oryza sativa
tttcactccggcttttcgattggtgcgactctagcaattgatccgtagttagaccggtgtcagtaataaattgttctatcgtcatttctttaccggtaaccaacggctcgatctcctgttttggttgctctccaagctgagggactggtttggactttccagaagatgctttcttcagcgttcgctcatagtccgatagcttgatggcctccttgacagatgcagacatacccctgaagaagttcctgacactggggtctataggaatcttcttttctggacttcgaggcttgaattgtctcttgacttctgatgcaacgtaagcgtcaagctcctcttgcgtgcaatcgtaccccgggtccttgttcttgtcggcgtcaactttcgccttcttcgttgcccttgtgtgggcaggcggtgcagctgggggggcccttgactttgaaggtgccggaagaggagcttgcgggggagtaggtgtaggagcacgaggaggagtcggtgcaggatcctgaggaggagtcgatgctggagcctgaggtggagacggtgctggcggagcatgaggaggagacggtgcaggatcatgaggaggagatggcggagccggaggagatggtgcacgagacgccgcttgtcgcccagggaggatgatgtacgcctgcgccatagaataatggcatggcttgtgtctcgtagatgcgtctcaccgtctcctccagggtaatccagctcgaggtcctcgtacgcgccttcgaccaactcaacttcaaccttcgagtat

SEQ ID NO: 23165 - DNA, 2680 bp, Oryza sativa
actccggggagcttgatgaaggggcttattcggtctggtgggggtgacgcgacccctgcggagggagatcaggtcagagcattgtgtctcttgttttccgttgctaggctgtggctgtgcgattgccaattgtgcttacaagttgcaaaccgaacaaggattgtttcatctcacaaaattaggatcgttcatcagtgaataaacggaggcagtatatgttgtgcacatgatgttatggtattgcctggcattggacatatagtatgtaattggaaacaagaaaagctaagcaaattcaattaaagagcgagcatctagtaggcgatttcgtagtaatcaacaaatcgtacaatgacttaaggctgttcttgtaggctgcaagttttgattaccaccagtgttctgcattgggtttttaaatgaattttccagtgagaactgtttcaagttttacattaaccatagaaagtttttttccttgatggaattctatatgttggaattctaagtggctctatttgcctgcaatcaaaacttgcacctgttcaacacaaacgggtcaatttgaactgaccatgtatggataagcttctcatctcagagtatgtcagttgactattgtagcgactacactgcaaatgtgttattgtttctggaagcgactcaccaagctctgcttggatcattgttttgcttatgatttttctaaaatgaggatcacatttctggtttcaagttttaatggggatcacatttctggtttcaagttttgagatgtggaacaatcaatctactgcaaaagaaatataaccttcttgatactgcactgctgtctaaccctcataatagctatgttgacctttcattgggtgatatctgacttcatctgtagcctgtagggaactgaggggcctctgggtggtcatgtttttgctcattcaaatcgttttgcaggttatagttcattgcacgactcggacaatagatggcatcattgtcaattctacaagaagggagcatggaggtgattatcaacttcttttcacttttcagctcttttgactgtcaagtgcttacgtggtgtgtattttgtttctgaacaccaatatgtcatgaggatatttctgacttgataaattcgtatctgctttatgtgtatatataatgtgtcatgtgtggatagtggttccgtgttcacaagttctaaatagctgcgaatatattgtttcttaaattgaacatctttatatgctggtatcctatttagtggttttaatcagggatggggcatagattaaggtaactgggctatggttccccctagtctttgaactatttgcattagtactaaactactaatgaatatgtaaagttgaacatgcccatccacccggtttactctagactcactgtctgcatgttctttggaattgaccaaattaactagtggttagtactgcctactagcaaggctgagccttgttcatggacggttcattctgtgtgtgcaatagaaaagctgaacaatatttattttttgtttgctaatcatcccaaaaagttttcaggaatattcttatctttcaattaactgttacatgaatttgtcattactcattatgagcaatattattgtttcatttgtatcagtaatcagctcgtctcctggagttctgaagttctaaaccatcttctgttttactgttacaataggtaaaggggtcccgctcaggtttgtcttggggaagagcaaaatgatccttggctttgctgaaggctttccaacaatgctgatgggtgaaattgcgatggtatttctatacagctagtttaaaccagtgggtcaaaagaacaacaacattctaacaatgagccattactcttcttttgggtgtaacaattaaaaatgtacaggtcgtactacgcaaatatttatcattctctcatagtatcttttcgcagttcaaaatgaagcctcagatacactatgcagaggaggattgtccagttacagctcctgacggctttccaaaagatgatgaacttcaatttgagattgagatgttggatttcttcaaagccaaagttagtcttgttgaataatggcttcagtgtgacttaaatccttaaattgctgtatatttgagagctattctgtgcaagctgttaggacaaattctcatgagctttgatttcatttttaataatttctttctggtacagtatggattctagaatattagccaaatgtttgactagaaccttgtgtccaagatagcagacgcttactacatctttttttttttcggacacgcaggagatcacttactacatctatcaccatgtgttataaagtgtttcatatttcacttcataacccaaacaatacttgtggtttctgattctttagcatctatgctgttgttcaggaatatatctcctcaagtacagcaccactataatgcatatatcataagaaaatgtttgacaacaatattgatttatttcatctttatgttcgtgaataatattcatctggcatcgtgcctgcttgttgtgatgtatctcagattataccataagtttgaagcctaaaattcaaaaaagcaaaatgtatctttgcataaaaaagtggcagatcaacccaatactgcatatacacatgttcttagaatgcagc

SEQ ID NO: 23166 - DNA, 561 bp, Oryza sativa
attcctgcagcccaaactgacaagtaggaggtgctggttgttatttctggactagcattctcctaaaatctgttcccatttcttataaagttaaagcttcctggtgaatctgcattacaaaaatgaggacttaaataaacttaaagaacgatgaacaagtatgcattcacctttaaatattgtacatgataataatggcaactcccagtagggtttcaggtgacagttctatatacttattgccctctctgtacagacatttttcctctgagaaaagggtggaaaaatgactttgctagcattctacagctatatatgcacctcattacatatatcttggtgttcatgtatacttctcatacttccaattaaataagagtacctttgaacattttcataggtacctgaaggatttgaaatgtgcgttcgactaatgcttcctggtgaaaaatctattgtgacctgccctccagattttgcatacgataaatttccaaggttgtatgtggctttacattagaatcttttttcttgtaatatagcgtgctgaataatctaatg

SEQ ID NO: 23167 - DNA, 1072 bp, Oryza sativa
cggtgacgattgaccctagcatcctcctatcaaatgaagacaccccttactcacgcagcgatcacaaggagggaacaatagtgaggagaaagtacgtgcggtcaaccgtcaccgccgatgtaatgccgtaattattgtgtacacgatgtaaactattttggatgtattgattatccatataaatcaattgatgtatggcatatgttaattacgcacgattattagaggtttcaacaagttcaaatcatgtatatgctagttatatgtgatacttacaatttttaaaagttttaaatcacacaggtggcaatttcatatgtacgttaattagagtttttaacatttaatttactagcattcatatgctaattataattgactattgtatttttaaaagttttaaatcacgcaagtggcaattttatatgttaattagagtttttaacatttaatttactatcattcatatgctaattataattgactggagaatttttaaaagtattaaatttaatatatttttaaaactatcattcatatattagagtttttcacaatttaatttactatctttcatatgctacttatatatgactattcgaatttttaaaaggtttaaatcatgcatgtggcatttacatatgttaattagagtttttagcatttaatttaatataattcctacgctaagtatatatgatgattacaatttttattaattttaaatcatgcagtatgtacatacatatcttaattagagtttttaccaatataataatatcattcatatatatgctaagtatatatatatatattggaatttttattaattataagtcatatatttgcttattacgatttatccacttaatttattacagacaaaaataatttttcgaagtaattgtcattaatctttagtactttaaataatgttaatgcattaacttctattttataaacacatatgtaagagaaaatcatatgcagtgctataatctttagtcccggttcttaaccctaaccgggtttaaaaagaatttcgaaatagcgggaaaagatatttactccc

SEQ ID NO: 23168 - DNA, 1484 bp, Oryza sativa
atatatgtatatatatatatatatatatgtatatatatatatatatatatatgtatatatatatatatgtatatgttacttcgcatttgactatatacatctttttgtatcttgcagaaaagacgtgttgtcggagtcgtccgtcaagcctgagtggaagagctagccctagaaggaattggagcaggcaagtgacgtaataatataaatgattgttatatttgtaatgcaattaattaagattattagccctgtaattagacttatcatataagattgtgtagtgttctaatattatttgagttttaatataagattactttatttgtaattagacttagtatgtaattattgactacggaagtggtgcgacaagtagcaattgactattgtagtcttaattagacttagcatatacgcacgaaacacttagcatacatgactattttagtcttagcatgtaatattatttgaatatatatataagattactttatttgtaattagacttagtatataattatttactacggaaatggtgcgacaagtagcaattgactattgttgtcttaattagacttagcatatatgcacgaaacacttagcatacatgactattttagtcttagcatgtaatattatttgagttttaatataagattactttatttgtaattagacttagtatataattatttactagctagggttgtataatatacgtcacctagacttagcttatatcacgatttgtaattagacttagcacgtaagtttgtgtagggttctaatgtacgacatttacacttagcatacatgacttagattgttaaaacataaatgtctcgtgacttagcagatgtttcttgtatcaacagatggctgaccgcgatgaggaacagatattgtacgatacaatcgcggagggaagcagccagtactggaatgaagaagaggggaacgaggatccaaaccagtacttgaacgaggaagggaacgtggagagggatgcggaggggaaccagcaggggcacgtggaaagggatgtggaggggaaccaggaggaggaggctagtggtagtcaaccctccgttggacagaagagggcacgcgggcaacgaggtgcagcgaagaagcttgagggtcggcacatcataacggaagtggaagaagatggacgtcctagtgccccggccgaagccgccaagaactatgtacgtcacagcggttgggttgtgcgggataacgtgcctgtcagtacggtgtactggcgaagaacaagggcacgaggagatcatgagagctttgtccgggattcggataaagagatgctgtggaccacaatgctcgagacattcacccttcctgcgggtacagaggacaaagtgaaaaggtggactctgaagaaaatggcagaacagtttcagagcttcaagggagatctgtacaagaagtatatactgaaggggcagacaccgaacttc

SEQ ID NO: 23169 - DNA, 37442 bp, Oryza sativa
tatgcccttaaaatttgattttgatcccttccatacccctctcgtcagttgaccgtctaatgtctataaaaatgaccatgttaccctttggatgaacatacaaatttatgaattacattattgaaaatgtaaaagattgacacatgagactataatagttatgagtttgttgtgcgatatattatttatgacaaaattatttttagataatgaaataaaaaaatatgtatttattttatttaggagcattcatacaaagataggactaccaatgctcaccatatatttttatgaatgctcttgataaaaaaaatccattgtcctattgaaatttcaaataaaagttttaatttattaaatttgttttactttcaaaatttatgtcaaatttttttgcactaattatttagtgtcattagtttcataaaatgcacatattgtgcactcaaacaaaattttcaatcgtttttcaagcttatattcaaatctaaatcatcaagggtataaaagatattttcaaccaaacttaaaagtgaaatgaaggaaaatgtaccggcaggggcatggaaaggatcaaattgaaatttcaaaggtacaaaagggatttaaatttcaggaggttgaaagggattggatgagttttcaagagtataaagagaatttactctattgtttatattgatgtataatgaaatatttcagtgccttctatggccttacttagattaaatatgtggatgggaattgggaaatattgggaaaacacactatctttcatccctaaactttttaatcgggtttgttaaaactatgatgccacattttcacataatttcagtcactttttctctatgtgattgcgctctctccgatatgtaactatgcttatatctcttgtatcttctcttccaaatatataataaatcacttttaatcctaatcatgaattctcttaattatacattgtatattagaaaaactctaatgtatatatattataaattacagtgtaaagttttaactttatattgttattataacgtgagtgtaggtaatttaaagtgtaaaaacgatttgattatttttttaaaaaataaaatgtggcaccataaatataagtgctcccattttattagttaggttaatttgttgtcaaagctaatgctgtccctttaacaattaatggaaaagtttacatatcagtcagaatttctcctaacattaataacaagtgtgatccttgtggtatctccgtagtgtccgtaagaaagttattttattatattcaaacatgatacaatataatggtacataagcctcatttgacttgaaatgaaatcagtggaaaagaaagaataaacagacaagatgcagcagttaacgatagaacatagatatgcatgaataaattaattaaacatgcatgctcgtaaatttgtatgagctagtgattgacagcccggcagttcctcctgatctcgccattgccgccggtcttcacctcgatgctggccatcttcaccatggccttcgtgaacctatcctcccaccacccggggatgttggcattgtccaccaccatcttcgccgtcgccggcgacgccaggagcgacgcgtcggaggtgaagagcaccctgtgcgcgagcacgttcttgtagtactggttgtccagcttgttgggcgtcacgacgtcctgcaccaccgtggggtcgttgcctgagctcggcttcgccgggcactgcgtcctcagcatggcggcgagcgggggctccatgtcggaggggacggcgaggcggtcggggacgaaggacgagcagtgggagtcgccgacggtgtgggcgccggagagcaccaccatgtcctccatgccgagccccttggtggcgaagttggcgacgagctggccgaggttgaacttgggcggcgggaggaagtcgagggcgcgcgacgcgttggagtagcgcccgtcgaggcgccccgcgggcatctggaacgcgaccctgctgttgctgaggaagaaggaggcgtcgcgcgcggcgaaggcgacgatgtcggcgcaggagacgacgcccgggcaggccgcctcgacggccgccttggcggcgtcgatcacctcgtaaccgcggaggctgggcatgttgggcgggctgagcttctccggctgcgggttcgccggcgtcgggtcgagcagcacggacgcatcacatccctgcacattttcggcattggcggtgtaaacgtgtcatgcatccacggccacaaagctgagaaactcgtaattatatgtgggttcaatcccgttttcggtccaaaattcgaaacaaaatgtagtcaaatttaaacaaatattatcagaattcaagaaaaaataaaaataaataaaaatttcatgcaaaataatatcatatcagagggtacgaaatgaccgaaatttcgaaaatttcagttcgaaatgtcgaagccttaattgtataccactccgcccgtttcatactattataattcgttttgattttataaattaaatattcttaaaagtttatcaaatttatagaaaaatgtagtactatttttaatataaaacaaatacattattaaaatatattcgatggttagtactttcgtgctttacaaattgtcgaatttttctataaattataatataaaataaaacaagtatagtacacatgcatatatatatatatatatatatatatatatatatatatatatatatatatataggaatgtacctcaacgaagcagtcatggaagagcatgcggatgaggccagcgccgacgccggggttgtggaggatggcggcgccgacgacgttcttgacgatttcctcggcatgcgggcacttggcgtagtagtaaccgaccttgagcccgcacgaagcagggttgggtggcccgtaagctgcttggcacgtcgtcgtcaccgccgccatgagcaccgcgaaggtgacgacgaccacggtggcagcgagcttattaccactacccatggcaattaaccagcttagctagctagcttaattggcttctcttgctcttcttctgatcagtggctactgagagagtgagctgagatagctagctagctagtgagatttgcttgatggattgcgatggttgaggtgatgaagtgatgctgatgtgcacgagtatttataggtgaagatgagctccagcctccaggtaagatgagatcaggggagcgttcggttgatagatagcttctggatcgcaagcttttttaatcttggagcggatgcatgttggcaaagggtaaggtggtggcaggagaccgcgcaatatgcgcgtacgtttgtttgttgcagcacaagtgtgtacaactctgcggtttgacccgcgacgttggttggctcgctaaaccacgtgctattcggaatcgttcctctaatccgagcttataacgggcaattaactggacaaaaagcgtagtgatggacataagcatgctttccagagcgagcgagctagctagctagtcagggaatgcaagtcaaactaagtctctcccaaacaccttttgtgctctgcagttaagatgtgagtttaattattactatttcattgaaatggttaggtagcaaagcttgcgtggcggatcaatcaacctacaaatggccttaaattatctagtatttagctagctccatacacaagattgtatagagtatggttataaaaagtagctagcttgtacagagcaataaccggatgggtcaccgtagttcttcttcctcctccttttcactgatattttttttacctctagctagttgcacatccatgcattttgcacaacggatcaaattaacatctctattaaaaaccaatatatttattgaacgacgaggtcaaacaaaaagatcgataacttccttcgaatataagatagatagcaatcaaggacaagctaacacataatattctagttaaatcctctatgatataattgcatggggttgacaaaatcatcgcacaacgggttgacaattgaagtagtgaatttatctttcactaatatataattaattatatacttacttcagtaaataaaaataattcacaaacttaatcaattattttaggagcatcaaatgtttgatattacagttcaaggggtaaatccttgtatcacgttagttgaggggtaaatcggacttaatcctttatttgaataagacaaataacaaactatcatatctaaatatcaacatcgttgtatatcaaatggacaaataccaaatttaataacgccatataaaaagtatagtccccgaagaaaaaacggagggagtactcagcaagcattattgaaataaagcatatgcgcgtatacttatgcacggcaggtactagctagtgtcagacaatgtctcttaagcagttgattatgcgttgcagctagggatgaacctggttcggataggttccgtccgtccggaccatttttcggattcagatagtttcggtcggaattatccggaaattttcagattcggaaacgaattcggatgttttttctcggaaacgaaaacgaatacattaagagtactatccgtcggaatcggaaaacggtcggaaactatccggatttttttccggatatccgtacacattgagcaaattttagaaagaacatgtatatacgtatatatgtataactttttcatatggaatcagatgaagacaaactttatatcaacattgtagagctcgatgagatctataactttattattgactattttattatttgaggtcatttaagggtctaaatattcattataatataccatattaatttttacaaaatctcagatctacaattcaaacgacatctgatggagatgtgttccatatcaaaattgtagagcacaatgggatctaccactttgtagtttataacatttgtatttaaaagtatttaaagtataatacaaatattacaagtttcgaagacgtgaagtaaaataaataacatctccaatttatacactggtaagtaagttatacatctaataaacggtcttgggaatagaaaatgataatcatatttgcatatggatctcttagaggaacagccatgaaaatcgattttcacatacagttgtgggaccgtctacaaaattgacgatataaatgttagagatgttgaactaaaataataagcgatatctcttcatttatcaagaaactcaatttgaggggttttttatatgccggtaaatattcgctaccgcatttgttccgtctcgtattcgctccgtatctgtattcgataatattcgatttcatttccgtatccgagttttcgattccgattctgattccaaaaaaaatatgaaaacgagtatgataaaactagtttccgtccgtttccgatccgttttcatccctagttgcagctggattaattatgataggtcagggttacgtgatgaaaagttctctcggcaagtgggcagaaattaacaaattcttttcagaatatgtagaaggagtgaaaaccttgactagctcttagtaattaacaaatacagcaggttttattactgattaataacagcactagctcttgttcaagcaactgctaaaaaaaggaaaaatctaccaactagctggtgcgcatatcaaactaaaaagttcattgtattagattgattgaaatagcttcatcatccagtccaccaatatatactccctcttttttttaacatcatatatatactccctccgtttcgttttatttgacaccgttgactttttagcacatatttgactgttcgctttattcaaaaacttttgtgaaatatgtaaaactatacgtatgcataaaagtatatttaacaatgaatcaaatgataggaaaagaattaataattatttaaatttttttaataagacgagtggtcaaacatgtgctaaaaagtcaacggtatcaaataaaacgaaacggagggagtataaaggagggagtacaatggtgttgctactttatttttatatgtaagtcaacatttttttggcagcatatcgagaatctgtgcatggcggaagcttcgttcaagcctgcattttaattcagaattgctatatttgtgtcgccacaaatttgttagttttatagtcacatctcatacgaccatccatgttttgctaatattttgcagtcgattatcttcaagatttgttatagtatttgctttcacttagagattaaactatatcactggtggataaattattcatactaattatattgtacttacactataattacatactgattacatatgtaaatttgggacttacatatgtaattttgagacttacatatgtaaattttggacttacattgtaaatacgctaaaattacatatgtaatttaggaacttacaatataaatacatgcccactattttttgtgaaaaatatgacgccataaatatagttacccttgccacgttaaatgcataattgacaaatgctggataaaaattggtatatatacagatagagatatatcacctaaaagctcattgtactctagtcaaataaaatcacccatcctatcatttgtgaggtttcctcctattcttagaaaactatatataattcctacatttgaaaggtggaaaattaaactaaaccgcttgacatcattagaagataaattcacaattggcaatagagagattttttagtacttaagatactcccttcgtttcaaaatatttgacaccgttggctttttagcacatatttgaccgttcgtcttattaaaaaaatttgtgaaatatgtaaaactatatgtgtacataaaaaatttgtgaatcaaatgatatgaaaagaataaataattacttaaattttttgaataagatgaatgatcaaatacgtactaaaaagtcaacgatgtcaaacattttgaaatggagggagtatatagctatacatacctcacagtgttagttaagttaggaggtgtttatatctgccccagaagggatatacctactcccccacaaaaaggggaaagttaagatcatatataaaagatgagttttcaatattattctaatcggattagattagttttggtaactccctttatttagaggtatcttctgtatgaggaggtatacaaatacaactatcctaagataggagaaaacctcaccactaattaatacatagtttttaagtttaggacttccaacaccgtatgttaacgacgggaagggaaaggtattttttttcataataaaatctatcaaatgtcattgtagaagtataagggagatttcaaggataagattgagaaatacacatagagtgccaaaggaaaaaacaaaaagctacatcagtggctcaggaaggagtaaggggtgcccacaatatgatgggactagaatatctacaatgcttctttccaatcgcgtagtagtacaactacattataaacacctatatatatagtgggaagataaggatatgatacaattggctcatgttctgcaacaaggatagaagactcaaactaacagttcacaatgcaaaaaagaaacacggctctcactagctgcagtttggcaaattggcacatgccaccatcatggacgacaggacgacggtgcacaaaatatagtaatatgaacaactttagacgaaaatgtaagcaccgttaggactggccacaggacaaaagtataagcaactatatatctaattaattaagcagcaacagaaatcttgaaaacgacttttcattagagggatgcatcaaattaaaggctcaaactagtaatgctagagcaattcttttgttatcaaactagctattcgtgcccggtagccaaatacctccaactcaaccaacgaaacaagctagctgccacttggcagcattaacctctcccattacatccattaatacatagagtatgttaactaatttaaaattatttcctattgctatccgctttgagtagttgttttgttggtaacgtggaaaggtgtcttgacatcaaatcgcaccgtcacacttttagtacgtcatgtgcaacccgcggcggtacccggagatgcgttgccgcagggacttcacttggcattttgctactactgtaatccaagatcaatttgatccctcgaggctcaaattgcacaagaacaatgttgaataatgttaccaagcggaacaatgccactgtcattatgacttccacgtgtagatcaagagggagaagtcatcgccatgctgcatctcggtctccttggggttcaccctatccatgacgatcgagccgctggcccacaacaccattgatgaggccacgaatcctaacaaggaggagctcgtgttgtcgtcgtcccttgtcaaccaccgcctagatatggacgtttgctcaagatcgacgtcgtagatgccatcaccgagcgttggttgtcatcgccaccaccatctcagagccacaaacctagttaccatcacaaccaagagtcggggtcgcagagccatcgctgaggacagctggtgtcgtcgaaaagcaacccttgttattgccgccgctagatctggcggtcatgaatcacaccaacagtaaccttccctgtgtcgtcatgtaactccttgtcatcctctcgggcgtcatccgctcgggccaactggattcaccagcgaggaggtcggggtcaccaaatctagcggccttggcctcctcgttggctgatgcggtagcggttcgcgacagtagtgcaacgcatctcggtgacgatggaggaagtgtcagatgaagggagtgagagaggcagaggggcatggaaggaggtagatgaggtgatcgagggagccaagggagcgagggtttggttggcggtgggacttttgaataccgcagaaaagatttcgcgagtggtgctcttagatactgccaataaaaaccaattttcgttgggctctcatgaggttcgcccaaaaaaatagagctattttttttagtgggacctcctaagtgagtttttcgctgacggcttgtgacccagaatccgccaatacatttttacaagcatttatttcattagtccatcaataaaaataatagggtgatgccatgaaaaatcaattttttatagtgctcgagcatttgtttatataaggtaatcaacaaattagtaaagcttagtggagtttttgggtttacagcgtcaaacttaatttcaccgacaccgtaagtttgttagatatgcttgtacgtactccctatggctacaataatactgtgctaaaaaataatttgaagtgttctttagttcttgaagaggcttaaggtattactgctttaattagtgctaacaaattaaacttgctttccttcaagcggtatagatatttcctcaaggaagtgaaaatgaaacggaattgctagattactttcgacggatttttagggaaactttcgacttttagaccgtcatatttgctctaagattcgtgctagcaaggatgagaaaaaataaattggtaagcacaattgttgggatttgacctcgcggccttcagtttgtggagggagtgcactgcaatcgcgccatacatgttttattctagttacatataaattatatatgcatctagttatattgtagttatatatatgagttgtaatgtagttatactatagttatattttaaagttttacaaccaaaaaaactctcgataatttttaagatagtcgcaaaatgaaataactactccctttgttttcaaatatagaatatcattgacttttaatatatatatatatatatatttgaccgtaccattcttttactcaatgtaaatatacaaaactatatgccatacttaaagtacctttactagatgaacatatcacaaaaaagttaaataataatagaagaaataataaccattcatctttatttacatagtaaattaataagatgaatggtcgtatgcttaaaagtaaacagtaacacatttaaaaaatacagtaaaaaatacagagggagtacttgggttgacggtaagtagccagccaattgaccctatatatggtagttctagtaagctgtttttcttttaaaaggatatgatgacatatacccatttcatagatgccaactgcaaagccatcaaaattttgttgaaaaatggtaaaatagatcaaaatatgatatttcactatctacaaatattcaagttaaaattcgacacatataagtagaaacaaaaataacaaatctcaaccgtaaatagtacacaatttcttaattatcatcattttttgttatgtttgtttctgtttgttgtgtaggtcaaatttaaacaagcatgtttgtgaagcgatatatgatatattgatctattttactattttttatgagtatttagttgatatacataaaaagagtgtgtatgcatgatcggctttcccctaacatacaactatatgaattgtgtgttataataatctatctatctattatattattaaaacagctttgaaagaagtcgccacgttcgctgtgagggctagaaatttccacattaatcggagaaaaagaaaaagagagtcgaagtagaaatacaattaaaaatagctgaaattcggaattaaaaataagcaatattgaaagaagtgtccatataagaacccaatacgagattaatcaaaattcaaaataaaaataaaataaaatccaaaattagaaaataaaacgagagagtcctagtaggaatataatttaaaaataactgaaattcggaattagaaaaaggaatattgagagaagagtccatataagaacccaatacgagattagttactattcggaataaaaataaaaataaaatccgaaattagcaaaaagaaaaaaaagagttcaagtaggaatacaatttaaaattaactgaaattcggaattaaaaataagcaatattgaatgaagaatccatataacaatccaatacgaaattaattaaaattcagaataaaaaaataaaaaatatcaaaaattagaaaaactaaaagagagttcaagtagaaatacaattttgaaacgaccaaaattcaaaaataaaaaataaaaatattaaaagaatactatacggtattaaataaaagtttaaaaaattaaattctgaaattagaaaaagaaaaaagatttcaattaggaatacaatttataaacaactaaaattggtgataaaaataaagactattgaaaaaaaaagactatctaaaacacacgatgagataaattaaataacaagcctataaaagagtagagtggtggcggttgatacgacatataaaaactattagtaaaacaacagatagaatcctaatgatgattaaaaggagggacgacaggcaagccgtgaagcaaacgggcaaggcggttgccgggacttctagaaagtaaaaaaaataaaccttattgataatcatatttgatttttaaaatctcaatgacaataaaaaggagaagcagcgggtggggtgtataggagtatagttgcagagctgctgacggttggcgggacttctagaaaataaaaaatgaattccaatgatagttatatttgatttttagaatcccaatggcaataaagagtagacggcggatgggtcgtagaggagtatagtggcattgtttgacgtgacttctaaaaattataagaaataaaagccaataagataataaattctaaaaactacaaggtccaatttttaaaggttcggaacttctaaaaagtaaaaaaaaaaaacccaatgataatcatgttcgattttaaaatctcaatgacaaatgacaataaagaaggtagacagcggacgagtcataaagtacaatggaaaagccgctgacggtttggcgggacttatagaaagtgaaaaatgaactcaaacgataattatattcgatttgtaaaatcccaatgacaaaagagaaaagacagtggacggaccgtagaggagtataatggcagcgtttgacgggacttccagatattataaaaacgaaacccaacgagataatgaactcaaaaaactataagatccaattttgaaacgtttcaagaagaatgaatagaaatagtgatagaccaagcaagcaaataaagaaggatatgatagaagtaaggggtagcagctagtgtgacttttaaaaactacataattaggaatacgggtatagctatttaataaattttaagtaaaatcatactgaaagatatatgattttgtttgggtgctagccgcgcaattgtgcgggccacccatctagtttgaataagagaataaatgaaagtcatgcactcacacatctatatcattacatccatgggtatctcgagccatcctagatttttctcttttcaaatttcagataaacatcaatatatagcgggcacttgttgcaaaaaacttaacttacaattattccaagtacatatgaccttattacacaattaggtcaaaacaaagaaatccatagcatgtaaaccttggggttcacaaatgaggaattaaggaatggtaacaaaagagggagaacataaatgtgaagcaaaagtcacatccaatcataacatcatcaacacgtacgcttgcgacttgatcaaggagggtgtgaaactatcaaaccgtgtacgtcgtcatcgttgagcacgtacttcaccaggtaattgaatcacgcagctaaacttgtagattaatcagtagttgatgaccctgcagttcttcctgatctgcccctggtacccggtcttcacctggatgctcgccaacttcaccatggccgccttgaacctgtcctcccaccacccggggatgacggcgttgtccaccaccatcttcgccgtctccggcgacgtcaggagcgccgcgtcagaggtgaagagcaccttgtggtcgagcacgttcttgtagtactggttgtccagcgtgttgggcgtcacgaagtccagcatcaccgtgggatcgttgccgccgggcgtcgcgtcgagcgggcactgcgacctgaggaaccaggcgaagccgccgtcgatgtcggagaagacggaggcgttgaggcggtcggggacgaaggaggagcagtgggagcggccgacggtgtgggcgcccgagagcaccaccatgtcctccacggagaggcccttgacggcgaagctggagacgaggtcgctgaggttggacgtcggcggcgggaggaagtcgatcgggccggagtcgttggagaaggtcccgtcgcggcggcccgacggcatgtcgaagtagaccttcccgccgctgaggaagtaggtggcgtcgcgcgccgcgaaggcgatgatgtcggcgcacgagacgacgcccgggcacgccgcctccacggcgtgcttgatcgcgtcgatgaggtcgaagccccgcatggacgggttgttcggcgcgctcagcttctctggcgtcgggttgaacggcgtcgggtccaggaggatcgaagcatcacaaccctaacaacaaaacaccatgcacatctaagtacacatagctcaagtcgatcaatcgatctcgccggagaagaggaagaagctaacgtacgcacctcgacaaagcagtcgtggaagagcatgcggatgacggcggcgccattgccggggttctggcggacggcctccccgacgacggccttgacgacggcctcggcctggggcacttgtcgcggtagtacgccaactccagtggccagtaagggtgagcctggcatgccacggccagcagcagcagcagggcacacgtcaccaatggcagacttggtgatgaagccatggctaataagcttgcttagtgtgtagctagcttaagcttactgtaccttttgtgcttaagctaattaaactggttttgcttataaccggaagaaaaaaaagtgcttcaagaacaaggctgataaccttaaggttaaaattggggttaatgaaaccattccccttgggcctgccttgccaattaaaagtttaaccagagtaatttacatggttgtacataaattatgcatagtgtacaacgattccctgttagctgcgatagttttagcgtgttaatagctacatgtttgaacagtagctattttcattttttttatttttatcgtttaccttttagtttggtgttctattgttttccaatgtgaagctgaacgattgggattttttgttagacacaaaatgttgtcacatgttggtgttatctcttttaggtgaatcagtactcttcttcacacgccacacatgtccagcctatttaggccctgtttctttcagcttgggattattataatctagattattgagagtaagctgaaagaaacagacaacttattgaagtagcttattataatctggagtccagcttattataatctgataagctcatttaggtgagcttttttcagattattgggtgaaaaattacccaccatgccaccccactccctttttagacttgcaaacccaataatctaggctctaataatctaggaaagaaacaactaaccgcttagaccctctttgtttaggcttaggcttattggcctagacttttaagtcagcttattggcttatatgatttataagccggtggatttaatgtcctaagtttagtagttgagtcatacatctacctcacataagccaaaaaagcttctctaacctagcttttggcttaatagtgttagagtggcttatggcttcaaaaaagccaaacggaaaagctgcttgtttgtttagacttagacttttcgacttataagttggcttataaacctaaacaaagagggccttattctactacagattataacaatataacttatagtaatctggctcaataatttagattataataatcccaagctgaaagaaacagagccttaatttcatccaaacctttcggtcaaaatatcttcttcttcgataatagaaaattcaggaaaaataaataaggcattaagtgacaaacagaacaacctcaaattaagttttgctaaaatctgaaatccaaacgattgaacagcacctaaatttgaagtagttaaggctgttgttaattatatacattgcaccaatatggacagtgcaggttcactgacccttgacagagatatggggtagcacgttgactatgctggttcggtgcatacatgaagaggtcgtatactcgtatattccagctactagtagttcttaattaagaaaaagagttaattaacaattagaagagatagatgtcccgtgtttcttctctctttacttttctatttgatatgtgcacttcagtctaccggttgcagatggcgatggatcttctcacggtcgttaagatgtcaggatcgttaattagaacgtttcgtctgacagacatcatcagagcacgcgctcaaggaattaacccgcttcatcatatgctggttatattttatatattagttcatctatctatccatttatctattatatactaaaagtttattaaactccctacaaatactctcaagctatcacgtagcactaccagagcttgtgaagctgccgtgtgcctcaccctgttaccgggagtttttgctagtactcggtgacttaccgagagtagcacgttgcacccggtaacattgcaaacataccgtgtgttagcgacgaaaaaaactcgggaagataaaaatacgctatgcaatgccaaaccgcttggtaaccatgggatccaccgtttctaccgtggcttggcgaggattttttttgcttggcgggcggtgatttccgttggcgcaggtggatggcgcgcggtgttttttttttggcacggggtgttttttttgttgacgacgcgtgaaatttctattggcggggccggggtggacggcgcgtgaaatttctttggcgctcgacgatttccgttggcgcaggcggatgacgcgccacgatttttggctgcacagtaaattttcgagtgggctagtaaaaagttggcccaaatagaaccacaaaaccctacccctaaactactcccccttctcttctccagtctccccctccgccgccgcctcgctctcctctcatcgcctcctcacatttcccctctctgccggccttgtcgcaggcagccatcccaaccatgcgaccgcgcgtccctatcctcatcccttcacacggctggcgagcacggccctgcatgtccacgtccatccattgcgatttatacgccattgtctagctgttcaacaaggcgcccaatcatcatcgagctgggtattgaggcctgctgcaactgcttcctcccaatctgtgtggtatgcgtatgttgagtggttcttgcatctttatgcaaatatagttcttgattttggaaaaatacacttcattttctctttggatctagtaatatggtgacatcctaatgggcgctatgctgcatccaggtccacgacgccgtgacgcgccccatccagttggaggctgcagctggtgctgtgcatcccctttcctcccggagggacgcaacatttttcaggttgtactgatttctctatgtgcctgcaattttaatttacatgagagatgctctgagcggcacaactagcagcacaggaatgttgcggcggcagcagtcgcgaggcttgtcgaccggctcagggagttgctatgagcagagcaaagagaaagaatgcacaactctggtttcttaacagcaaagaaggatgtaattcttttcctcttttattttctgttgcttaatctttggttaagtgtttccccggtcgccaagtttagaaattgtggttagaaatttcttgttctgtagtgcacatatgtacttcaattatcacaagtgaagtttctgaattctagctcatcctatttcttagttaatactcaattattatttctctgtcatcaaaagaacacagttgagataatttacaactaaaaaaatattattacagaaaaaagaatagtttatttttcacccatatcagaggcttacattctagatgaaatcttaaatttcacatccatatactttggcctagtttagttcccaactttttcttcaaacttccaacttttccatcacatcaaaactttccttcacacataaacttctaacttttttcttcaaacttccaattttagtcaaacttccaatcctttgttgattgagtgcggacaatgcataatcatgtccctcgatacaaatgtcactacttagcctactggtggctgtagaccatgcatatcctcatatcatattaggaaatctagctagcttcagttctgaaactctagaatagtaatgcaaaccaattaattacttgataactttagttctgaaactcaatattttcataataaacagtgccttggtcaagaacttgacaatgattttgagaaggttgccactagcaggaatactgaagaaatttgcaatgacaaggacttgaagattattctcaatgaatcttctattcaacatgatgacaatgactgcaaaatcctactgttctgattcatccatagaaatatcttgtttgacgaatatttctaaggtacacacttcacgtagttggagatcacactgcaaaattgttgtaacctgcctcccaagtcccaaatgaaaatttattttgtgaactacccacaaatagtgacctctaaataatctagttgtgttgtaatcttatttggcactaaacatgttttttttttataatttcaggcatataacaatcatggcaaaacactaaagagttgatatgtgatgtcaatgaacacatttggttagtcagccactagcatttgtctatatattgcctcattgggagaggttgtaagaattgagaatcatatatttctattgcatcatgtgcagagagtttgtagatccattaatattttgttattgtaccatgatgttcctattaatactgggagaatttgcagctaatgttcacatgacatgttcctgtgatgtatccttgcgctctgcttttcatgtttgcttgttgctgcgtttcagtgttgtacgataatgaatttatgaaatttctagaatcacgtattcaatgttacctagtgttaatagctctcggtaagttatgtaacagtaccgtgtgtttgactacaacacacggtaacattttattccttcccgtgagttcgtacctctcggtaacacccccgttccgtttccgcaacctgtcctgtgctggtcaatacattgttaccgagaaagtgctttcacccggtaatttttcttgtcttaccgagtgtacaagcgtagtctcacgggaaatattgcacggtaaaggtgtgaggccgctgagtgtctgttcccgagagtctgttctcgggaagctctgttcccgtgttttttcgctgtgttaccgagagcttttggcacacagtagcttccctctccctggtagtgtagcattctacaaaacgcttctaagacgccatgtgactatctaataaattagaaaaaaaatcctaaatattcctttaaagaggtggacccactattttcaaccattagatcactcaaaaagaaaaatccggtacccacgcccaccgtgtgtgggtatacacgtatagtacgtactccatgaaccctcctactttccttggggatcctactcccctcttcttttttctagccaacgtttcccttttttctagctaacacataatatataaaaataataatctgatagtttctcaaattatttgatttgttgtgttatttataattaagtacataattcaagatccatatcgtccatatttactatataaaatgtagataatctagccgttctgactacaaatatttaagcaaaatttgcattgtgaaaacatgaatgaattcaaatatgtgagtctaaagtccaaattcaataaccaccaatgagcttggaaccatgatgcatactctgggcctgaacccgatggaggcggagctgcaagatattattaggccatgttcgttagatggggttaggagctaatctcctacgcacgtaaaacgaaacgactcaatacattagcgtatgattaattaagtattagttaattttttaaaaatgaattagtatgttttttaaagcaattttccatagaaaacttttagaaaaatgaccgttcagtagtttgaaaagcgtgcgcacgaaaaacgagggagctaacttgagaagaagggagaagaacacagccttagcgaggcggacaccgacggaagtgccaacatcgactttccatgacttcctgagcctagtagcacgctagatgattagttgaagaatatgattgagagaagaggcaaaagaagatgttccgtgtcttcggcaaggacaaggaaacagcttcatctccgctgccaagccccgccacgtcatgtccaatgcatcaggagatcctcactgatgaggaggtcgatgagatgttccgtgaggctgatggtgataggcagaccaactacaagggatttcgtaattgaatttagaaaaaataaaacaagaaatttaaataaaatacacattcaaaaaaatcattaaaactataaaaaaaggtaacaagattccatgtagaataaaaaatatcaagagtccatataaaagtataaaaagtttaagttataaatatttgaaatttggaataataaaataagtattaaaagatgagtccaaatacaatatgatacgagattaattacaatttaaaatccttcaaaagacaattgagaataaaacaataatttgatttgaatacaaattcgaaattgattcatatggagtatatgcaattcgttatggtaaaagaacatttattaacaataaaagtttattgagatgttttgagaaaaaagagatacaatgaacactcaaatagaaatagaaaacaccttactttaatttcaatttattttgttagaattattttcaaaataaattactccctccattcactttggtcgtcatattttggttgtgcagcgataccaagaaacccattaacgtttcgattactgcgcatgtcgcgtgtgcctgctggccccacctgccctttgcgctgctgaatctataggctttggttggccatagcaattttcatgcacaagtctgttaaatactccttgcatgtggatctatagagtacgttttcaatctgtagagtacgttttcgtgtgaaccaatgacaagcagtctttgcatgtggaggagtaaatgctgcatggaaacaaacgaccactccatcccacccgaaaagaaattgaatgcgacgatcagaatgtttttaattttaaaatatgacgattaaaagtgaatggagcaagtacgtagtatgtatacctgcgcgaatacatgggctatgctgattgaattaatggatcaacatttgcatgattcactgtaaagttagtttggtacgtagatactgctagcccaaaattaaatggtgaaattcgttcttacaagaatatactttggaatataattaagtttttgggcaacttgttattagcagccatccgcaggtgtaacgtactatcagaaagcgtcacaaagctgctactagtatttgcgtcgtctttgacctaatcatttgtcacttttgagttagctgaacatgttaaagttaactaatcaggcgtgtaccggcgctcgtaaactatatgcactaacaacgcatgtgatgatgatgatataaagtagctggtgttgcgttcattcttatcgcttccttcgagaacaaacgtacgaatgatccaaactatgctatctggaacaatataatacgtgtgtttttaaaccttaattatgtgcgtaaacatgcactaggcagctaattactttttttcagaaaaaaaaattaaaacccggcctctacgggctactagctagaaggttggtcagggttaaataagaaaagaactgatgtggggtactaacaattatatgttttcgataatgtaggcggccaatcaatatcatgtgttcttgttcttgttttatttacttttgatcgattcagatacttgaacatggttgctgcatgggcgttgaagacgtagcaggctatataatttgacggatttctcctatgaatatttggcccatctttcatttcggcctgaaacgtcagttagcgtagatgggccgtgctttgtagcaggctgtacagtattcacacgcaacgcagagctgggtcgcattggaggccttctgggtcgtgggttttgccgcggcggaggcctgctcgctgtcagcctttgaggcaaagggtcgagatactctctagtcgaagtcaagtgacaaaacatgtggatccgatcttaatcattggaactatatgtcagtgacaaatgtacatttaactgcaaaggatctcaatctgagacaaagatgctggacagaagcaagcagcaatggcggcttcgttatcccctctgatctgcaacaacattggctggagatgaggctacgacagcagcttgggccttaaggaagaagagagcccaagtcaaagatagcttagcttgagaaatgcagagttcatcgggctacagaggagtgatggcgacaattaatctacacgtttgctggtagccggcgactgggagcacccgcgatcacactctaaggcactgttgccaatccggcaagtttcagaagggagtggaggaattagcaatgttcagaggaacttgagatgaagggcatccccaacagcatcaccatttgagttctcagggggcaaaaaaaataaattaatgtaagtttgcagcatcggagatgaatgaagacaataataatgtggctttcaggctggcttagctagcttgttattagcctctctattccgtttacaggcatgcattgtatacttgtgcgaactatttgtgcgtgtttgatcgatgaattgtgtggttgtgtttggttttgaaggttatcaagtattggaatataagtgaaaattgttcgtctttgctcttctgcttaaactttcgggttgatatagttagtgtgcacaactcaattagtatatataagagagagagaggtttcatgattgaatcctagttgacatataattaaataactattatctccaatttaatattatataagttgttttgattttttttctaagtcaacttctttataattgactaaatttataaaaaatatacaatatcttcaacacaaaataaagaaactatcaaaacatattgaatgttagatgtgatgaaactaacatgatgttataagtgttgctataattttaatgaacttagttaaaagaagtttaactaaaagaagaaggtcagaacaacttataatatagggggagtagtagggtggcccacgtagttacgtggctagcaccgaagttaaactgtatcatgatgtaaaattatctacctcctctatttcacaatataagtcattttagcatttctcatgttcatattgatgttaatgaatctagatagatatatatgtctagatttattaatatcaataagaatttggaaaatgttagaatgacttacgttttgaaacggagggagtacattgttttaacttgatttttttaaaaaaaacacaaattagaatattcgagtcgttggctatatatagacatttttctatataccccatatcatcaatcatactccgtatcatactgcatatatatagacatatttctataggacaaagtgagcttatattgattaaataaatgatatgcttgctatgaaaaataataaataaagtgttagaataggtgttgaatatactagtcctatttgattacagttggacctagagttgtaacagatgttagtgggtagagttagaatcggactctgtaacccggtaactctcttaaataaagagggaggcgccacaatgtaaccatggcgactacaatgtaacgtagacacgcagggagatgatggcggcgtggccatggactcgaagcgcctaggagctatattggttggggatgagcgcccataatcagagccccaaggatgtaagcttcggctgaacatcgttaacaaatatcgtgtgttcctgtgtcgtcatctggcatgtcttgggtgatcaatgactgaagcgatcgggaaggttagtcgtcgttccgctatatcgactaacttttataacatgtggtatcagagcagaaggtttcagcattggattacgaagacatgtggtagaggaaacacgaggtggggatcgtgcatcgataggagatcgtcaatcgtggcgatgagatcgatggcagaacgtgactggaagacgaggccgagcgtggccgaaggcgttcggtgagatcggaggggtagcgccacggacagtgcgcccgacgcacgcggcgatcgcggatctgcggcaacagggaggccagtgacggaagggtgaagctaacgagcgtggcacggcacggcggatgtggaaggccgagacgatgaagtcgaggacggtgaatacgaaggctgcgactgcggtgcgtgcgagggcacgaaacagcatgtatggagtacgtgctatacacgcacatatgcacacgtacgacgagcaagaaaataaccacagggagcacgattggtgttcagatgcagagacgaaggcagaagcagggagatggccaggttggactcgactcggacacgggttttaggagcggggcaattgatctcggccagtatggcgtgtccattatggattggactcatctagcactggttactggttgaatcggcaacggtaatcggcacggcaagactcaagcttcagtgaagtctcggtgaacaagcgattcgtgacagtaaggcttgatccatgccgcttggtttggatgggcccacgtggttgagttcgtaggcatgcatgaaggttgtacgttgagtggacacatgcatgcacagtcagcatgtagtacatgtgaggccattaaacaagtactccctccgtaaatgtacgaagccgttaacttttcgaccaacgtttgaacattcgttttattcaaaatttttgtgtaaatatgaaaatatttatgtcatacttaaagaacatttgatgatgaatcaagtcataataaaataaatgataattacataaattttttgaataagactaatggtcaaacgttggaaaaaaagtcaacggcgtcatacattaaaatatggaggtagtacatcaatgtatgtagcaaacagcaacaaaggtgcggctcagtttgagaatgcagcaaggcgtgtgtatgacggttaaactgggccggtagggtggtcagaccgatgaactggttagactgcggagcttgtacggttagaccgggttcaacggatagtggttcgttgctggaacttgttaacagatctagaaaaaggacaagaaggttctacagatggatagtttacaggtgtgaagggcgagtagactagcgacaacaggctagtcaggtcgcatatgaaattatctggtgaaaacatgatatatgtggaacttgatgaggagttgagatatatggagttagtccagaactgaagaaaagtcccgggcaacagcgggtgaaaatcgttaagggcgtcaacgggctgtttggcagtacaggatatatccaggatctgccgggattgcatgatagggatatatggaatctgcgtcactgaagagtaagagcaagcgctatggtggtaatttcttcggatgattcaaagcaacagtgattttctcaaattatcggatattcagtctacggatgcgggaaagcgaggatgttgaattcgttagctcggttcataagacaacaaggaagaaaaggttcttttcatgtctagcgagtttttgatttatctatttggtgatgacatcggttatctggccatggattagatcaagtcaaatcaaagacggaagatgaaggtgaacatggtcttcgaggagtctgtgatgtgacagctaaggaggagttcaatttcgcttggcaagacgactgtaatgatatgagagaaagtggagcactattgtagctggagtccagaggaataaattacagggatagcaaagtctcttaaaggtggcgggtttggtgcaggctcgtcgggcggcttacggtgaagctgcaaaagaagacaacccaaatctggaggataggtggatcggcatggtgattctacaacttctaggtggcgtatattcgccaaggtggagtttgttaaaataggtgtcaaatatacttgtcctatttggttacaattggacttgaagttgtaataggtgttagggggtagagttagagtcgggactttgtaacccgataacactcttatatagagagggaggcaccacaatgtaatcatagcgactacaatgtagcgtagacaggcagggagatgatagcggcgtggccatggactcgtagcggctaggagctatattggttggggaggagcgcccataaccagagccccggagatgtaggcttcggctgaacctcattaataaatatcgtgtatttctgtgtcatcatatgtcatatcttgggtgatcaatgagtgaagcgatcagaaaagttagtcgtcgttccgctatatcgactaacttttataccataaagtgactaacaattttcctgttttgcctctataatgatcgagtatctccgacagactcattatgctacaccactaaattacgattttataaaaaaaaatcattcctatatgtgtatagtttttagaaatcctgaccggccgccaccatctttctactcacctgtaccatgtcctccatctttatttctattgttgcctctcaaatcgccttgcaataccgttgtacttccctacccctttaccacccctcaactcgattgttcaccgttactcttctttaggcacattataaaatcaaatcttaccattatatcgtggctttgcttatatatagttttagaagctgtcaagggaaatgggttccgaacccttagtttcaaacacagccaattcacttatggctggtttggtttgtcgtctaaattggccttacaaattttatcaatgtcaaattttgacatggttaattttagcaaggcaaagttatgtttggattgaagtcaaaatagtctaagttaactattgaaatggcctattttcttaggcatgctaaaatttggctccaaactaaatagacactaaacactattgaaattatcaaatattggtaagatcaatttagacctcaaaccaaaccaacccttatattctacgtttgagatgggagtgttggtatatgtgtgattttctgatgtccagagtgactggagttagctttgtctggttagaacttaggagcaggaccaagatcaggaagaaattaatttttacggaatttgaagttcgcaaagagattattatggaaggacagaataatgaaattgcaaaaaataaaaaaaatagaaaaaagatgaaggggcaggccttcaccccatggttgggcgcgatagaagaagtggcccagaagagagacggtccacggcccatccgggggagcaacctggatcaaggagcagacagcccagcccaggccgggacagctcggagtcagagcagagtgcgcgcgaattcactcgtaaatctgattttttttttctttttatttttttttgagaaaacttgtagtaaatctgaattgctttgcacgctagcgatcatattcatacgcagatacgccggtcatcactcatcaccatcaacattttgaaatagatgcacaacgtaaaatcaacaaacaaaatatagtagtactgctcacagttttattcatcagaaacatgaaatgatcgtacaagccacacgtagaaccacagcaaaataaatcaacaaatcgaaacaacaaaacggtaagaaattattccaccgcataatcaatccccactaaccacaccatttctagaagataaaacccaagtcccataaatcaaaacaagcaataatgtggatggttgcatccgattgaacaaaaagttaaagttgttctgaattctgatacttctgaatcatcattttaattagttgaccaccctgcagttcttcctgatctcgccctggtagccgtttttgacgtcgacggcggccatcttgacgaacgccttcttgaacctgtcctcccaccacccggggatgttggcgttgtccgacaccatcttcgccgtcgccggcgaggtcagcagcgccgcgtccgacgtgaagagcaccttgtgggcaatgacgttcttgtagtactggttgtcgaacgcgttgggggtgacgacatcctggttcacggtggggtcgtgcgccgtggtcgggttggcggggcacctcctcctgaggagcccggcgaagccgccgtcgatgtcggaggcgacggcgaggcggtcggggacgaaggaggagcagtgggagcggccgacggtgtgggcgccggagagcaccaccatgtcctcggcgtcgaggcccttggtggcgaagatgtcgacgagctcggtgacgttgaagaagggcggggggaggttgtcgagggcgtcggaggagttggagtggcggccgtcgaagcggcccgccggcatgttgatcttgaccctcatcctgctgaggaagtaggcggcgtcgcgggcggcgaaggcgacgatgtcggcgcaggagacgacgcccgggcaggccttctcgacggcgtccttggcggcgtcgatcacctcgaagccgcggaggctggggaagttgggcgggctcagcttctccggggctgggttcgccggagttgggtccaggagcaccgagccatcacatccctgtaaaatatacatgcagatgtggcgcgtcaagctcactgatatgcaaatatgtacaatttttctttggtttgttaatacattttgtagtgcaaaatttagtactccctccgtattttaatgtatgacaccgttgacttttcgaacaacgtttaaccactcgtattattcaaaatttttatgcaaatataaaaatacttatgtcatgcttaaagaacatttgatgataaatcaagtcacaataaaataaattataattacataaatttttttaataagacgaaaggtcaaacgtctatcaaaaagttaacggcgtcatatattaaaatacggagggagtaacttttcagtgtttaggtactaagttaattaccaaaactaatttaaataaaatttgtttaaatttcaattggtcctacattaccgaaagcttaagtctaccgctgcttaaattttttttttcaaggggttttccaaaatagaaaagttggccagaggtatctcaaattaattaaccaaatattatatctttcagtacctcctcaacaatcataaaattatttttactcaaaaagatacgagtatttttaatgaaccgtaagaaaattttgggaattatcacattaatataaaaaaattgtcatttcataataactcgggtaccagaggggcggcatgacaattcacatttatagaacaaaaatatttctggtactcgaaccgtaaatttcaaaaaaatataaatgcagctgcccatatatcttgctataggttcagccatgtatgtacctcgacgaagcagtcatggaagagcaagcggatgaggccggcgccgatgccggcgttcttgtagacgaacttcttcacctcctccctcacgatggtctcaacgcgggggcacgacttcttgtagtagccaacctccaagccactgcacgcggctgcaaggagcagcgtgcaagtcaccgcgacggcgagcttaattgtgtgtgcagccattagcgcgcagctcttggtaatcagttcttgctgctgctgcttaatctgctaattaaagagctagctcgctaagatgagggtgatggtgtgttagtatgtagtaatgatgggtatttataggtgtgatgcatgtgcatgatggttatatgcattatccggactaagtcttggggcattcatagttacttaattgaactcatcaatgaatgatggagtataattattatatgggagataatagctgtgtttatgaacatggaagccataatccaactacaaactgggtaaagcattgagcagagtatatatgctttggagtaaagtgtacctagctagatattgctctcccctactgttttattttctttttcttctggaggtccgtcactacataaatatgtggaggagtagaaccttttttttaagacagtttaaaagaaatcaacagactaattaagccagctactccattttaattgtgtcctgctttgaacagtgattgtgcagctagatactacaatattctttatgggcataaatactccagtaaaacaatcaacaaaactgctgatgaattctttaatactccttctgtccctaaatataaaagatttttggtgtatgtgacacttcctacttcctagcgcaatgaatctggagagggagtctgtctagatttattgtattaggatatgtcatatccactcaaaatcccttatattttggacgaagtgagtacttcactcgagatatttagctgaaaatactctaccaggctttgtgcgggaatactctacaattaacccttcacatatatacatacctcccacaatgcacattctcatctagttaactaaatggttataaagtttcattgcatgagttttttttgttttttttttcggtggtcattgcatgagttgctgggctgatatgaggttcaattaatcgatctgtacgcagagcaggtcagtttattgttcttagctgaatgttagggcatgttcaacaatatatacatagctaggctgtcactttgcaaattgccatatcatataagatcctagatggcatatagagggtaaagagagaatgtaccatcaattatacaagagacgacccgggcaaaaaaaagtcaacatacagcaatgaggattgtgaggggtggatgtgatagataaaataatactgaattataattaatggcaacgggatgataaagaataactactggaaataataatgttacaatgtagctaagatttttcactccgatccctttcatcacttataattgttggttttgataagaggtagacaaactttgagcgctactttttaagtcatatgaaagtgaatagatttcaacataatatgcattagtaagttagtttcaattatagtttgaggctaaatagttagattattttaaaaatagttggtcaaattaagcaagataactcaaaatcaaaagcgatctatttgtaaatggagcgagtatattcctataagctaagaacgttgtctcttggtacttggtagtatctagtagtgagaaataaaagtaataaggccgcattcgggaggtagagtttggaactctatatccccgcacgaaaaacatgatggtttattaatattcgaaaatggattaatatgatttttaaagcaactttcgtataaaaatttttttaaaaaaaatatcgtttagtagtttgaaaagcatgcgcgtggaaaaggagggaagtgatgagaaagtagacaaaagaaactcaacctaagttgtggcaacttgcatataattaatagtagaagcatattatacacattgttaatttgatctcttgcaagtcaatttgcggcaggtcgtggttgtcaccaacattccctagcttagctttctgacttggcaacattcatgttccgatattaattagctaatgccaaagcttgtggcgtatagtactcccttctcgattcgtcctgtctttttatcttaaaattttctctcacgaactctgtattttagattcgtagccatcaaacgagtagggctccgtcctctctcattttctctccacataacgaagattatgaaagtcttttaatcgcttgcttaattagatgcctttgacactttatgagacaatagctttttaggaacggagggagtagggtgctatagaaaattgggtgctttagttttcacgtagtggccccttcacttttgaataatgacatgatacccatttcgtccttcctaaccttcgctaagatgtttggtctcaaaatcaataactcattgttccaatatggcataaacgaaggaaaacagatgagaatcactttatatatttagaatgataagaaaagtagtttgcatgtcaagagtcaagacacaattaacataaaactagatgataaccccatgtaccgaaatgctaaatatgtggaaaaatatattttttaatccataagaaaaataacaagtctactttaaatatggcaagacatatatcatctgcctggatgttacaatgcaaggacaagcacatataaataatcagtgaatagaagttataatccagttgactttgaagagtttctctcagtgagcataagaagcagctccattttttttctcttttttgaaagaacaagtggctccaaattgcagtagaacaacggtacaagatcaggtcaatgaaatgcctgcggctgttggcattgtgtatgagctcaaaatgggtctagaactcagcccgctttctcatcttctctggaaaaggaaggccttcttgggtaggggagtctattttgccttctctcatatctttctcctgattgaatcacctctctcacccacaaaactagctataacacctctcatcttcgaaaaccggtgtaaatcgacttctttaatagtttgggaagtggtttctgttgacgtgataggttgactgatgttgacttgctgagttagcgggaggaaccaacttatcatcgacttctcatcaaatcttcttcctcacccctcttccttctctctatctctttcctctctttgctcttcctcctctttcaccttccagcagtagtagaggcagggagggtggtggcggtggccagtcggacctgaggagggcggcttggcgagtcggacctgaggctgaggacccaggcggcgctccgcgtcgtggaaggcggtggtttcatacggcttgcactaccgtcgctacggtggaacttgggctccaccaccagctgctgctgctgaccaccatgattccatcgccgccgcccatgggagctcatccatctcgtgtctcattgcttgacaagaaaaagagggaaagaagagggagagctaagccttgccacggacggtaggagtgacgaagatgttgctgttgttgtcactcaccccgctaccaccaccactccatcaaacgccgaccgaagatcttctagccacattgcaatgggagacatcccggccgaagctctcttcttcccgaagctctgccaatgccctcaccagctgcgggcaccaccttgctcctcccatgggataccctccgcacgtgttccaccgttgccaactaacggggtgacgaggtcttgccagtggctgatttagtcatgcagagggaggggaaaaggaagggaggagagggatggcgtggttgccgtcggcgtcttgttgcttggggcctcggccttgctgagctcccatcattgcctagcgagagagatatggagaaggagagatagggagggggtggtgaggaagaaaatgaaatgaggaggaagtcattgatatatgggccccacctgttgaatgagcgagtcaaccagtaatatccgtagaaaccacttcctaaaccaccggaagagtcaatttgcactggtttttaaagataggggtgatgttatacctagttttatggttaagggaggtaagggtgggtagaataagactgaaccaaagaaccgaaccgaaaagaccgagaccgagaaattcagttagtaattcggtctcagcctgtcaaagaccgaaatttgttcgggtaattcggtcattgggctcgattaaccgaattaactgagaaaaccgaattgtgccccaataggtacaggaggctcaataagtccaatacaccactgaaccttagaggtcacccgctccaacccacatccccatccatcctcatcgcgccgccctccacatccccatccatcccgcgccgcctccgcctctgcctccgcctccatcgcgccacgctgctgcctccacctccatcgcgctgcgccgctgcctccgccctccgccctccaccctccacatccccatccatcccgcggcgcctccacctccgtctccattgcgccgcgccgccgcctccgccccggccaccggcctccgcccttcgcctccatctcaccggcgccgtctccaccttccgcctccatcgtgccacacagcctcgccggtcgcaccggccaccggatccatcctccacctccaccatgacgcgtcggcaccaccgtactcccaccgaccaccgccgcatcagcgtgtgccgcttccagccgaccccaccttggcgcctccgtctccagccagcgcacctccacctcggctcatccaaattcggtcagaccaagaccgagaacgaaaaagccaagaccgaatttaccggtcctgactttttttggatgaaattcgatcctgacttttcaaaaactgaaatgaccgaaagaccaaaaaccgagaccgaaattttcggttagaccgaacgcccacccctaaagggaggcaattcaatctggagcaagatatgagggacgcaaaatagacttattccaaatagaaaagcagaatgactaatgtactgggctggttcacaatgctgggctatactgtacggactatggtggatgcagactgagcttggaaaaaaaaaacgcaccaatttagccatttaaggcaattccaggatcgagcctgccctgcagccactttgtttcagaagcaggggaaaaacagaggctcttctgcaacagatgaaaggaccaaccatggggcaggttaaatcagttggttcagtttcaaataattgtctgcttattaatcgatgaaatccaagtgttcaatcagaaatcacccacgcgcatcattgcgtgaaaaaaactccaacttatcgagccttcttgtgtcgcccctcccccacgggtgaccgggaggcgacgacctcgccggcgctcgtctcccccttccctcctcctctgcctcgccgccgcccagcatgggaggaggacctgctcggacgaagacctgcgaggacgaggagggaagggggacggcggcggggcttcgtcctcgcgctcgggcatgggaggaggacctgctcgggggcgttggaaccggccagatccgtgccgcccagccggatctggcggtggaccagccgacggcggggctgagcggtgtggcggcgatgtctggtggtggtggcagcggcgtcgaggcgttggcggcggcgaaggaaaccaccggatctgcgcctggacggcggctggcgggacggtggccggcggcggcgtctggtggcagggatggcgatgacggcaagggcagcgaggggatggcgtcggtgaggtgaacctggccgcgccggcggcagatctagcgcccggaggtctggcggtcgcgacggtggtggcgacgagttcacggcgacggcggcgcgggctaccacggcgggccgtctgtgccgtgtgtcgtcggagctcgacgacggcgacaaggtgcgggaggatggcgagatggcggcagggatggaagggcagcagtggctgtggttgtggcggtggaggtggcgaggggatggtgtcggtgaggcgaacctggccacgccggtggcggatccagcgctggaggagtctggtggtcgcgatgatggtggcgacgagttcgcggcgacggtggctcgggctaccatggtgggtggtctgcgtcgtgtgctgtcgaagctcgacgacggcgagaaagggcgagaggatggtgagatggcggcggggatggaagggcagcagcggctgtggtggtggcgaccgtcacaacggtagggggggcatggcaatctcagacggctagccaggggcgtggcagacttccgcatccggccggcgcagtagtgtttggaggaggggttggaggccggcttggcgcagagaggcgcagccgatggcagcggaggccggctcgacgcgagaggcgcgagcggtggagatggaggctggcttggcgcgagagacgtggccgatggagggaggccggattgacgcgagaggtgcgtcgggtggaggaggccggcttgacgcgagaggcgcgaccggcggtggaggaggcgacctctgcgcgaggagctgccggtggatgtgggtggtctttggcgcacgaaggctggcccgcggggagcgccggtgtagtggttccacatggcggcagaggttgaggggtggtggattgctggtctagcggcggctggtccggtgctagtcttctcccgggcttgtgtgttggcgctgtcagcgtgtgggtggtggtttattttttcttttttcttggttacgaccctccaggttgtaatattataattttttcctgctctatcaatagattttcgtaccgtcttgtgcgagttgttcaaaaaaaatcagaaatcactgaagcagaagccctgtgcatcatctgacatgttacagctaaaatgtttggaagtcactgtctctgttagcctgtaagcctgtgttttaggacgaagatgaactgatgtaacaacgattccagcagatatttctctcaatggagtagtaatgatttacaagactaatcccccacaaagagaagattcaaacaaaatttacaagagagacaaagttcctacaacacactgactctgcgtagcaactgaaaaatcttgccaatcagtgccctgcccatgcacggtggtggcgaggatgtcggcgtgcggcggcgcgccgccctttgttcagcaggacggctgcatcggcggcggaggaggacaccacagcttcctgaggaacgcgtcgctgtcgcggagctccccccaccgccgcctcatgccgcgcgacgtgcggcagtaggccgccctgctgatgtccttccacgaccgctcgccgtcgccgtcgcgcttgaggaggaggcgggcgagctcggcgtcgtcgtcggcggtgaaggggcggtggtacacgtcgcgggcgaggtggtcgcgccacctgtcgcggcactgcccgggcgagcggcgggggcggcgccccgagcgcgccgccgccatgccctcggcgacgcggcgccagtggcggaagccgttctccgcggcgaggcgcgccaggcacgcgtcctcctcgggcatccacgccggcgggatcctgatgcggaggacgatgcgcttcccgccgctcgtcgggctcgccgccgccgccgccgcctccgcggaagacgggaaagcggccgaggcgggaggttgccctgctgcttcttgctccatgccttgcaacgccatcgcgacgatgatgacgtcgatcttcttctccgttgctggttgctgatcgatcgatgggtggaaatgacagaattcggagcgcacgcacgctgctacttatggtgatggttacatgatccgactcggagtcttccttcgtttcattcttcacccaaaaaaagaacgccactctgcgcgccaaattcaaatgtccgactccgactagtattccaattactcaaggcattgcaaacacacacaaatctaacactaggtttaccaataaaaaagagatgaggcttgtattaattattatgagagatgaatttattcaagtacagttcattgtcatggtggttttagagggataatgcaagccgtaccaacggccaaaagaaccaagaaatgtagtacgtcatgtcgaatcgatcagaagaacaaagtcctggaaaacaaacgaatgaacgtatagatcgatgggtttgcattagtcggattgacccgatgatgattagttgacgaccctgcagtgcctcctgatctcgccggggtagccggtcttgacaccgacggatgccatcttgacgaacgccttggcgaacttgtcctcccaccaccccgggatgttggcgttgtccgacaccatcttcgccgtcgccggcgacgtcagcagcgccgcgtccgacgcgaagagcaccttgtgcgccaccacgttcttgtagtactggttgtcgaacgcgttgggcgtgacggcgtcctggttcaccgtcgggtcgttgctggaggtcgggttggccgggcacctctgcttgaggaagttggcgaagccgccgttgatgtcggagggcgcggcgacgcggtccgagacgaaggaggagcagtgggagcggccgacggtgtgggcgccggagagcaccaccatgtc

SEQ ID NO: 23170 - DNA, 28371 bp, Oryza sativa
tacatgcatatgatgatctgtcacgctcacattgatctcatctcactgccgccatggattgcaaatgtgtgattcagaaatgcaatgcgacatacctcgacgaagcagtcgtggaagacgaggcggatgagtccggcgccgatgccggcgtccttgtagacgaacttcttcacctcgtccctcacgatggcctccacgcgggggcacgactgcttgtagtagcccagctgcaggccgtggcacgccgacgcgagcgccagcgcgcacgccaccgccacggcgagcttcatgcccgatgctgccattgctcgtttcagctcctgctgcttttgctctgagatgatgatgtgattgttggcgtgagatggatgaagttgacacgctaaatcgaatggatatttatagatggagagatcgatttaattatatggcgtagctaaggaacgatggcggattcgatgttgctactgcgattcgttagattggcacacggcgtatggagagaaatcgatcaatcattggtgatgagaaatcttagctggcatgaacatggctgtgcccacagttaacgaactagctagctagctgcgcgcgcgcggcttcttgatttgatattctgcatggatggagcctattctctctttgtgaactgtactgattttcctttgcctcttccagagaaagtgccatcgcatgatttgttgcagggaagtccacttgcttgttgttttcttagaattgagctgtgtagcattgctcattatttgatttgattataaattgagtcaaaatagtcatatactctttaatttttttttagaatggagctgtagcattgctcaatgttggattcataaagtcaaaatatccatatgatcaatagttttcttttgccacctctcagtcaatattcgggaggagaggttccctatgcaagtaaaacggggttattttttagcacatgattaattaagtattagcttaaaaaaaactttaaaaatagattaatatgattttttacaacaactttctaatagaattgtttttaaaccacattgtttactagttcgaaaagtgtgcatgcgagaaacgaagaagcgaaggttgggagcctcgagttgagaacaaaaccttatagtagcactagtacagaattcatttttgtggacgagcccctcgttaaatttcagacggtccataactgacccgtctggaaaaaattgtcctcccatttttccgtgcggacccttaataggatcgcacacgaaaatcgatttcgcatgcgggcatgttaagactaccgcatgcgtaaataccctccctcccttttccctctcaacatttcaaaaaattccatccatcccctccaactctctcacctcttatccttatccttaccctcatcctttttcctcaccccatcaccccacctctctctcctctcctctcatgcggtggcaggcgggcgcgatggctcagtgacggtgcccgacgggaggagcggggccctaatcgcccccaccaccgccgacgaggtggccgggagtggcgctgttggccccgcgcgaatccgcgccgcccccgccgacaaggaggaggtggccggagcggaggcggacggcggctgtccccgcgacctctccgctgcccggatccggcggcggcgcccgtctcccgccctcccccgcctggatctagcggcggcacccctctcccgccctcccccgcgtgacggcggcaacgagacgagcggcggtggcgacggctacgaagacgacgagctgcggcggcagccagccccaccgatgaggacgaggaggaggaggtggccaggagcgccgccgccgccagatttagggttttcattttttttttggatttttgtttttccgtgcgggccacataaagcacccgcacacgaaaatataattttcacgtcaaaaataacgatttttgcatacacctaggtgggtgcggttcgcctacccgcatgcgaaaatccttttggaccgcacgggaaaaccgttttcgtagtagtgtaattagaattctatatttttctctaaaatataagcaaactgattcatctaactatcaactatgcaatcacatgtccagatctctaggaatttttagagttaagaatactcagtttaaaagaatcttggatgtgaatttgtttcaaacaaaccagtccaaaagaatcttggatgtgaagttgtttcaaacagaccagtctgcaggcagtgagctgaattgctaaaaggcttatttctcgggaaaagtcataaaaataaaatgactaataaaatttagtttcaaaaataaaaaaattgaaaccaatttaactagttccccgtttgagttaacatttgtttggtccaaaaccgctaaattagatctacgacgaccccagtttctggaatgtttcatttattatggtcagatagggattaattattagctaatgccgagtacgattaagataagggcagatttcactatctaaaaaaagaggaaaagacgagagagcaggtcgtcgaagcttgtgtgctctattctagtttatacctggcattgcaaccaacattcattccaagctgggattcgatcattcatttcttgggccgtacgaagggcagtcgcctgcctacccctccttcgcatgtggtcttgtaaatcaggagatagatcgttagctaatccctgcttaaaataattctgcatgtacctagggaacgtgtcctccacaagctatttttttaaagagaatttagtccttcacgtttggttattaccttgttaattcatccgtccatcttatttaaagtgtagttatggttttccatgttcaacgtttgaccgcttatattatttaaaatttttctgtgattagcatttttctctattagataataaaataaaaatattattttatacgtaatttatttttaaattttttaataagacgaacagttaaatttagacatgaatacccacagtaggtcgaaatcttcatcgtattcaccaaaccaccacgtggacaagctgaggctaagcacatgcacgccaggacaacattgaatcaaggattcaatcaatgcaaagatatggagtacttgtcacattttgcagtctcttttggaaacgggccggatacagcaggggtgcttttttctcacttgaaccgtaatccggcaaaatataaaaagatttgctgggaaaaaataataataaagattagatttcataaaaatcattcgagttaagaaaaccatggaaaatttgacgtgtgccacagatccgacaggtggatatgtagcgtaactacgcaaaatctcactctgtacagattttagtttatgctaacatgcatgttggaccactttgcaatatgacgtggcctaattaggccctgtttagttccaaagtttttttttccaaacttctaactttctatcgcatcaaaccttttatacacacacaatttttctatcacatcgtaccaatttcaaccaaacttctaaactttagtgtgaactaaacacacagccttagcttgtcatccaagctgcgtaggccagcaagcggtctctcagcatagctaagatctgtatagggtggggtttggtgaaactgcgatcgtaatatacatatggttgtgtgacttaaaatactcgtagctttctgtaactcggataataaaatccggggttttgcagaagggagtgtctagcaaacattcgaataatttttttttcatccatgtcactcagattttttcaacatctatccggacagcacgttgtcgagtgaacgactttactagttaatcgttgtacatccccatgggccgattgcttagtgaagaaaaaaaagaggggttttacagtgcttgggaggtatctggggtacctcctaagccaattaataccaaccgttgattctgaaaggataatttaggaataagaaatattgttaactagggtagattagtaattcctcaacccctgtacccatccgctggccagcggcatcctgtgccgatgctaagtgccggtgcatagggcgtacggcggttgatctgattgttgttgaatgttgcgtaatgttgctgctgctgctgctgctggactctggccattgttgatgattacagaacgctgaagcattgattcattgttgtgaagctgttaaatggaattgaaaagtttagagtaattgattccttgcgaaattgatgcgcttaatttctaagttgctagcatatgatcaaagaagatatttcgtggctaattattgagcatttaattaagcagatcagccacgttgagaaactaattaagcaccatgccggtgcatgctaatctcatccgattaatcgggtgattaatcagttgcagcctctactaaactcaaccagagatcgaaggatcaggaaacggacgtgaacggttaggtaaaagctgtttgtatgtatttgcccttaattgtacaactaaaccatgaaagtcaattactattttaacattccaccttctatacctggtccaccttttacgtaccttttccatagtactcctaccttttatcctgatgcattggattagcggcgatcaacggtgctaatcaattccaagcacggaagaacctctcgaaaaaaaaaatccaacacatcccttcatttatattgtccagaaaacccaagatgattaaataaatattactaatacacctagttaaagagtcagatgcagttagattgtagtcatattaactacagtatatataattacagtatagttacactgtaatttcataatagttacactataatgatataaagttacactgtaatttctgcaattaaatgatagtgtaagtttatcttttggagctgtaactactaatcaatatttattgtatatttattctttttagggaactactctccagcgttgcatgcttgctcggttctgtttttcattttcccacctgtacagcacgaatcttgacacaaattctacggccaagcgattgcgagagctcctaccacactttgtaacttgtatagtgtatagctttgtatcttttcccttttctgtgtacagcatgaatcttaacacaaattctatggccaagcgattgcgagagctcctaccgcactttgtaactttgtatagtgtacagctgtatatcttttcccttttctacccctagggttgtattttttttctgctatattcaatgaaattttctgctatattcaatgaaaaggcataatctcgtgctgttttcccttcaattttttttctaattgctatattctagtatacatggcaagaattatctacttagtaccgttgcattcgcgactgtctacttttgtagtagtgtgtgtgatccaaaactgcttttttttacatgcagtttataaggaagatcacatgtgaaaatagatcgattttagtagacatacatcttagaccaacaatctcaaaattgttgtttttggatgcaaactgcgtggggcatgcacctcttaaaatacagggctggcccacctgaccacgagcaataaattaatataagtatagtacttacactcctctcctttatcctgtcctaccccctcccccctcccccgagctctctcttgctgttccctacttgaggcacagattcaatactcaccaaaataaccacacatcgactacagacggctcgttttagagctctgcatgtgaaaaatgattttctcaaaggaccttctaatttttaaagagccatctataaaaattgattttcgttggctggtgtatattatcaaccaaatgataccacactaaaagattcattaaaattgccaacatattttatgttttaggagtgtttagattttaggtgggtgtcacttttctaatctcttgaattctcttggatacactatagaacaacgattttgtggatgcttctccttttattttacaagtgaaatataagaaattatgataatgttgagagggccttatatagtttaaaacaacctatgaaaattaattttcactagcgatcaataaaaccgcctgtgaaaataggatgggttttacggacgcttctattaagaaaacacataatagaaccgtccttggaaatacgagcaatacttttgtgtttaaaaaatcgtaactctttcatatggagttgaatgatgataaatttataacaacaaaactgtagttttaataactaaaaaaatacacattgcatatatggcactataattttagaatcagcgatgtgcaattttaggtgactggaacttagaaaatatgtctaaaaatgaaatgtagaaaatatccttttcttttaagggtgacgctccggtactctttacttgcagtattctactacaagtagaattaatctcaaccgtttattttaaagggcaggtaagtaatctcctaatatagtttaggagtaattttagcatgggatgttttgttcggttcgcatcgcatcaggttcagtggacggccacggcaggcaccaccggcgattgctgcagcacggcatcgtcgtctctcgccggcaagggccacagcgcggagtacaccgccgacggggcgcggtttgaggtgccattggtgtaccttggcacgatggtcctcggcgagctcctcgtcatgtctcaagaggagtttggctttgccggcgacgatggcaggatcatgttgacgtgcgatgcgtcggtgatggagcaagtcatgtgcttgattagcagagatgcctctgaagaggttgagaggatgttcttgagctgcatggcaagttcttgccacagtgtcagaggaatcagccatcagttttacagtgtcggagaacggcgggctattcgggatcggctgccacggccggccgaggtaggtctccatgctgctgccggcgggggcgccgcggaggaggtcgtcgtcggcgtagatgttgcagtcctggaacgagaagccggtggtgcgggattgggtggtgatggtgttctgctggccgcggagggaaggcgcgtgacaatgtcgcagtgttggaagacggcggtgatgcgcgtcgccgaagatgagttagatactgataaattacaataataccttacgcgaattattatccctggacgaatatacccttccacatttctactaccactaattttggtgggagtagaaataaatcataaccctacaattaaatatgatcaacggctcagattactttctactccaagtagaaagcaccggagcgggactcttcttttaattatcgcagaagtatatttcactgcaaagaacccgtcaattgaaagatcgcattgctctagaggaacatggcaacgtgccaaagtagttgattaggcaaccgcctggattaagatgctaaaaccatttgcgcgacggcgcaacaagaagcaaaacagcatcaccaagcccaagaatcccagccagtaatgttatcgttggagtctttgccagctaaatacagtgtttctagcacttacagcctttcacgacttattgatcatacatatatgttaatccattatgtaaaagaaatatatgttaatcccaacttggtactaataatcccaattggaccatacctaggaggaaacagcaatgcagctgcctgtagagacaatagttttccattgtcccataacaaataaataataaatatagttaattaaaggaacagagtgaagtcagaaaatcagaatatgaggcgaatgttggctggcgatagccgttaccgggtttggttattagcaatttggcagccgtcaaacactgatgtgtcacacacatggttttcttatagattagtaccgtgtggtttactcagtaaaatttggtcctatacaacttttttttggctgtgtgcccacggggcagaggcagtagatgtaatcaattttcattattaaaaaaaaaacaattttcgtttgcagcggtcgacatttttcttcagtaatcaaaaccggggagcatggttcagtttttgtttgtttcagcatgagcagactgaagctaagttgatcactttacgaatccaatagagatggcagatggtcagcaagcacagcagctgaactgattggtcaggaggtagttaccaacgactgaaatcatggaagcttctgcagaggagagataagaactgagcaaagtcaaatgctaggacacacataattgcgtcgtcgaccatgttccatcttccatgacagctagattaatttctgagcccctgattagttgctccttctccatgatcgttagttgttcgaatccaccatggatcatcccatgcatcaacataatctcaatctataaatagccatctctgtatacgatcagcagacagcagaagcagaagcaggcagtccatcgatcatctcttctcttccagcaaggaagcagcagagaagacaatggcagcatcggccatgaagctcgccatggcggtggcgtgcgcgctggcgctcgcgtcggcgtgccacggcctgcagctgggctactacaagcagtcgtgcccccgcgtggaggccatcgtgagggacgaggtgaagaagttcgtctacaaggacgccggcatcggcgccggactcatccgcctcgtcttccacgactgcttcgtcgaggtatgtcgcattgcatttctgaatcacaaatttgcaatccatggcggcagtgagatgagatcaatgtgagcgtgacagatcatcatatgcatgtatgtgtttgttgatagggatgtgatggctcggtgctcctggacccaactccggcgaacccgaagccggagaagctcagcccgcccaacatgcccagcctccgcggcttcgaggtgatcgacgccgccaaggacgccgtcgagaaggtctgccccggcgtggtctcgtgcgccgacatcgtcgccttcgccgcccgcgacgccgcctacttcctcagcagattcagggtcaagatcaacgtcccaggtggacgcctcgatggccgccgctccctcgactccgacgccctcaacaacctgccgccgcccaacttcaacgtgaaccagctcatcggcgcgttcgccgccaagggcctcgacgccgaggacatggtggtgctctccggcgcccacaccgtcggccgctcccactgctcctccttcgtctcggaccgcgtcgccgcgccctccgacatcaacggcggcttcgccaacttcctcaagcagaggtgcccggccaacccgacctccagcaacgacccgacggtgaaccaggacgccgtcacgcccaacgcgttcgacaaccagtactacaagaacgtggtggcgcacaaggtgctcttcgcgtcggacgcggcgctgctgacgtcgccggcgacggcgaagatggtgtcggacaacgccaacatcccggggtggtgggaggacaagttcgccaaggcgttcgtcaagatggcatccgtcggtgtcaagaccggctaccccggcgagatcaggaggcactgcagggtcgtcaactaatcatctatatattgaattcaacgtgtgttccatcaaattttctcattgctacgttttgtttttgtatttattcgttcattcttttgtgtagtgtattttgtgttgattattatatatgtcctctcctattatgtaattgtgtaatatgacactttatcatgtaataacattggaatatatttttggagtaaatttcacaaaactacaggtttaaggcatccgtaacctaaaacctcctcatgtgtttgcaagctgtttcaagaaacctcaggtattaaggcaaaaatgtttcataacaaccctaaattcatacataaatctttcgtttggctattatacttatacataacacacatttgtcactttctcaacaaaacatcgggttacaaattatattaagtttggcttcatgtaattcgtttgtgtgatgcactgatgctgccactaaggtttgtatttttcatctttttccatcatgaatggtagaagcgggaaggaaatagagtagatatatcaatgtgtattttcagcctctaatgtagagttttgtgaaaaaaaaattctcaaaatccaggattccttaaaataaattgtaaaacctggatcttgtgaaaatttctctaatatgaaagatatgctagacgttcttttatcaaagtttaggagttattcgttgatatgctagacgttcttttatcaaagtttaggagttattcgttaattcagatgaaatcccgtgtactcggtcggcttaagacatactccactttacaggaaattgtcggaagaactttagtgcaaactactcctacttaacaaaagaaggtacaggagagtgttgacaagaatcacaacttacagaactgacatgcagcaaatttttcatgttaaaagaaattcatttctgtaaagagccaactcctagcagctgtatgtagtgatattgagaattattcctgttccttgtgattctagaactgacatgcatttaaacataagcaaaagaatttcatttcacaagtggaaagagccaactaaggtagcagctgtattcagtgatccagattagtattatccatgttctaagtgcaacatccaccaccaaataaagcagcaatgagtatttggacaagcggaccacatcaccacaagaacagctctaaccagcctttttttatacacaatttggagcacaggcaatgtcatgaatgattttacaatcttattcactccacttcatcttcacagcaaaaggcgacgacggcctacagtcggacagcaaacagagcactagagaggttttgtcacttggcaacttcctaataaaattggaagaagaaaccttaggaagtagaccctgccccccatcaggttactgtgcatagttctgggaagcaagaacttcgaggagggttgcgacgaagttcatctgaacttcctcactaatcgtcgtgaagagggggaaatggacgaacaaagacttgataccgcgctgttctgcgaacctaagagattggtaatagacatagttgcatacgaatcgaccagcgtcatccgaaggcgccacatcgaagcccatctgttgtagggacttgttcacttcattcacaggcacagtggtctgcttgatcatacaaaaataaggacaagttgtggttaaggacttaagatggtaaagactacccaaaaaaatagtacgaaacaaaaggagtttagacaagaaacaattgtgaccatcacagcatagcgtggactgatgaggtgctgttaatacatgtcacatacttacagaagccacccacaattagcaattctttccacatactttgtgtgcaatagactttgccactgaactcttcagttcaagttaaaaagattttaaccgaccaccaaatttgtttgaaaataaacacctaaaacaatttggcatggcaacgatgaactatgaaccaaacctaacctacgatgacacagtaattgaaaatcctcgaatgcaaatgttgtggcatggcaaggcgtaacctaacaacagaggcactggcgcactgctctatcccactataaaagttcatctaggatccatgtgcatgtaaaaatgttgatcattaatacatgcttaaagtatataaattgactaattgaaatgggatttttcttgcagaatattttcatgctatataattttatttttttagtaatatatcatgacacaaaatcagtcaaatgttaagttaataaaagccaaaacagacttatattatgggttgagggagtatttgaaggtagattgaagttatatttcaggacgggtacattaactcaatgatgaaatactttcaggaaacaacagcaaaattctacctttcttaaatttgagatgcttccatcagatgacacaataggggccctctgcaaagttgaaaaagggaaaaggaacagataagaatggaagggctttttatgtatgcacatgaaaccataaaggtaaaaaggacaattaaggtaacctgtggtttccatcccagctcatcagggcaacggaaggtagcttcattaatagcttgattctcaagggcaaaccttgttgtgccactgttgactccaaaatggagctgaaaaaaaatccataaaagtaattggtttcaatcaaaaaataaaaggtaaagagaaacaattctttccaacacacaaatgttagacaaatagaaccttgacggacctttaaaactagaatataaaagcgtttcatattttcttatcaaacagtaaatttggctgcaaaataagtttcactatagcatccaattacatttaagggcaaatgaaacttgtcaagtcattactgtggacttctcaggataacatcatgaactttctaataatgtacaattgagtaaatctgtaaagatgagaactgaccagaatcacttgcccctgatcattcaacccatactctttgtctacgatggctgattcaaacacttcatacaacggaccaagcccaccctgcccagcagtctcaagaacagtgcaacttccaagtgttaaacctttaggcaaccctctcttttccataaatgactcaagattgcgcacaatcttctccgtcggattctcagcgactccatggaacttcttgaatccagtaacgtgaacggtaacaccagaaggtccttcagaacccatctatccggttatgaaacaaagttgaccaaggaaaatatgcagtcacacaatctgcatagagatagaggaagcatcagattatcagtaaaaaagcaagcagttccctgaaaattcagcaatgcataaggagtcaaggacaataaatatagccttaaaaccagctatgggagaatgttgccattaaacaaaaatgtactgctgattgctgacagtgccgacctcccaagaatgagatatcgacacatacaacatgcaagtagtactacttttgagcagttagtaacgctgacgatttagcaaatgtcattgtctaaaaataaacaggtgctttcgagtagttgtttaattgtgtgatcagcagaacgccgcgaagcagcagagccacgtttttagaccgtctgaaaccgattgaagcagagacgtcgccctcagcatttagcaggaaaagcaaaacttgggcaagcaaacgatcaatcgcatctacaggataatcaaactcttgattaaatcagtgtaaaaaaaaacactagcacgcaagcagtaggttcgaacaggaacaccgatataataaaattctgaaaggaaaggcatgtctgtcttgttacagacagctcccaagtacagaaaatatatttgagggaaaatggtttgccagtaaaggaaaacaaccgaaatattcgttcttcggcgttctagaatctaacgacctaacaagatttctgtcgagaaataagctgagaagtgattaagagaatcataagctatgaaatgacttgcagacatgacacgagcatacaacgaatgcagcacaatcaaaagttagttgggatgagctctatcctccacagtagacacaacaacactagccaaattcgtagcaggagcagcatcaagaagaaagccttcatcgcgcaagattaggcgctcgattattgtaggcttgtagcagcagccacggaatcgccacagtaagaacaatatccccccaacaaaaaaaaaaaaaaatcggcacctttgtgcctcaaaaagtcaaaatcccctcatagcccctccaaatcgttccaagaatcaaccaaaccgagcaagaacccctcgtcccccggagcttggccccctgagctctctcaccttggcgcggcaaccacggcgacggcggaagcaaagcaagctcctttgcgcgctccagcagaagaagaaagtggatggaacggaagagaagagaagaccggagaaatcgaaagcgaggtgaggtgaggttagcaactgtccatcctcctccttcttaaaggcgcaatctgaaatgggatcgatcgccgcggcgaggcggcttacctcatcggccgagagagacgattagagcggggaggggaggtgggccccgcttgacagcgaccccggggcgtgggcccacctgtaggcgcctcgtggctcgcgaggagataagccggaggaggggaagggggaaggggaaacggctgcgctgcgttgcgttgcgtcgccaaaccgaagtctgagtcttttttatctttaacgtttgaggggttgcgttgcgcggcgcctccggctttgggcttttggtttggtttggttggttggttttgttgcaggttttttgggtgaagtctctctggaaccggatgctctgcggtttcggtctctctgttttggtgatgcaccgccgccgcgtctttctctccttcgaagtgttgtgctgatagagggcaagttttgttccatttctcatgttataatggtgaaagatttgtccctcattatgtgtagtagatggtgatattatactgatccaattaataaacgtcgacacatatagtggtatttcttgtgagatagatgtatcaatttgcaatggatctaaccaattaaactaattatttttttaaaaaaacttcattgtagagctaaattaattgattgcaatgtagaaaagttgccatacatagaagcaagtaaaaataaaataaaatggttatgggtccgttatactcgagaggaatcctttgttgtacgacatgcagtaggtatcactgacatgtgggcccggagcaggtgagacccacatatcagtgacacctactgcaggtgcactaaagtagaggatttgcatccgttgtatcccttttatcgtggcttgtattagttgctaactattagggactatatatgaagcaattatttctatcggtatctaggtatgcgtttcatccttatttttatggagtaacattatattagggactatatatgaagagacagtttctaccggtatctaggtatgcgtttcatccttatttttatggagtaacattatattatggactatatatgaaaagacagtttctaccggtatctacgtatgcgttacgtccttatttttatggattaatgttatattagcgactatatatataaagcaattgtttctatcggtatccaagtatgcatttcatccttatttttatggagtaacatcctattagggactatatatgaagagacagtttctaccggtatctagttatgcgttacgtccttatttttatggagtaatgttatattagggactatatatgaagaggttgtttctaccggtatttaggtatgcgtttggtccttaattttatggagtaacgttatattaggaacttatatgaagagaccgtttctaccgatatccagcatgcgtttcgtccttaattttatgaagtaacaatagcgttttttagagtttagacatattagggaactctcatgttcatctcttttaaaaatttccctaagtaatgagaataatcaaggatgttgtcccatttcttggttcttttaaattagaggattaaggtaggaaaattggaggattctaattatatatatggaaacattcgtatgaaagctttctttaaaaaaaataaaggattaaatattatcgtttcctttaaaatttctatggaatggataattctacgatggttttggcggaagacaataaaaaggtcatagctgatgtttttaatcatttgtctcttacaatcctatgtttttactgcttacaatcctatgtttttactgcattgcaatcaaacatctcttttcaagttttgtttaatgtgggtagcaagcaagcaaggaacccaacctgattgtgatgcagggtttacaacaccagtggaaactagtctggatttcacggattttttggaccgagtaaaaaaaaaacacaaaccaatcgtttttttgtcaagttaaaaaatcaaactgaattttaatttttttacaaggattgcaaatttcattaattttttgtcggtttatcaatggattctgtgaaatccaaagatactgcttgtgagtagttttagatttggtgtcggcataatgaacttggtcttgggtcggcctactatgaattaggccaaaatttgaattgcatgataaagaaaaatgaatggtttaatagacttttggttctagacctcgggccatattctagataggccgaggcttgcgactgcccctaatgacatgtatcattgttttctgtccttaacataaggtacatttttctccgtccttgactacataaggtacatgtagtactagttaggatcagcatcttgtagcgtctagtgagcctgtgttgtccatgtctattttgacaattgacaattcatttaacaatgaaatcacgttcgggttctatgtgtagggattgtagccataaaagaagaaaaagaaagaactaaatcaacataacatgtcatgttattgtacaacaatttgctctcgtattttaaaatttaattaagtgttcctttcaaacgcaggattccgaaaacacaggggcggatgaatcacaagaataaagatatcatgccacaacgaatcgtacaagaaatataaatccttaggattttgcaaaaagaaaaaaaatagtagcaccttaggaaaagcaaggaaattttgagtcaagagaaaacatgaagtataccctcatgttaatttgcctccaaaattcctataaaataagcaattgcatagtgatttcgaaggattttggaagagtcattcctatgttctaaaagaccatgcaggaaaaatttctgatggatttgaatacttcaaaatcccttcactcttcctttgtttcaaaatagccctaaatgggaatccggacaaatagcttatatatttctcaaggctcccagactaatggttaaaagtttgtgctgattgcttctgagcattgtccggtcaacccaggcgagttcatcgccctggtcgcgttgcaagtgaattgacatgagctccttccatagacacacatatcctagttaactagtatgtggtgattggttaactgttacatccatatttaacacaaaaataatgtcctgtagagacccctaccattatttgagcattgctaccgtccagcaggttgtaccgggcggtactgggtaccaaaacaaatctaaccgttgaatcaggatgggtaggatcgggacagaaaagatgagcgtcaggagagaaatctaaccggcgttcaagtcatcgttcccggtggtggcagcgtcgaagtcgtcgttcccggcgacggtggcagcgtcaagtcgttgtcgttcccggcggcggcggcggcggcgtcgagggtccaggaggcggcgacggtcgatcccggcaatggcggagttgacgtccaggcggcggcggcgttgatggcgtcgatccaggcgtcagcgacccagatcgaactcgcggcgccggaggaggaagacgcggcgacggcgggagtgaggaagcacagcgtcgacagggcgaaagcacgtcggcggcgggggtgaggaagcacgtcggcgggggtgagaggcacggaagaagacggcggcggcgggggcaggaagcacggcgggtaggggcgggacggcacggcccgattcaatctagggttcccatagcgaagttacatttttgcctacgggcgggccaacggttagtagaattgggtaccgttcggtaccagtaccgctggacggtaaaaaggctcccattatttagagtttgttggattgtccacccttttcctctcactttgtttgtatgggcctcatcctatcctaacccaatccacatggataatccaggattaatcaatatccaaatacatggatggaccaggattagggcccattcaaacaagcctgagcggtttgccattctccagcagaataacttcacctgcaacaatcttcagacaagcccgtttcccattcctcctacacgatatatgtacagcaagcatctccatctttgaccagcaaagactgtagatttgtagtcagccatcacaagcagaagcagtatttcactgaacatagctacagctacacgagtacacatgcatatggagatgcaagcagatcgatcaggccacgaatttcaggcagcgggtatcgttgtgaatgacctggcagcggcacgagcagaacctcgtcccgcacctgacgcacgtgtagttcgccgtgctgccgcagaccgagcagtaatggcgccgggacgaggtgctcgggggaccaacggcggccctggagtacgttgggacatggggaggcagcgactccaggtttgcctggcgaacacagttcaggagtaagagatctcttgatcttggtcatcctactgacgcgaggtgcacggtggatgagaaatttgcgaaataggatcatgaatcttggttgagaatatgagctataatgagctgttccgcgtacctcctgtaacacgtccatgaaagatctcgccgccttcttctccaatgccttcccttgcctcgtcttgcgcttcatattctttgactgcttcctctgcatgagaactgtagaaaggcagatgacaagagaaaagaagattttcacattaacactagatcaatacatcatcatttttttctggggaaacttaaactctctagacaacggtgcattctaattgcacacacaaccacagtccaaacagcctaacacttctgcaaccttccaatttgtcgatattatcctaaataggaaaatgagtgcattgtttgacgaaatggtgaaaccttgactgctataggctacatgagaccacaaaaagtaaatccttgaccaaaaccaaaaaaatggtgggaatattatagcagcacatgcgaaagactaagatgttttagcgctatggctaaaaagttgtgctgtaatagcttgcctttgctaaatctcaagtgcttttccattgttttgcatttctgtgagacagaatcctgtttgaaatgaatcactttccattcaaacagtgtagagttgattggctatccaatatttgcatataagaaatctatggacttctatatatttatatcattgagttgtagcttattatagaacttattttattctgtaatctatcaagttaaatgatcttttgtcatacttggtcaaaatggtgcttattttttggtatgtgattctttaccaaattaaattatcactctaatgttgttatacttatatccaatttttaagctttaagagtaactgcagctgtagtcatttgaagttttatgtaacaccgaactttcttattaaaaacttttaaaacaataaaatatctatgtatggtagcttttctgacaattaagacagttgctaatctgcaataattttttaggacttcactacaaaggcaagaaaaaatgactacagatgctcacaccacattacctcacctagaatttgtcttaagtaatagatatgaacaaattgctttcaaaagactgctatatgaaatatcagctagacctcattcattaatttgtttgcaataaacaaaagagataatgatggctgtttctgcaatattagtacttgaaggagcaataccaccttaggcatttgccattttatgttaaagtattctgcaagataaactgattcagctgaaagttgttaacagtatatatctagacattgtattgtctaatcattctcacattgtgatgacaaataatgtcttcaagatcaatatgacattcataggttccctgaaataaccaaaataaaatgtgttacatgaaaataaggacatgagaaaggaactgaccatggtcttcctcatctgcagatccatattcatcatcatcgttaagatctacgacctcagggccagcattatcactctcaagcgcttcaagacgagctagtgcagcctacatgccatcacataaatgtagacagaaattagagaaactaaataactgggaatcagtaaatttcaaatatccatggataaccaagaaggcaaaattcttttgtactgaaaactctgaatcctaaacagaagacgagtaaaaatgaaattaagagtacatggaaagaattaaagctctatatcctgtagagttccttctttgacaaagggtcataagcaaaacattagtgctggtataattaaggcagagcatattcgccacatatatgagcagtagaaattctacacaaaactcttcatgcaaacatctgcagaggtcatttactaaaactaccggtcaagatggcccaatcctttcaattgctctattttaacacaaacaaaacctgcaatgtgtggcccttaacattggagcaataatcaagcaaagtctggagcaggcgtttgttaccatgaaggttcagtacacaagcccaatttgcaactataattcagaacaataatcaagtgtatttggagggatttcacaaaaaaggaaaataatatggagaaattagcggtggccactggcctggatattattaacacgtctctacctctctaaaaaaaaaagtccattacaagctttcattgcaataagagaaccacaatgttcagagaacgccccaataaagggttgacacaaaaccacattaggtacatttcaaactgtaaaaactaatttctttccttttcttaatctccatctaatactggtactacaccttctgaacggccgtgagaagtgacaagacaagtcgactactcaagtgctaaatcaagagatagtattgaatacagcaagacataggatgaaatggatgtaataatatctttggattccaaagtcgactaaatcaagtgcaagtaaggaagagataaactagggcaagagctttaatccggagacaataacaattactactactaagcagctgttaatgccggaagccaagctcagccagcaaatcgagcttgtcgaatcgaaggaaggaggggaggaagcaagcaaggcatcgaccgaccggaaacgaacctgcgcgcggttgtcggagctggcgagcgcggaggccatgcgcgtggccatccgccgcgtccgcgcgctggtgcggcggaacggccccacgttctcctcctcctccccctccatcccggcaacggcgagcggagagcggcggcggcacgggtaacggcggcggcggcggcggatggcgagagaggtggagatcctcgagcggagagggcggagaggccgtggggagcttcgcgtgcggacttgggctggtctgctgcttcggcccattaactaccagcccaagactcctccctaggccgcctgctcatgtgaaggaattgggctggtctgctggttcggctcggcccatcaaccagtccaagtttcgatctccataaatctcgcatcgcaactacggctacctgcgctgcgcacaacacaagatcgtgacttcgtgagtcgtgaccgtcgtctccacacctatggacaacgcggcggcgccgccgtcatctggagcggcggggaaggagatggccacggcgggggcgctaccggacgacctgctcgacgagatcctcctccgcatgccggcgcgttccatcctccggtgccgcgccgtctgcaaggcttggcgctcgcgcacctcccatccctacttcctccgagcccacgccgcccgttcccggataatcgccgccgccgtggttgacacaactgcaattcccgacggcgaattccgcaccaccatcagcatcagacctctcggcgacggcgacggcgaccgctcgggggcggccgtgtcgtcgtcgtcgtcgttcgcctcggtgcggttcggatcacggccttttgtcctcggctcctgggatggcgtcgtgtgcctggtgcccgccggtgtcgttcgccctctcagccgcatcgaccgatacgtgctcgtcaatccgctcaccaaggcctgcaccagcgtgccaccgccggcaacccgcggcatcgtcatctgcggttacgcccacccgaccacgtcgcgctaccacctcctccacgccgacgacgcctatccctacaaccatatggcggcggcgaccatccggattctgcgagtcggggagaagaacaacgtgtggcgcaagatcgcccgccaccctgcgcctgcgtgcgtggagtcgaggacctacattcgattcggcggcgctccacccgtcagcctccacggctgcctgcattggctggtcgccccgttgtcggcggcgtcggcacggcctctcctatcggtgttcgacatggaacgggaggagttccggcagatggacgcccccgaacaatgggctcgccatgggaacctgccgcacatgatgggtgtacagatcgctcggctctccggcaagctgtgcgcgttcgtcaacgagccgagcgccagcgcgttggggatgtggacgctcgaggactactccgacccgagcagctggcggatggagcggagtatcgactactcgcgccacggcgccggcagccggaacatcgcgcgcacgttccgcaaccggttctcggcggccaccaccgcggtggaggtgctacccgatggcgtcagcggcaacggcgatgtcggtggcggtggcgaggaggagatcatgttcctgttcaaccagttcgacacgagggaggctgtgtacaacgttgggcgcgcggcgtggcggtggcgaaggattttgccaccgccgacgaggcgcgtgatggcgcacaaggagtgcatgttgccgcgtgaggtgagcttcggtggggcggcgcattttgtggaggagagtgacatcggcggccaccgttgcatttgcatatgatagtagcattgctcgttgggtttgggcttccttgttttaagccgggtcctaagatgtgcttgattctaattgtttaggtttggtagaaatgagatttaaagagttgaaagtattaccgctctatttccttctttgacaaagggcaaaaaaaataagtaccgtgagatggattctaatatctcgagtagacgtccatccgtttattgcatatcaactagatggttacgaaaaattttcaaaaaaattaacaagatagatcaatatgtaatatatcactacacaaacatgcaagttaaaattaacttcaaaagttaacactttgcaactataattcgaaacaataatcaagtgtatttggagggattcattccacatcaaagaacaatagtttggacggaatcgatggtggccaatgaaccagatatatcaacaggtttcagcctctttcattaaaacagaagcacagtgttcagcaaatgtgccaataaaaagtagactgacaagtagacaaccatacgggtacacttcaaactctacgatgaactacttttttttcttcttaatctctagctaatattagtatagtacttgtatagtacttttttaaaaggctttgataataagttatagaagacaataagaggaaaattgaatatacaagagatagattaacatggaatccgatcccctgataagaataaaatgccaagagaaatttagtttctttgcactccatagtcgaccactaaattgctattaagtgttaaacaaaacatgagcaagtaaggagcaaaaacgaggttcagagtgttaatcagggttcaggagataattaagtactaattagtagtttagtgctactactaagaagcggcagttgccgccagatgcgaagctcgatcagcgagcgaatcgaatcgaaggaaggaaggaacctgcgcgcggttgtcggagctggcgaggggcggaggccatgcgtgtgcggcttcaacttcaggaactgaagatattgagtcttggtttttcctcatgaatcatgagggaaaaaaccagttgtgattgtgtttgcttatggtattactgtgttaaaaaacaccatgagcattccaattttggatcctatatgaggtctcgagatgttgagatgcatggtcatcaatcaatttcgcagttctgaaaagtttgacgatattcggcttggcggcggcgatgccactgtccagcacagtggccggaggcaacatggacgggcaagggctagcaggattgatcatggtcatgcattggcctcgtgaggacatggaactggaagagacgggggcattggagaggaagaagagactatttgcattgagattcgtactggatcagcctcgcagccgacgcgggatgtgattctattaatctattccattatcttaaaaaaatattttcgtgtcgtgtccctagcttcaactttggcggtgccctggcaaccaaagggagcatatatagtccctgtttagttcgcgaaaagaaaatttttaattgttacatcgaacgtttgactggatgtcgggagtggttttcggacacgaatgaaaaaaactaattttataacttgcctgtaaaccacgagacgaatttattaagcctaattaatttgtcattagtatatgtgggttactgtagcacttactgctaattatggactaaatagactcaaaagattcgtctcgtgatttccatgcaaattgtacaattaggttttcaatttacctatatttaatgttctatgcatgtgtctaaatactcgatgtgatgtttttgagaaaattttttttggaactaaacaatagtagtagcatgtgggctaagtacatatatacggagagaattaatgccaaagtcatatgcaaattaatttcagtacactataaattaattaatacttcaaaaattatttcacccggacacaactaagctgaggaagaacaagaaaattccactcctcattaacaatattgggtgcttggcaatggcatgcatgagcttttgaggttgttttcgaaggatcaatccacctttgagtctaaaatattgttttcgaaggataaaatcatgtacatgtattagttagtttgaagcaaatctcataaaaaaaagtcaaataatttcaaacagatctctctcaaatatttctttttcaacaaaacctaattgattagacacacaaggccatcttaggactagggttaaagtacagcacgcccgcccaactagtactggtatatgggataaggattttctacacccatggttcacctaggtgccatggcacccaacattcgcatgcgacttaaatagttataaaaaaaattagtaacatcgattgtgattatataagtctatacacaaacatgcagtactaaatttgatctacaacaagagaaacaaaaataataaaattagacagtaaatagtaccagtacagatatcttcatatgtcgatcgaatttagacttacatgtttacatagtatcttatatattatcatagtctatgttatcaggttttataaaatttttatataattgtttaaattacatgcatataactaagtataggaaaaactttcccctagtatatgcggtagaaacagtggccgccgatgtccttctcccaaggaacctgagacgcgtcaccgaagctcacctcgcgcggcaatatgcactgcctatgcatcatcaggcagcgtgtagtcagcggcaatatcccccgcctgcgccacgccgcgcgcccaacattgtacacgacctcctcgtcaccaagctggagcaggatctcctcgccctcgtcatcgtcatcgacaccattgggcagaacctccaccacatcggctgtcgagaagcgggcacgaaaagtttgagcagcggcggcgtgtggatcgtcgtcgagagcagcaccggcggcgctgccgcacgagtagtagtagtcgatcttccgctgaagccgccagcttgttgggtcggagtagtcctcgagcacccacaaccccaatgcattggcgcccggctcgtcggcaagggcgcacagcttgccgtggcaatgggtgatgtgtattcccatcatcgtgtgcgagtgcgacaggttgccgtcccgcactccttgccccccgggggcctccatcagccggaattcctcccgttccatgttgaactgttgaagacggccacgagaaactgcgccgatgatgacgaggccagccagtgaagacagccgtgcagtctgacaggcggagcacagaggaacttaatacagaccctcgtcgttgcgagggcagggcggcggacctcgcgccacacgctgttctccccgagccgcaggatccaaaaggtctccatcgttgtgaagaagttggtgtgcatgatgtggaagcgcgacgtggtcgggtgggcgtaaccgccgacgaggaagccgtcggtagccggagccggcacgatggtgcaggcctcggtgagcgggttgcagagcacgtaccgctcaacgcctcttccggggccaaacagaatgtgcgctgcgcacaggatgccgtcccacaagccgatgacggctgtcatggatcgcaccggctccgacgccgagacgaacgacacggcgagggaagccgccaccgcccccgagcatttgcggccaagccgtctgatgcggacggtggtgcacgaccttccgcagggagtcgtcgttctagtttccacggtggccgcggcggtgacgacggtggccgtgcaggaacgggcggcgtgggcgcggaggaaatcgggctgagaggtgcgggagagccaggccttacacacggcgtggcaccgcccgatcgacggcgccggcaggcggaggaggatctcctcgaccaggtcgtccggcagcgcctccccgggggcccttctcccgcgtcgccgttcccgatcgtcgtattccatgggcgccgggaggaaaaaacgctggttagcttaattaggttacaaatctcgtactcctatattgtagtacgaacttgtgtggggggacttggggcttgggctgtcatcagttgatgggccgaagcagcactgcagcagcaaggtatagtacgtcgattcgattagagttagactgataaacgacgggactgcctgcacatttgtcgacaaatttttccccaaaaatttgacagatgtaataacagtacaattgtagtgtaattacactgtaacttatatgtaattacactataacttacatgtaactacagtgtaacttatatgtaagtttcacataattttaaatcgttagatctattacaatatttgttttggtgaagaagaaaacaaatcatagcacacacatatatgaaagaatttgttcccacaatctccattttaccgaaataacatgttaccgagagatttttgaaagttacatacaagttacactatagttacagtgtaattatatgcaacttacagtataattacactacgattgtactgtaattatatctgtcaaatttttggggaaaaatttgtcgacaaatatatagcgaaatcgataaacgacaacaccgagctatttaaactgcaaaacaccaaacctatcagcaaacgagctaattaaaaccggacctcccgctattgctgcactatcctccactgtaactgtttgagaagagttctagctacttgctccgatataactttaacccctgctatagctgtttgagaagctaaccgttaaatgtattagcccgctatttaaaatattgctaaacacatatcgagatcaaagcccttcaggaagcgaattcccgggcttcagacttcagcaggactttctccgaccaatcttcaatcagcttttgatcctttggtgcagacaggtctccgatccgcatgcggaaatctagttttggctgtttgaaaaaaatatttctgtacaagtggtatatttgattatgtatcttatgtcaatatatctcttggtatattcggtttttctgttattgtcttcccacttctcaccagccgttcagaatatgcaaatattagctagtgattaagggcaaaagaaatactccctccgtccctaaatatttgacactgttgacttttttaaatatgtttggtcgttcgtcttacttaaacatttttgtgaaatatgtaaaactatatgtatacatgcataaaaatgtatttaacaaagaatcaaatgatatgaaaagaattaataattacttaattttttgaataagatgaaagatcaaacatatttaaaaaagtcaatggcgacaaatatctaagaatggagggagtacaatacctgtgtagttttgtctactcatactcctctttactcaggtgttctcttaacagtactgcgcctctcttctggtctgtcagcatggaaaagcaaaggcagaaagcgcagcatgtgagcgcgtgtatactactccctccgtattttaatgta

SEQ ID NO: 23171 - DNA, 8190 bp, Oryza sativa
aaacgtttgacctttcgtcttatttaaaaaatttatgtaattataatttattttattgtgacttgatttatcatcaaatattctttaagcatgacataagtatttttatatttatataaaaattttgaataagatgagtggtcaaacgttggttaaaaagtcaacggcgtcatacattaaaatacggagggagtatttgaattgtatagttttaatttgtattgtatttatctagaaattagatgtcgagggatatgcagaagtcacccgcaaattaatttcagaagtaaaaattaacatttccaaattatttcacacggacacaactaattaaggaagaacgtactccacttcattatatgcttcattttcttcaatattagctgagcgtttttgatatggacggtggcgcgatcttcgctgcgaaaacctgcctttgtgatgatggacttactacagataaagcattttggaaaaagaaaaaaaaaagaaagaaagcacaacaaaaaaaaaaatcaatattttgatgattaataaaaaacgaaaaaaatattccctccatattttaatatatgacgccgttgactttttatctaatgtttgaccattcgtcttattaaaaaaattatgtaattatcatttattttattgtgacttgattcatcatcaaatgttctttaagtataacgtaaatatttttatatttgcataaaaaatttgaataaaacgaatggtcaaatgttagttaaaaagtcaacggcgtcatacattaaaatatggagggagtagtacggaagaaaattgcacaggactccagtcctttactcatccgaaggaccgtgcttctttccgtgacacctgtccgtgaacgtctccgacatgtccagcttctccttgccgtcggggaaccgccaccagtcgaacaacgagtgcaccagctgcagaacaagttgtggacgaacacctttgccagcgcagtccagcactaattaatgtgttctaaagcaagaatgtgcaggtaaggtagcaaaagcgagctcagagcgttaatcagaattcacaagataatagttactccgcagtatctgttgctgccaaaagcaaatctcatctcaggtaacaaatcgatcgagcaggtcaaattaatcagaaggaattaattattgagaccggggagcaatgcatgaacgattggacgacgaggtcgacagccaccgatcggaacgaacctgcgcctgcgcggcgacggcccaagcccattatcagtttctgctgcttcggcccattagcacagcccaagcccctctcaatccaaccaacgacacgacatcatcgatcatgactagcgcgtttccttgcggatacggcggaggcgctgccggacgacgtggtcgtcgacgagatccaccgtgcaccaccgtccgcatcaaacggctcggcgacgaaagctcggaggagcagccggcttcctcatgcgccgcgggccgcggccgtgtcgttcgtctcgttgcggtcgcgatccatgatctccgtcgttggcttttgggacggcgtcggcctcgtcacggcctctcgtggccgccttcgacatggcacgggaggagttccggctgatggagacccctgagcaatgggcggcggcgtgcaggcccacgagctcggctgcgcgcgtagtgagaaggatacactgcacatcacccgacatcgcggcaagctgtgcgccctcgccgacgagcagctggcggccggcgccaccgacgcgttcgggggtgtgggtgctcgaggactactccgacccaagaagcagctggcggctccggtggaagatcgattactcttgcggcgccgccggtgtcctcggtggaccagatggtgcttgattctttcgcgcccgcttctcgacagctgctgtggtggaggtgctacccggccgatggcatcgatggcggcgaggagatcctgctccagctcgtttgctgagagcaaatagttataacggctaaattgtacatgagagcaaatagttagaactcttcccaaacagctatagcgggagatagcgcagtaatagcgggagttttaaaaccctggtgtttaggcgtccggttttaattagctcgtttgctgataggtttggtgtttcggatccctcttttcccaacactcccaacttgttttccgcttgtacgtttttcaaactgctaaacggtgcgttttttgtaaaaagtttttatatgaaagttgcttataaaaatcatatcgatctattttttaaaaataatttactaatacttaattaatcacacgctaatgaactgctctatttttcgtacgcactattcctgttcggaacacctcctagcgaacacacagctcggtgttgtcgtttatcagtctaactctaatcgaatcgacgtactataccttgctgctgcagtgctgcttcggcccatcaaactgatgacagcccatgcaagccccaagtccccccacactggttcgtacaatatactacgagatttgcaacctaattaagctaactatagcggtttttcctcccggtgccaatggactacgacgatcgggaacggcggcgcgggagaagggcccccggggaggcgctgccggacgacctggtcgaggagatcctcctccgcctgccggcgccgtcgatcgggcggtgccgcgccgtgtgcaaggcctggctctcccgcacctctcagccggatttcctccgcgcccacgccgcccgttcctgcacggccaccgtcaccgccgcggccaccgtggaaactagaacgacggctccccgcggaaggtcgtgcaccaccgtctgcgtcagacagcttggccgcaaatgctcgggggcggtggcttccctcgccgtgtcgttcgtctcggcgtcggagccggggcgatccatgacagtcgtcatcggcttttgggacggcatcctgtgcgcagcgcacatactgtttggccccggaagaggcgttgagcggtacgtgctctgcaacccactcaccgaggcctgcaccatcgtgccggctccgtcgaccgacggcttcctcgtcggcggttacgcccacccgaccacgtcgcgcttccacatcatgcacgccaacttcttcacaacgatggagaccttttggatcctgcggctcggggagaacagcgtgtggcgcgaggtccgccgccctgccctcgcgacgatgagggtctgtattaagttcctacatgctccgcctgtcagactgcacggctgtcttcactggctggcctcgtcggcctcatcggcacagtttctcgtggccgtcttcaacatggaacgggaggaattccggctgatggaggcccccggggggcaaggagtgcgcttcggctcgcactcgcacacgatgatgggaatgcacatcacccattgccacggcaagctgtgcgccctcgccgacgagccgggcgccaacgcgttggggatgtgggtgctcgacgactactccgacccaacaagctggcggcttcagcggaagatcgactactactactcgtgcggcgccggcggcgccggtgctgctctcgacgacgacccacacgccgccgccgctcaaacttttcgtgcccgcttctcgacagccgatgtggtggaggttctgcccaatggtgtcgatgacgatgacgagggcgaggagatcctgctccagcttggtgacgaggaggtcgtgtacaatgttgggcgcgcggcgtggcgcaggtgggggatattgccgctgactacacgccgcctgatgatgcataggcagtgcatattgccgcgcgaggtgagcttcggtgacgcgtctcaggttccttgggaggacatcggcggccactgtttctaccgcatatactagggggaagtttttactagtatcatgcatgtaatttaaatagttatataaaaaatttataaaacttgataacatagactatgataatataagataagtactatgtaaacatgtaagtctaataaattcaatcgacatatgaacatatctgtacaggtactattcactgtctgattttattatttttgtttctcttgttgtagatcaaaattagtactgcatgtttgtgtatagacttatataatcataatcgatgttactaatttttttttaattttttctataactatttaagtcgcatgcgaatgttgggtgccatggcacctaggtgaaccatgggtgtagaaaatccttatcacatatactagtactagttgggcgggcgtgctgtattttaaccctagtcctaagatggccttgtgtgtctaatcaattagttttgttgaaaaaatttttttgagagagatttgtttgaaattatttgactttttttacgagatttgcttcaaactacctaatacatgtacatgattttatccttcaaaaacaatattttagactcaaaggtggattaatccttcgaaaacaacctaaaaagctcatgcatgcactggtggagaaaccatctttcgtcggtcggccgatttccacagtagtcccggatgcaataaaaaccggggctaaagatgttctttagtcccggttcaaaagggtaacgggcatatttgatctttagtcccgggttgtgttaccaaccgggactaaagatgatctttagtcccggttcgaatgctgtcagggtctgtcaggccctcccggtatctttagtcccggttgataacaccaaccgggactaaagatgttaactttagtcccggttggtaataccaaccgggactaaagatcccggtgatctttagccccggttggtgctaccaaccgggactaaagtcccacccctatatatatgtcttcttcctcctccagctgcccgagcaagcttcaaaatttcttcaaaaaagaggggaggtcatgccaaaatttctattgaatttattttggtgattacatacaaatcggaggtgcctaaaaggtttgcaacttcatcctccaatgttttttttgtcatactacatttgcacctatgttttgcacactttttttgtctccaaaatgtagttgtaagttgatgagagagaaaatgtgtgtggggaagaaagaatatatagaaatttagttcatttgctaaataaggttttataaaatagttgagaaggaaaactctagtgaaagttaatcttaaataatagaaaacaaactaaaatgaaaattaaaagaagtaaaacacattaaaattagtttattacttaacaaatagtttttaagaattatttggtgtaatattttatgatttttgtatgaataaagatatcttataattattgtatgactgtcattattgtaagaataattatttgtgtacggtttttttgactcatatagatggatcggcaatggatgtacgctgaccggcggtccaaagagtttattgacggcgtgcactattttttgagagtggccgaagctaacaggaaaaggggttttatttgttgtccatgcaataagtgtaagaatcagaaggagtattctgcatccaggactattcatttccacttgtttgagtcggggttcatgccaagctataattgttggacatcccacggagagcaaggtgttgaaatggaagaagatgaagtggaagacgacaatattccggactttgctcaatttgttggatttgaaggaaatcaaacgggcgaggaggaaatagctgctgatggtaacgacgttgcggatgatcttggtcaaatgttgcaggacgccagggaggactgcgaaagtgaaaaggaggcccataaattggacaagatgttggaggaccacagaacttcgttgtacccaggttgcgagcaggggcacaaaagttggataccactctggagttgttgcaatggaaggcaaaaaatggggttagtgacaaggcatttggcgatttattgaaactcgtcaagaacattcttccggggggaaacaaattgcccgagacaacgtacgaggctaagaagatagtctgcccgttaggactggaagttcataagattcacgcatgtcgggggaaaacggattgtatcctatatcgcggtgaggagtacgagaacctagaagcatgccctgtttgcaaagcactacgatacaagattagacgggacgatccaggagaagttgacgggcagctaacaaagaagagaattcctgctaaggtgatgtggtatttccctataataccacggctaaggcgtttgttcaggaacaaggggaatgctagaatgttgcgatggcacgctgaagagcgtcaacaggacgggatgctgagacaccccgccgatggttcgcagtggcgaaacatcgatagaaaatttaaagaatttggaaaggacgcacgaaacatacggtttggtttgagtacggatggcatgaatccttttggagagatgagcagcggccatagcacttggcccgttacgatgtgtatctacaacctccccccctggctatgcatgaagaggaagtacataatgatgccgattattattcaaggccccaagcaacctggtaacgacatcgacgtgtacctaagaccactggtcgaggatcttaaacagttgtggaagaaggaaggtgtccccgtgtgggacgaggacaaacaggaggagtttaacctacgagcgctgctgttcgtaaccatcaacgattggcctgcacttagcaacctatccggacagtccaacaaggggtacaaggcttgcactcactgtatggatgaaacagaaagtacgtatcttaagcactgtaggaaggttgtatacatgggtcatcgtcgattccttgcagcaaaccacccggtacggaagaaaggcaagcacttcgaacataaggccgaccaccgtacgaagcctaaacatcgcagcgggaaaacagtgtttgctatggttaaagatcttaaagtagtgttcggaaagggccctggaagccagcatatagagagcgaagatggtcacgcggcgatgtggaaaaagaactctatattttgggagttaccatattgggaattcttggacgtacgccacgcaatcgacgtgatgcacctcactaagaacctttgcgtaaaccttcttggcttcctaggtgtatacggaaagtcgaaagatacactggaagcacgtaatgatctgaagcatatggaacaacgcggcgaccttcacccggaaccaaaggagaaaggaagccattacttgagtccagccagctacactcttagcaaggcagagaaggaaagtatgtttgaatgcttggagagcataaaggtaccgtctggatactccacgaatatcaagcgaataataagcacgaaggagaagaagttcacaaacctaaagtctcatgactgtcacgtgttgatgacacaactgctaccagttgtaataaggggtatccttccagacaatgtccgggcaacaataacaaagctatgtgcattcatgaacgcaatttcgcagaaggtcatcgatccggatagattagatgcccttcagaatgaagtggtgcaatgtctcgtcagttttgagttgatatttccaccttcatttttcaatataatgacacatctgctttgtcaccttgtgaaagagatccgtattctcgggcctatgtacctacacaacatgtttcctttcgagaggtacatgggcgttctgaagaagtatgttcgtaaccgtgctcgtccagaggcaagcatcgccaagggttatggaacagaggaggtcatcgaattttgcgtagaatttatcgaagaccttcgcccaatcggggtaccggaatcacgccatgaagggagactacggggaaagggaactctcggaaggaaagcaattatgacggtagacaacaatttattccgtaaagcccatttcactgttctgcaacactcttcattggtagctccttacatcgaggagcacttggctctagttcgcgccaggaacatcggtaagtccgatgtatggattacacggcatcacattgatactttccccgcgtggctacgacaacatctcatgggtaacgagtcgatcaaccaacaacttgccttcctggcgaggggaccgtctgggtcgatcgcgacattccagggatatgagatcaatgggtacacattctacacgagagcccaagacatgaagag

SEQ ID NO: 23172 - DNA, 15456 bp, Oryza sativa
  unsure (1)..(15456): unsure at all n locations
agggttggcacatcataacggaagtggacgaagacggccgacctagtgccccggtagaagccgccaagaactatgtgtcatgcccggaaattcactagtaatttccgaacttatttgtgtataaaaccctcatccaggaatcagccgaggtacacaaactgacaatttaatatacaaatccatcataataacgttacatacttacaaaagaaaagaaaacagcagcggaattacggtctagcgatggcttcagctccactcccacaggcagctcaactggggtataagccaaacgtcttctccttctggatcctttctcttcaactgaggtttgatggttattgcaagaatgagcatatgacatactcaacaagccacacagcaaatatgcaagtgcacaaggataccaaaggatggcataatatagggttcatatgcgaaagcagcatttaacaaagagttgagaatttgtaaaacagtagagtaattaatcattaatattaatcaacactgaacagcacacccatgctgcacaggcccaaccaaacctgaataaccaaccccggtcatacagatcaaacctccaaaccaggaattatccattccaaatcaggagtcaaattaattatcacattattatcattaatgagtagtgtgggactaatcacaaaaaacattgctcaaagggttgtttgggatctgtgtgacttgccttgagcttcctcaaacgcttccgaaccttcctcaacgaaaacgctctccttcggaacgtcggaaactaaagcgaaagaacaaaatcaagaacaagcataaatagtacatgtggatatttttaacatgtagatcttgattttagaaaaaattagcaacttgaaccactgaaatccgagttacgatgatttagttatgaatttccgaagtttaaatcgattttcatctaataaagaaaactaaaagagatttatgacgtcatcatcgccggcatgacgcgagcgacgacatcaccggcgctagagagatcggccgggctaacggaggacatctacgcgtagaggacgacgacgcgaactcaccgatgcaagaaaacgcgacgaacgacgaagaacgacggccggcggcgaggttctatggcagcgcggttcgggtcggcggcggcgacggcgctccggcgtccggcgacggcggcgagggggcggccgagatgcacctcctccgtgcgcacccaacggcggcgaaaagaggcggcggcgacggcgctagcggcggcgcgacgcggctgcacgatggccggcggcggcggcgactaagactacgcggcggcggcgctacgagcgacgagggagctcgggagttggggcaaacgaaagaggacgactaggggatgctatttataggcttggattgaagagatcggactccagccgagaggaatcgaagctggaaaatcttcgggttagtttggagagataaactcaaaacgaattcgatttggtttatccggatgaaattgatctccgaaacgttaggggaaaggaagaggataaggtggagatgatttcccctcaactaatcggactcgagggcgaccggatgaggcgaatttggtggagaggcggcggcggctcgggctcggcttggcaaggcggctggccggaggtaggggatgggtccgacatgtgggccccacatgtctgcggcttggggagaggaggggcgggcggttcggctgggccgacttgggccgctcggcacgcgtgaggagagagagagagagagttgggccggaaacggcccaacaacttagaggaggattttaaagagtttttcaattaaaataatcactgaaatgatctttgaattgttaaaaatacttcaaatgctcaaataatttcaataaaaaacctgaaaatacttggacactcaaagtatttaacaaaattaaaatcagatcatttaatgattaatttaatatgtgggtaattactgaaatgttcttggtatgattaaaattaggaattgaggtccgaaaaatccgagaataatccagagagtataattaaccatggagaatttaataaaaattaaattcatccatgctttatatttaggaaattttatttcccacatttaacttcacttgtaaattaatgaacatttaatataaattctaataataatttgttaaataatttataaatcctaagacgaaaatcaggatgtgacaactatgtacgtcacagcggttgggttgtgcgggataacgtgaatgtcagtacggtgtactggcacagaaaagggcacgcggagatcatgagagctttgtcccagattcggagaaagagatgatgtggaccacaatgctcgagacattcacccttcccgcgggtacagaggacaaagtgaaaaggtggactctgaagaaaatggcagaacagtttcagagcttcaagagagatctgtaccagaaatatatcctgaaggggcagacaccgaacttcgacacattcccaaagctaagggatcactgggacgagttcgttgcatataagacaggtgaacaagggcaggcgatgatggaaagaaacaaagaaaatgccgccaagaagaagtaccatcaccacttggggtcaggcggctatagcgtcgcgatgccgaagtgggaggagatagaggctagcttgcttgagaggggtatcgaatcggccaccgctaattggccggaacgatcgaagttctggtactatactcacggtggaacgctcaacccagctgatggctccctggtcttcggcgatcagatacgcgaggctgcgcgtcgactaacagacacagtggaagcctcttctcagggcatgttccgaccggacaaagggaaggacgagctgtcactcgccctgcagactccagagtatccaggacgaacacgagggaaaggggtgattccttggaagattgggttcaaggaggacatccacacgtacaggagtcggatggggagcaaaagagataccgaggcgaagattgcagatcttgagttcagggtatcgaactacgagctcagcatgcaagaggaggtggcaaggaagggtgatgaacgcatgaccacacatcggtccaatgatccctagccgaccattcctcctgcaatggtgagcccgtcaggaaattgtagcagctgcgcctcaacggggcaggtaggatcacagagcatggacgtcatgcaaacccaggacgaaaccacctgccccgttgatgacatcactcagcggacaccatgtgagctgcatatccccttcaggaacttatcaataaaggtaagctcgtagtttatagattttagatttggccattccgctagttgctgcttatatatgttgattattaataaataacctctcaccacatgaaggtggcgtcgggcatggccatcccaacggacccttcaggtacttaccactgtaggccgattccagcaagatactccaaggtcgaagttgagttggtcgaaggcgcgtacgaggacctcgagctagattaccctagaggagacggtgagacacatctacgagacacaagccacgccattattctatggcgcaagcggtacatcatcctccctaggcgacaagcggcgtctcgtgcaccatctcctccggctctgccatctcctcctcatgctcctgcaccatctcctcctcatgctccagcaccgtctccacctcaggctcctgcaccgactcctcctcaggctcctgcaccgactcctccttaggctcctcttccggcaccttccaagtcaagggccccccaagctccaccgcctgcccccacaagggcaacgaagaaggcgaaagttgacgccgccaagaacaaggacccggggtacgattgcatgcaagaggagcttgacgcttacatggcatcagaagtcaggagacaattcaagcctcgaagtccagaaaagaagattcctatagacccgagtgtcaggaacttcttcaggggtatgtctgcacctgccaaggaggccataaagctatcggactatgagcgaacactcaagaaagcatcttctagaaagtccaaaccagtcccccagcttggagagcaaccaaaccaggagatcgagccattggtgaccggtgaagattttggaatacaagactttattaatgacaccgggctaactatggatcaattgctagaagacgcaccaatcgaaaaggcggaagtgaaatacatgtacgaactcggtaaaccgcttgtcaagcctgagctgctgcagtccctacccacacaaatgtacaagttccatcagctgtacatggagatgagcgccaccggtagagagatgatcggagcgaggatcagggacaaggacttcttgcaaggagatgacattctctggatcaatttcaagggaatctacgaactataccagctggacgccctcgacgtctctattatgagttgctggattttgtaagtatatcgttcagttagatttcttactacgtctactttaattaattaggtccttgtatataagtagactctatatataatatatactcccttttattgttgtagaatggagatccaaagggcccgacggcagggggttttcgatactggattcatcgaccctcggaaagtaaacgttgcaatgctcgaccaatatccgcaagccacagaggacaatctcgtccatctcctgaaggcgcaacattacaagacgttcatactgttgccgtacaacacagagttagttcaattttactgtcttcctataccaaatttcattcccgtatgaacatgctaagtatttcatatgtaatgcatcccacgcacattgcagattccactatgtgcttttactcttcgacctggaggcctgcaccgtcaacgtatatgactcaatggataaaaaagagtctacatttgacaaggttttcgaacttatagacaggtactgtcataagttcctatattaattaagaatcttgttatagttaattgctactacgaatcatagctttaaactgcatgtagggcttggtatcggttccgtcatttggtccgcggcaaatggagagaaagacttaggcggaagttcaaatttcctgtgagtacacatgctctacatttatatttctccgattcaaatacatacaagtgtatattaattagatatctcgtcgtttgtcatttatttatagtgcgcaaagcaaaagcaaggaactaacttgtgcggctactatgtgtgcgagtattgccactgccttgcagaccaaatcatcaccacaaaagagctcgatgtacgtacaaataaattcaaaatttcattacgtatcgatttgttgtttaattactaatcaatttcatacattcatatagtttattggcatgagggataacctgatcacacacaaggaatttatcgcggcggttcaagaacaactcatgggattcatcaacgaacaaatccttgatcctaagagtgaattctactacgacggaaacacaattcataagtccttagcttctgagctagcgactactactacgtcgaaatcgtagctagctaggacatataatggattgtaattaatacatgactatgtttctatatgcatgtgtacacattttctataatgtaaatatatattttggtcatatatatatatatatatatatatatatatatatatatatatatatatatatgtatgtataaatacatatatattatgcatgtacatatgtattgaaacatatatatgcatggtttatatatatatatatatatatatatataaaccatgcagcaacagggccatgaaaaaaaaaggtcagctcgatctttagtcccggttggtgtcacgcccagaaattctcgaatagaattccaagcagaatgtgcattaaaatccctgtccaggaccggccggggtacacaagcgacaaagttgacatacagatccacgtcttacaaacattataaaagtcttacataaatgcagcggaaaacttaaaggataactggagctaagccttgacttggactgcagcgggaacaccactccacaggcatcctcgacggcacggacgaagcctactcctcggagaaaccaccatctgacgcatactcaaactctggggtttggggaaaatagagcaagactgagtactacccactgcactcagcaagtcataccggaatagaggtatgatgcagggaattatcaaggggtagctatattggttcatttgcataaagcgggcatttataaacggaagttgaaagcagaaaacagttgtaataattaatcaatattaatcatccactgtccaacgctataccacgttgcaacaggcccaaccatccacctatattattcaattccattagattaatctagggtgagtctaatcacggtgaatctggttaaccgcccataaccgcgggcacggctattcgaatagttttactctgatcagaggtgtacaactgtacccaccagacacagccccacgacacgttaccgtgcgccgacatgccaccacgacataccggaaagaggccgcgacaggacccttcgcataaccccctctaaccaagcacaccacacctcaggtttcacccccactcctcgcaaggcagcgggcagtcccctcttgtgcctaggtgaatccggaggccgcataggcagtcgggggcccatccaaactccatcacgcccacccttgcctggatgcgtcggctagaggaaagctacactacaagcccagccgttgcccacgctggcttgtggtaagtacgaggaattcgtccagggtttcccgcgaaccggtccttaattgccatgggcgcgaccatccaaaccatgcacccacggcccaccatttaatatattttaattaaccaacaccggagcggtgagtattaaccaacatcattactagaatgtgattaatgtagtccctcattgtgtgctagttgaactaagcaaagttaagcattccctagtccaatctctagtcatgttatatcccaagttaacaaaggaacatggtacaagatagcatggccatgacagtaggtaaacatcccatagtaatattataaaacaatgcagaatttaaaggaaaacaatagagcatttgcaatataggatcaacatgttcaagtgactagcatgacttgccttgctctgcagctggaggaacttcggcgactaattcaaggtaaaccggagtgtcgggagagccggaatctaagcgacatacaaagcaaacaatacaaacaggctataagactactgaaacagagaacaaaaccatttttaatggattctacacatttttcttgatttactgagacttgaatgggcttaaacggagctcggatgaattagttaagaattttagaagattcactatgtttttactataaacggaaaaatccttaattaaattattgcgcaataaataaatcccggggagagagagggggcggcgctgacatgcgggccccacatggcagtgacccgaggagggcgctccacggcggaccaggtccacggaccgggggagaagcggcgtaccacgtggcgcacacgtggcaccgacgcggcggtcacgcggcagccgaaccgacggccccgatctacccaagggtagatcggacggcgggtgtggctcgcggccggcgcgcgcaggcacggctcaagctggcccggcggccatggcgcatggcggcgcggcgcgcatgcggcggtggcgcgagacggcgaccgacggcggagagcggcgtcgtgggtggctaagcggcggcgcggcggctagcggcacgggagagagagagggaggggaaggggaggcctcaccgacggcgagcaacggagggcggcggcgacggcgggacgatctccggaatcacctaagaaatcgaaatggagggattagagggagggaggcaaaagggagagggcgagggcgccggccgaaggtnnnnnnnnnnnnnnnnnnnnnnngcgcacggcgcggagtggattccgacggcggattccggtggggaaggggtggacgggatggcccgcacgacggcgaacgcgacggcgtcgatagcgcagctcggcacggcggctagcggcgaccggagcggcggcggcggcggcggagaggagggcgacggcgctagggcgctagagggcatgggagagctcggcgagatagggaaaaagagagagggggtggcggtggagcttaaataggggagggggagctcggacgtggccggtagagtcgggaatcgccggccgacgtggggagtggaggaggagagagaggcgggattcgaaaatcgaatcccggccgtttcgagcgcgggcgcgagcgagagagagggggaaatgggtgcggggaacgtgggcacgagggcgacgtgggcgacgtggcccgggaggcgcgggagcggggcacgacggcggttgcgggcgcggtggcgccggctggaggaaggggacgggcccgacaggcgggccccacctgtcggcgaccccaggggagaggaggcgggcggccagttcagctcggctcagctgggcctcggccttcggccggcccagcgggaagaggggggaaaggagaatgggccggcggcccaattgaaggaaaaagagaaaagaaagaaaaaaaagaaaaagaaggaaaatggattttcctgggattaaatattgcttgtgctcaattttaattggttaaaattatttctagagcactgaaaattccactaaaaatcttgttagcgtatttcgacatgtagaactcaagaaaaattccacatgacaaatccaattattatttgcattaatttattagggttttctcttgcttttacaccgatattttctctggtggattataaattcaatttaggcttgggaaagaacttcaggatgtgacagttggtgttaccaaccgggactaaagatcgatctttagtcccggttatttcacccgggactaaagatagcgatctttagtcccggattggtagtcccggtttggaaactgggactaatggggggttacgaaccgggactacaaacactttctccaccaatgagtcgtccccctcgaacttagagaccttgactatacaaaataaaccaaatgtttcctaatattcacaccctaaataaattgcctcttttggtcttctttcttcctatacaacttaatagtttaccatgtgaaatggttaaaccagaaagtggatgaactagagtagattaacgggaacacagactgtggtcaccatcgcgtcttttttcctcagcaagcttgaatccaagttgacacttgatgtctctgctttcacccaaatttggcacctatgttaaaaataggaaaacattgccaaaacttggaaggcgccggtttccttcacggagccggtctgaccgccgtctacgggccggcctgaccggtgtaaagggccggtctaaccgacggtgtgtggccagtctgaccggcagaatttgatttcgagtccgttttcgttggatctcgggattccttgctcgggagggtatgtctcgggttttcattagtttctatcccgagttggacgtggaggaggacccgtaggaggcaagactaacccctatataaggacaaggccagttcaattgaaaaaacaatatactctcaacacaatttagccaatcgaatcactttttcaatattatatttacttttcgcctagttctagcctagttcgtccatatttgtcgatttgcacttaaatcgtctgtcttcactgcgagagtgcgaaatccctttgtaggtttgtcccgtaaaccttccgttcgcccatgagacgggtgtttatcgcttgtttcatctaaatcagctccgctagccggtttaatctatcaaacccatcttgatctagcttttgttagattgaggtggttggcgactccatatcactgcaaggtgtttaggtctcccgatcgtgatcgtcttcttgccaaaaaaaagttgttaacacgatttttagcgactccgttggggaacgacttcatcaacatcattgccaagtgtgaagtggacccaaacaacatcctccccatcactttggaggattcggatgagtaacaacaccaagagatcgaatgtcatgtaaaggcgacgccagaggcattcttggcgagatgcttcatcaagactcgtcaaagagttattcgtaagcccggccttacgtcctaagtcaccgtcaatgaggtaaatattggtgacattgctctttctgttcaaaagcttgtagcaagttccgtagatgaatctggtgccgctactttgaataataaatttgagcatactatgagttcttattttgataaaagaattgagtcatttatgagttccaaattcgaccgacttgtcacctaattctactttaagtactagtcaagcccctgtacttaaaatagatccggtggaattgtacccgtgcatgaaatagatccaatcactaagaatgttgttttgcaccattatctagtacataatccaccagttgctcttgctaatccacatattcctccacatgtaactaatgcctataatgatcctaatgttggatagcctcaagatgttagatatgtccaatataacaatattgcgccgccaccaccttttaggccacaaaatccacaaccaaagcctgaaaagatggaggagcatgtgaggaatattactagagaagcatttggaattgagccaaggaatcatgctagggtttaccaaaagtcgtattctgattattttgataacatcccatatcctcgtggtttttgagtgcctgtatttactaaattaaatggtgaagatagtagaaccacatgggaacacacagaccaattcttagcacaatgtggtgaagctagtaaaagggatgattttaaattgcgcttattttctttatctttgtccggtactgtttttgcatggtttacttctttaccagcaaattctattcatatttgggctaaattagaacaaaaaattcatgattacttatatactggtgaaactgagcttaggttgtctgatttgacatcggttaggcaaaagtacaatgaatacgtcactgattatgttaagagatttagggatgctagaaactaatgttttagtttgaatataactgaaagagatttggccgaccttgcttataatggtttacttgctcctattaaagaaagattagaatgtcaacaatttcttgatgttagtcaacttatgcaaaaggctttagctcaagaaaaccgggttaaagaaactaagaggtttattaggtctaatgataagaagcctaatgctagtattgttgtttgccctgatgatattgattccgataatgatgatggtgatcatgatatttatattactgagtggtcatggactaataagaataaaccttttctttgttctaacttgacaccgactactcgcaaggatcagcaaagtgagattaagaatagttttgatgtggccaagtgtgataagatttttgattatcttttgcaaaaaaaaaacaaattagattacccagaggccatgtcataccatctttagaggagttgaagagtcgttttttttgcaaatggcatgattcttattctcatactactaatgaatgcaatgtgtttcatcggccatagaagaaggatgattgaaatttactgaaggttctaagatgaagctagattatgatttttttttcctgtgaatactattgatttcaatgataagaatgtgttaatttggcgggagcaagctatatctacaaaggggaaggaagttgtgataggagaatctagacctaagatgattgtgccaaaaagtctagaagttggtgtatggaaggagaataaaggtgaagcttcaagttctagaacgccacaaaagtcaaaggcgtctttttagatgcttttgaacaagtatgggaagaagagtgccgaggaacatcctaataagggtaaaagaccaagatcacttccttgggagagaatgtgttgattaccaaggcaattggagcaaccttttccttacaatcctcaactcatgccatgggggccttgtccaatgacgccgctgggttatcctttcccttacttcatgccatgaaaggcaccaccaccaatgtacgagtacatgctgccaatgcaattttataaaggttagctagagccacgaaggtcagtgcatgagcggttgtctttatcaagcaaagaccggtttcagtcaaaaaatcggtttgaggaggaaagaggaggaagaaagcatgctaaagtggagccaaggacttcgaaggtgattactgtcaaagtggggtcttatgatgtaccaatacctactggaaatagagccaaggtggtccagagtaagaaaaccaaagccgggaccagcataacgcagagtgctggtctgaccaggccttctggccggtctaaccgcgccttagggccggtctgattgaagccaattaggagctggaccatcgcgaagggcctgtctgaccggcggtcttcaaccggtttgacctggtctcgaggtcggtctgaccggggtcatctagggagcagttcgggagcttcatcttcatcaagtaaaatcaattagggacattacattgctcctgggatagagacaaattaaaggtggatgcctaagaatttgacggcttcacaaaagaggaggttgcaacatcttcgtgctcaagaaatgagggaaaagaaatccgaagagtggagagatatgagattcaatgagttgcgaccaccagcaagacaagagtggaggcctaagccaatggaggtctaaaagccggtggttgctcaagatgaggaagggaagacttgaaagaagatgagccaccaattgttagtaatgattcaccgccaagggaacatggatgtcaacatggtgtgtatgttgcctatggagttccatgccatggatgaggccagaattgcccaactttcactaggaccaagggatatggtttttgagaagcctgatgagtctaatcgtcatatgaagcctctatatctcaagggacatattgatggaagacgatctttaggatgttagtggatggtggtgccaccgtgaatttgatgccatacttactattcaagaagttggggcgtggagatgaagagttgaagaagaccaacatgacgctcaacggcttcaatggtgaaccaacggaggccaaagggatcttttccgtggagcttaccataggaaacaagatgttgcctaccgctttcttaatcatcgacgtgcaaggtaactgtagtgttattttgggttgttgttggattcatgccaattgttgcgttccttccaccttgcaccaatgcttgattcaatgcgacaataataatattgagattgttcaagcggatacatcggctgaggttgcaatggccaatgcttcaattgaatggcaacatggaaacattcaatgcttgtcggggttagatctttctagctatggtttttattagtatttctaagatggctttgtacctatctctttaaagccgtctagttttcggcttggcaatatagctatgtatgatgagtaaggatgctaatttagagtggttgcaaaagagggtacaagaatatcggtatataaagaacgatattggtgagtccattgaagattttgctgaagtggagaagttggatcaaggttttacatcggttgatccattagaggaagtagatataggtgatggaactataccaaggttgattataaggttaaaataattgagttgtttaatgagtatgttgattgttttgcatgggaataccatgagatgctaggacttaactgtgagcttgttgagcatcgacttatgataaaattaggatttaggccttataaacaaccacctcttcatttcaatcctctcatatacgatcgtgtcaaggaaaagatagaccgattgttaaaagcggggtttattaggccatgtagatatgcggagtgggtgcccaatattgttccggttgagaataaaggaattggtaagattagaatatgcatagattttagagatttaaataaagttactcctaaatatgaatatcatatgcctatagccgacatgttgattaatgatgcttcgggacataatgttattagctttttagatggtaatgctgactgcaatcaaatctttatggccaaagagaacatgttcaaaacggctagtgcaacatatcaaagagcatatgacttttgggttaaagaatgccagtgcaacatatcaaagagcaatgagtttgatctttcatcaggataaaaggactaatacatctaaagcgacataatagccccgatagcgcaagccatcgagataagttacctcttgtcaagaaatcgttgtcgatgccctaacttgaagcaagaactcatcgaaaagtaaaaagaaaaggatggcgatgcatcggaagttgtattgattggattgtcgtcccttattacaatgatctggggtttatatttataccccgagtacaaaacttgtccattatggacacgactcaaactttcctaaagataaaatacaaacaggtccacgtggcagactcttaacatatctctaactcaaaccggcattaatatcctaattaatagatacaattgccttaaatgacctttatctctatgcggcaatgacggttatcccaatcgaggcctaaaccgagcccaagtcaagttgtatcaactgctcgccatatcgactcagtcatactcttactctattttcagtagatacgctacccagtcgattcgcagtccgttttggcaaagatccaatctccttcgattccgcttcgatacccaacttcaaatctgatctgatcttgccaaatttcactgttaacaactgctcccctcatcgaagctctccgctttccgccgccaccatgtcgtagtccatggcgaaatccgtcccgatcctggatcaagccgtctcttggatgcgatcgatggtgacgacggcgatgctggaggaggcggtggaggaggggatgctccctcctcaggttctcatcggctggcgggaggactccgaggaggagttcccgaccccgaacaccgacaagattgtattgttcctccccttcttcctacgctaaattgtacctgtcgctcctggaatttgtgctagcactcaaggaagcaagagcgcctcgccatgagtcgcgctgcctccacttggttgcagaacaccattcccaacgcccctggatggtgagccaggcgtcacatgcatgagcggtggcaaaattgccgacgttgaccctggcagtgcaccacccatttgcaccgctgctgtcggtagacggagcctg

SEQ ID NO: 23173 - DNA, 3887 bp, Oryza sativa
tcctgcagcccaggctttaacgagtacaattttatcatcgaattgaagaaatgcaatccttcatcaattaacccaccttgactgcaagctgataacacaactaccaacgtgatctcatcaggtctgacactgttagcttccatttcccggaatactgctatcacctcagacccattaccattagaagcatagccatcgatgagtgcattccatgaaacgatgtcttgtactaccatctcatcaaagacttgtcttgcttccaacatccttccacacttagcataggcagaaatcaaggcatttccaggagaagaatcactgataaacccagtcctgacaagaagactgtggaattgtctccctatttgcagagtagccaaatttgcacttgcacttagacaacatgcatatgtacaccagtcagcgctctttgcatcccttctcataagcataaaatgctgcagtgcttcaacaaatagaccattttgaacaaatccagagataattgaattccatgaaactgtatttctcctcttcattttcctgaaaatactggctgccttgcgaatttgtccaccctgagcacagccagcaatcatggtgttccaagaaatcatatccttgttcggcatttgctggaataaaaccatggcctcatcaagcataccacactgaacatatcctgatatcattgtattccagcacactgcatcccgaaccacaattccatcaaatagttgacgggcgtcatcaatcaggttgcttttcaaatagccatgcatcagtgcagtctttgctccgacattgtcggaaggcatcttgctgagcacatccttcgcttcttggagcttcccagaacgtacaaaaccactcaccatcgttgtccatgagattgaattcttctctggcatctctataaacagattataggccgcctccacctgagagaactgcacatacccagaaagcagcacattccaagccacaacattacgctcaggcattctatcaaacaattctcttgcctcgcccatcctccctgcctgacaatacccattgaccaagttaacccaagaaataacattaggtgaggggatccttgaaaagaatgcactggccacatccaaatccccagcacgcacatacccctctagcatcaagttccaggacaccaagtccttatctggcatctcatcaaagaactgcactgatcgagagatttcctcattccggatgagcccccccaacactgagttccatgaaacaatatcaggggccggcatctcctgcaacaaagcaattgcatcctcaaacctgccgttcttggcatacccggagatcatggtgttgtagcacgccgcgcacttctccccgggcatgcggtcgagcagctcccttgcgagggtgagctcaccagcccgcacgtagcaggataccatgattgtccaggagtactcgtttcgggcgggcattgcatcgaatagccctcgcgcatcctcgacgcgcccgtgctgagagcatgccaccatcatggtgttccaggacacggggttgcggcgcggcatctcgtcgaacagcctgcgcgcctcggcgaggcggccgtggtgggccagcgcggagaccatcgcgttgtaggagaccacgttgcggcggggcatctcctcgaacaggcggcgcgcggcggccagctggcccgagcgcgccagcgacgtgagctcctggttgctcctaaacacagcagaggcggtgagcttcgcagctgccattgggggcggtgatggcgctggtgccgccagataccacaattcgggatggtcacggaccgatggccccggatggatcggcgcgtcagccggccgacgaccgccagcagtggagcagctcctcaggcctggatccccgcactcgacctccaccagccgcttcgggaggtggcggccggaggtgctgagcagcaagagatgctctgtgcccggtgccctgatgcgctgcggtggcgagcttgttgccggggctcgggaggagatgcgccgcgggcgtgcgtgcaggggttgtttggttcgtaccagatgatgtcacgcgctttactgcaggatataggtaagatattggagaaatatcaatcagagcgtacatcgaaagtcatacttcttaacagcatgtgtatcaaagaaactgaaacttctttaaatttcagtgagcgtgtacattcaaaattataaaatactgttcaattataaaataaagtcaagagattttttttaaaaaaaatcagacaatagcatgcttatatgcttgatccgatttttatcatgaacagtagagttttttaaaatgactatcagacaaaagcatgaatactttagttatcgttatctaaaaaaatgaaatcttctgccatactaccacataatataccactaacatagaatgtataaagccatacttcttaacagcatgtgtatccaagaaacctaaacctctttaaatttcagtgagcgtatacattcaaacttataaaatcctgtttaattataaaatcatgtcaagagattttttttgtttaaaggaccattagaactgtgcaagtttatatgcttcaattataatatcatgtgaagagatgttttgtttaaaggaccatcagaactgtgcaagtttatgtgcttgaaccgatttgtataacattgatgaacaatagaatgggggagaaagagaagggcgaggagggatgtatgtacctttgtgcgaatcagagatccgtgagttggtcgacaaggcaggcgacggtgtcctagcggtggagatcgggggcggcgcggaggatgggaggagacaaccgaggcgggcgacgaggagtggagacgggcaacggtgtctggcggtggagatcaggcaggcggagcggcaggggtgattctcgttgttggcacgaagactgcacggcgttatggatcgacagtgacctgatggtggggtgacagaattatagggtagattaattatttgatttactcacatggttagcagcaaggtcactgtccaagtgaaacagccagagtagagaaatctaagaaaaatattgtcaatgaatacctttctacccgtggtgaggcgaaggtggcaacgagatagagacggagagacggtaccaggacctcagcagatgcagcgtcctccctcacacagtggccttaataggagtacagcaatttgcctgttaatttattttaaccattcctcatgaaatacattatctgaggaagataataagataaagttcagaatcaatattcagctaagtgagtgttctcataaaccctataaatcagagtgttcacagccacatggtactctgaccagttcccatgcattttcccggagccacatggtactctgacggtccaatgggttcatcatcttggttgatattttgacaggatataaaaaataagaggaccaaaagtacaaaaatttccattctatatcttttttttttacagaaatgccacctccctgaagtttcgagttttatttgatgcagtcatataaaccatgactttttgaaagcaaattgtaatgatgaatatcacaaaaaatgctgaaattgtatactctcttgaaaaaagatatgcagaacggaacaatcctgtgaaactgtttatgcaactgcagacatttcattatagggagaattttcggtttgcaaacatgatgaaaatgcaccttggtttgtcagttttggatagaacaaaagggatggagcttacctaccgtcggtggtggtgatccaccacgatgggggcggcgatgaatcagataagaggggaaagatgggggcggcaatgaatcaccgcggcggggggggggggggggggggaaagggg

SEQ ID NO: 23174 - DNA, 23272 bp, Oryza sativa
tccaccgttcaaattaatctgatggataggttctcttcccttatttctttgagtaaatttcacaatatggttcaaaatccagaaaaccacacacattttgatatttggcacttaagtattttggtagtttagtttcacaaaaccacaccatcgatgaatggattcacccgtgagatgacgtggttgttctatctaggttgaggacgtggcatcctattaatttttcgtgcgatggctggtaataggatgtcatgtcctcgtcctaggtgaaacagccatgttatcccgtgggtgaatccattcatcgatagtgtggttttatgaaaccacacaactaaggccatgtttgatttagcttagaattattataatctggattattaagagtaagctgaaacaaacaaatagattattatactagattattataatatataagctagattagtataattcaataatctcctctagaggagctttttccagattattgagtggctaaagatctactacccttagatgcctctaataatccagagaaacaaacaacacgtagcttattttttgttagcttattataatccagcttagagtaatctgatttaataatctagattacaataatcttaagctgaaacaaacagggcctaaaatatgtgtacttaagtgccaagtgtcaaagtgtgtgtggttttctacaacttgaaccacaaaacgtgtagttttgtgaaatttactctatttctttcaataaaatcaagagtaaattacactggcggcctttataaacttataagcaggtttcacgtaggtccacgaatttgataaataaatatgttgcaggatcaacacatttatttattttgttagttgcaggatctccgtcccgccattctctgcctcgagcttctcctctgtggacttctcttccatgcgcttctccaccaagctcccagacgtccccacaccaccgacccgggaaagagccatccggtgaggaggaggagattgtggaagaaatcccctgtcgatagtgtgcgctgccgtcgacccattatgtccttccccctcaagccgcatggttccagggtggcaaggaggaggccatgaaggttgggtttgacgatgccgccgacaaggccgactcgatggccatgtacaaggcggggctggtttctcctagagaaaatgtaggttaatagttgtatcctctagccccagacttcaggacaggatgtaggtagtcattgtgccctgaagtggagtagagagttgaacttatcttgtttttgagccgaatagcccctgactttattttggaatgacagtaggagttgtggcatggagttgacttgattattgcgttgattcttgcagaagattgtcgatcgctctagtgccaagagagaggctctacagagcatcttcgacaacgtgacggagattgagtgcagcgggtcgagctccagcagcagcagaaggaggcgaaggagtggcacatctggagaaggagctatgggtctcctgacgaaaaatccgcgctcagccgatggtgccagatctatgtagacgcgacctaagtcaacgaacacaaaggcctgggagatctgcttacctttagtgtaagtccaaaatattgatgaggtgcgggcgtgccagtcagttcgatcctacaactaacaagataaataaatgtgttgatcaccaaagagtcgattggctgacaagccgatggaggaattctagccgatgccgatatcagtcgacgtcgatagggttatgagcaatcggctatatgtccaatgtagataatgatataaagacaatcggctgataataatataataaaacaacaatataatctagtagaaatcaatcggctaataatgatatgacaaaatgagtgttgatctaatggttacagcatatatcggttggaggtccgacgtcataaaatctaaatgattagataatcaataaaacctctgttgtaatcagctaaaaccaacttgtacataatccttataagccgatgcaacatccagataacccaacggctaaaactccgatgaaacccttcttggcaatcaagaagcaggctagagattatggttctaagcacgacttagtagatcaaacttaactgatgcaacactaagtatgaaaagaaacataatatccaaacaatcaagcctttgactgattttcagggtggtgaatacattagttaatctaatcttgcaagatgatttagccgatatcggcataaaccctaaaaaggatctcaatcgatatgatcaaattaagatgctaagctagattaactaagatatatgataaccagcggctgtagaagatagattagaacatctaaagcgacgccctaatccaccaacgcaaaccgctgagacaagtcatacctcttgttagaagaacgaagccgatgcccttactcgaagcaagaactcgtcaaaaaagtagaaaggtaaaaggtggcgatgtgccaaagttgtatcgatcgagacaaaaattacaatgaccccgggtgtacacatttatacccatgggtagatactagtccttattagacaaaaaaataaacttttctaaagataaaaggaaaacataaagtccttatcgaacgctaaacacacgttcctaaagataaaaggaaactaacaaactcttcctaattaatagataaactaccatgccacatcctacttgaactcggtctcttttggataaacttcttttaattgataaatttccttaaccgaacccatgaagaattcgactactgacaactgatggtgtccatcggccgattccatgactctgaagctgatacttactataggctgatgataacttcgggacttaccaaattttggcgttaagagggtccaaatttcccagctgaggagggatggtaagatgctctggccaagtgatttggtcttcgtgttagtctttgtgatgatgtgtgcctatctgctgttgtggatgaacaggggagatgcgcacgtgaagcgaccgagtggaagaagctggtggaccagcctaaggcagctagcgggcgagctctgatcattgagctggagacgtagttgcaggaggcccaggaaggagcgcacgattttcaggccaagctggatggtgagtcttgtaaatgttgcttctggctattctcgtgttctgctgctgttgatgtctgtcatcttgacaccatcgttagccgcgtccgagtcaatctctgccgagaaggcgaccctgtcggatgagttggtgaagaaggacaccacacagcgcaatctctaggcggatgttgagctgcgtgcgaaaaatactcagacacattatgagcacttccagcgggaattggacgccgccaagggtcttcatgaggagctggtgaagtcagtggagcccaccctggagctgtttttcccttcccggtgtaagggcaaagatcttgtgcaactggcaacagagctggttcctgaggggccaactgctgttcgtcggctgtctgagggtggtggcagggaatgtggcggtcgccgcgaaggtgactccgtgagtttccatctcctcaagaaaaatgatcgagcgaccccacctagcgtgctaactgtcggtttttaatatcggcaatattatttatgggtgcactagatctaggagagatggtgacatagatgtttatattggttgaaaccctcaaagcgaggtaataccctagtccagttgtgagtagattggatctgtataagtgcgcatctgttgacgagaaatccgcgctcggccgatggtgtcgggtctgtgttggcgcaaactaagtcgacgaacacaatggcctaggagatctgcttaactccagtgcaggtccaaaagttgatgagatgcgggcgtgccagtcagtttgatccggcaactgacaagatatacaaataacagatcaaagagccgatcggctgacaagacaatggagtaattccagccgatgccgatagggttttgagttatcggctatatatttgatgtagaatctgacacttgatataaacaatgatataaagacaattagctgatggtaatataacaaaacaaccatataatccagtaaaaccaatcggctaacaatatgatagaataagcactgatccgaaggttaaagcatacatcagctggaggttcgatgttattgaatccacaagattagataaacagtgaaactttggttgcgatcggctaaatccaacttgtatgtaatccttataagccaatgcaacatccagataactcatcggctaaaaccctgatgaaacccttattggcaatcaaaaagcaggctagaggttatggttctaacttctaagcacgactagggctgatgcagcgcaaagtatgaaaagaaacataatgtctagataatcaagcctttgacttattttcagggtagtggataccttagctaatctaatttggtaaagcaattcagccgataccagcataaaccctaaagagaatcccagccgatacaagtaaattgaactaccaaaatagattaactaagatatatgatagatatgtgtttacattgacaagatcggagtgtcgaagccttggccccggcgatgcaaatagccatgacaagtataaacttgtcaaaaaaagtagaaaagtaaaaagggtggcgacgcgtcgaatttgtattgatcgtggagatagtttacaatgaccccgggtgtacatatttatacccataggtagatacgagtccttattggacaagaaagaaacttttctaaagataaaaggaaaacataaagtccttatgggacactaaacacactttcctaaagataaaaggaaactaacaaatactacctaattaatagataacttgccatgtctcttcctccttgaactcggtcacttatggataagcttctgttaatagattaatttccttaactgaatatagcaagaatctgactattggcaacttgataattctcattggccaattccagaactctgaagccgataatggttttaggccgatgactgttggtatttcttagcgacactgccggaaatataattcccagcaatagcactagaaataatcctggtatattatagttacagatatgatccgcaagcatacggatataccattgtagcatttcacccgggagtattccaaggtatcgtatttattttatcccaagggaagatatgataagagattactatgctaacaattcatatattacttatatacatcaagtctatgcaggggttaatttagttcaaagggtagggtgacacacagaagaaagaactaagaactactctcactaaaatatagtctaagctaaatggagaaagaataataaaagtatcattcctgtacttctagtatatatacatctttaatctatacttactagtatacaatcatgcaaccaatacctcgtacccagtgtcctcctagtgtttcgagagaccgcccctggttgccgagttccttacgacaacctgtcatggccatccaaccggggctaaatacggaggagtaccctccccaggaaattgcacttaggataatatacacatgtagaggacacctgcactaatccttcaccatcagcggccggcctctgatccactgtatattaccccaattaatggtatctaataatctaagcaccgtgcttacattactaaatattactccaattaatggtatctaataatcaacatgctcaaggggaatgtgtgacttgcccttcttcttcacttcgatcttctgaactcttttcctcacgaccgcggacttctgaaacggcgcaatatactcactagcacgcaaaacgagaaaaaactctaataaataccaagtaaacagtacaagaaaagtaaacaaacatgtagatcttggttttagatgaattttgcaacttgaatggctcaatttggagttcgtatgaattagatatgaattttagaagttttgagccatttaaataaatttctagaatcaataccaatttattgcgcaattattatttatttttacaaaggaaaaatcaaggattattgcgtcagcgaggggcgggtgtggaccgagtccaccaaaggcgggcccacgcatcagccaaaaggggagggacggtgcaccgtggaccgggaccacggggtggtccacggcgaccaacagtaggctggccacgcgggcacacatgggaccgaggaggggaaaaaagagaggagcaggagggaggtggctcaccgagcgccgaagcagcgaggaggcgacgcgggaaggcggccgacgacgaggagaggcagcggcgccccgcggaaaaacagcgcgagcgaagcaccgacgacgaccggcaggtgaggaagggcggccgagcacctcctcgacctgtagaatgatgaggaggggttaggggaggatggggtggctcaaggcagcgtgaaccaccgaccggaggggattggaaaaggggtagctcaccggtgcgcgaggggaaatggattccagtggttgggacgcgagctgggcggtggccgagggtctcctcgtccttgcagaaccaagggaggcgacgacgcagtgcggggtcggccggagaggtggcgcggtgcggctgtagttggcgatggtggcggagagagatggtgaacgtggtggcggcgtttcggaaatggattggggaagaggagcagtggacggggtgcggtggggcgtggcggcgctgtgggtggcggcgacatggccgggcgaggcgacgctcgccggcgggaggcggcggtggctcgggttggtggtggcggcggggtttcagcggcggtttggggaggggaagtggtggccggtcttgccctccggcggtgaagccggtggtggtggcgtcacaatgcggcgagggttagggcggcggtgacaggcggttggaacgcgccggcgggcggcggagggaggtgcgacggtagcggggtggtttccgggcacgggagagctcgggaaaatggggaaacagatgagaagggcacgagggtgctttatataggctcggggagctttgatacggccgggatgggacgaattttgggcggcaacgaccggcgacatggggtggcgacgtgggctcgtggcgggtcaatccggcgccatttttttgggggaaagtggggggaatggtggaggagtgggcggcgaccacatcccgacggttagacgcgagcgcgagggacaggaggtggcggattttgcagtggagtgggcggccatggcgggcggctgctctggctcgagttggctgggggttggggacccacttgtcggcctgaggagaggggaggccggtttgagggagggggaacaaacttggaggtggcgggaagcgagctgggccagcccgagagaagtaggcgagcggcctggccgggaagagggaggagggcttggaccgaaaatggcccaaggggaacgaaggagaattaaatttgtttttctttttatttaattgattaaatgatctttgtgatattaaaattacttcttgagctccaaaaattcgcgagaaattttaaagagtattttagggcataaagaacattacaaaatattcatggccatgatttttaaaggaaatttttaattccctcattattttacttaacttttaacataactagaaacaatgcccgtgcgttgcaacgggttaaaactattttaatcttattattgttatatggttgagttaggatgaattcattgtgtggattcgcttggatttttatttttagaaaatcatgagctgcaattaggagtttgacttttatctcaagttagcatccatgttttttaaagagattccttatacgattagttttgtatttccagaagcaatgaacttaaaacccaactgaaacaaaaataacgtaccaaagtactaataaaagcatatttaatttttataatagtagagatagaggtatgccacgctattgtctcccgttaataattttcagtttttatttcttttcacgataataggaggtgatcagatatatttgcagtttttatttcttttcgcaataataggaggtcaacagatatatttactcgttaggatctacttaattatacttgattaggccaaaaaagcaacgatgcagccatgcacatgcaggccatctccatcggtatttccttccaatctaaccaggcgcacatctcttccaatctctacggagtacagagacaagtccatctcgcttgatcgtgggctcgtggcaatagtaaaactgaatcggagtgggtgcttcggatgaagcgaaagggaaacgcatgtgaacgcttaaaaaaaaggcaacgggagcatttggattcgatggcgatgtacaagggaatcggatgtggacgcgtcattgcttccctcggatcacgtcagtagtttttgaatcagagatagcggatgacaattagtctcggatacagacgacttaccaaactgcaaaaacatcttaaacttttataatagtagagaagagatagagatttttaaaaatgcatatttaatgatttttaaatcccgaacaaaaatcggggcgttacagtgcaatagtggcattttgtgtagcgacgatgccataggtcttggtggcgatggcggtggtgttggcagagttggcgagtggtagtgttggcaggccagctcggtgtcacgctaggagcaaagtcgagcgtagcgagcagtgccaagggcaatggtggaggtctgcggtgaaggtggcgtggctgcgacaagacagtcattgatggcatcatggtggagtttgtggtcgacgatgataagctaaggaggctcgacggaggttctggttcgcagcgaggaagacgtggcagtagtggttttccggtgagataagtttcggcagcttagcggaggtgaggttctatagcaatgccggtggggtagcgtgatggtttgctcgcagtgtggcaatggcatagcaatgcaaacttttggcgaaataagctacgacagctcaatggaggtagtagagacaacgacctggcagtgatggttgagttgacactgaggggggcatagattgtccggcggtatatttgccttcttggtgttgttttagctaaatgatgagatagcgatggttgtgttgacattgagggggcatagattgtccgggcggtatatttaccttcttggtgttgttttagctaaatgatgagatagcgatggttgtgttgacattgagggggcatagattgtccgggcggtatattttgcaaattttggtgctgagggggcatagattgtctggagggtgtattttgcaaattttggtgggtcttggttcttgaggtatattttatgtgctctatatttaatcggatatatgcagcctttttaaagtaggaacttagcctatcgaatagggaacttagcccttaaataacccaatttgaaattcgctcctatggagatttaaactcaggaccttaaggtactactcaggtcattgtaaccactaggctacatgccggttatgggtcttggttcagattgttgtattttaaggaaaatgatatgatgcgttctaccatttctgttgtggttatgattgttctacggagaaaaaaaaatgagtaccaataatatgtgttgttgcactagctttagtagtcactaatctgagttccttcaaaatcctcgatcccttcgtggaattggttcatatgtatagaatttatttaccactttggaacgaatatttggtgccttgaataaattaactttggaaaattagtaatttaaaccattaaatttgagataacttgtgagatatggtacgcttcagattgtaatccaatgccacaatctgtttcagaacctagcaccgcaacgagtaaaagttttctgtatctggtactgtgtacatgttgctggatgtgctgaactctgaagcaaattgacaagagttttgcagttttgctcatcagattggtatgcccaaagcataaggctcttagattttagagggaacgggaagaaacataattttaagttttcattgttagacccttgagtaaatttagtagcttgtctaggtcaactccatagagctagatgtcactttctctgttccaaaatattagtatttttaaggtttatacatgtattaaggaaagagttagaaaaaactgaagaaatattatgattggttgaaagagaaagtagatgaaaaaagtaaatggaaaatgattgtattggttgagaggaggtggcaggtgtagaaataattttatttttaagtcatagttatactttggaacggatgtagttagatagaaatgactgaaagaatatcgtgattagttggaaagagaaagtagatgaaaaaagcaaatggaaaatagttgtgattggttaagtgtagatggtaggtgtagaaataactttattttagataagttatagctatattttgagatattttgagatgaatatagtaatagtatgataaaaaatgtaatcacctctttcttttttttcttcactcgcctataacgaacgtgtatcattgggaaaaaaaaaacttacctacaacttcgctgaaataaaaaaggttaaaactcccctactaaagtacctacaactgataatattggacgaggcggattttttttcccttttcacttaggccgtgttgtattcttcaactccaaccttcaacttccacgttttctattagcatactttttaaactgctaaatgatatttttttaaaaaaaaagtttctatatagaagttgttaaaaaagcaaataaatccatatatcaaatttataatagttaatacttaattaatcatatgctaatgatgtttgttgttttacgtgcaacaaaaatctatctctaggttgggagatcgaacagggccctacctgatacatctgacaaagttacaccgcaatatttattaaggttaattatatccataccattaaaaaaagtactaattttaaaatatgccattattatttatttaattggaatcatgccattatagttttacacatgtttaaagatataccactgcttacccctagatgtatttaaaaaaaatagaccaaattacccttttccccttcttccttcttcccctttctcccatcttttcccggcatcggcggtggcaggcatgacccaaagggggccaccgcagtcgccgcctcttccctctctagctcttcttaggctaggacatttgtgtctccctctacaccaacgaagaagtcagcgtggggccctcgatcatcactgtcgctgacatctctccttcctcccccaatccctctctacggctgggcaaggcattgacggggcagagggaagccagtgtgtgatgcagaaggtaggagtgggcattcagtctaaccgaaaattttggtctcgatcttcggtctttcagtcttttcgatctttgaaaagtgaacaccgaatttcagcgaaaaatgttaggagcgaaaaatgttaggaccgacaaattcggtctcggtcttttcggtcttggactcggtcctaaccgaaattcaacaacatttcatatatgcaaagaaataatggaaattttcaacacaaaaatcacaaaaaaaattcgtaagcacttatgagtaaaagtctcttattaggttgcatgcctagaaaaagtaggatgtgaaaattagagtttaatcctattaaacatagtggattgtaggttatatttagacatttttgatatttcggtcttttcggtctattcggttacccgaggagactaaccgaattgaccgaacaaaattcggtctttcactacataggaccgaattgatgaccgaatttctcggtctcggtcttttcggttcggtctttttctgcccacccctagcagaaggcaacaccgacgtcctagatctgctcgcctctgctcttcagcctagatccatccgtctctcctcgccgcgaggagtcttgggcgatgatgatgccaaagcagcaaggaccgaggaaagaacgggcgtttctcctctttgacaagctcgtgcacctccctaacagcctccctcatcgcactcgcagctgcttgacgtgtcttcaccgcctccgagtagttgcccggtgatccacctcgccaccgatggccaccttggcacccaacacagtgaggacaactttcgtgaggagccccaggtggagctgcccgacgtcccgagctcccacagcggagcggacgggttaaagtcggggagcagtgagtaggcactgccggtagtgagattcggatggagcatgcagccaagagaaaggggagaatgagggaagagtgaggtagaaatgagggctattttgtcgaatacatataaaatacacatgttagtggcaccattgagttctcaactcatcaccctcgttttccacatgcacacttcttaaattgctaaacggtacgcgttttggaaaaattttatatatgaaagttgctttagaaaatcatatgaatccatttttcaagtttttttagctaataattaattagtcacgtgttaatctatcgttccgttttccgtgcgaaggggagggaatccctccaaaagatcataggctgagagtacaaacaagtatagacctaattaagacaactccattgtttgggttattcgtggaataagccaaatgacatattcgcaaacgagaagtaatttatgaataaaatttttatatacatgtttttagcgacctaaaagcaaagacagaaagataaatttcgatgaaaaaacttaaaatcggttttaaatttaaggttgaaaatttaaattttggctgataagcaaaagcataagtgaaaagatgagtcacacacagatgaaaaaaaaaagaagagaaaaagctaaccaaatcttcctcggccggcgtcccgactcccgagcgcgccagtgcggggcggggcgtcgttgctggccgcgccgcctcctcctcctcctcctccccccaccaccagtccaccacctccctgatcgaatcgaatcgaatcggaatcgaagcgggcgcccacttgaccaaaaaaattatccgttcgaatcgcgcggagctcgtgcttctcttctcgagtcgaagccttgcctaccttaacctcgcgacggctgcgctgcctgccacccccaccacccccagatccggagatcccgcgcggcgcggagcacactggagcggagcgagctggtgctgcaatggcggcccgcccctgatccgatccacaccaccccgccccatggactccgcccgtagctggctccagaagcttcagccgcgggacaaggacaggggcaagccggcgtcgcccaccgccgcgaggaaggacggagcggcggcgatggccgaggatggggaggaggcgatctcgagcaccaccgccaccaaggtggcggccgccaagcagttcatcgagaaccactacaaggaccagatgaggtcgctcgaggagcgcaaggagaggtcagtccccccgctcgctcactcagcctgttatagatcggctaatcgatcggggattgctattgttcggaaatgcgcgtgcgcgttgttcctgggttggaattcgtagggtgatcttcgaactggagctcctcaaggtcgatttgctgtgctcttttattaaacaattattattatgatctgggttccgagttacttgttaggtggtcactatagtagaatacttgcaattttatgacggcgcattagttacgtgttaataacgctaaaataaaccaggagtatattgggtggatggcaatacagtaatgggaatatgtaggattgtggagggtaaaatgattctatttttggcatgatgttaaatgaggtaaggagatgtgccacttggactagaatattccctccgactcaaaaaaaaacccaacctaggataggatagaatctattgacaacgaatctggataagcgcttgtccggattcgttgtcctaggatagatcacatcctatcctaggctgggtttttcttttgagacggatggagtaacttggaaggaggtaataaaggggtccattatctccaattttttttacttccgtggcctggatatataaccatacgatgtatgtgctactgctttgctgattgacctgctccacaacgaagtttcgcctgagtgttctttcataatgatatctcaattgtaataatttacagcttggacttgcattttgttaatatacttaactgctagtcttcattctttgttgttattttatctcttttgagaaaacggcatatgtaggactatttgtatctcatctatttgcaaaggttgacaaactgcaagccttcttttgtaatgtggcatacaccaaccaaatagggtaggaagaaactatgcttattaataaaacctaaaagtaccaaagttttggcaagaacaagggtaaggctcaatactagaaatgtaaacttgaactatatagccaacagcttctttaaattgcttttagtacccatattatatctctggactgcttgtagccatgcactctgttaaactagtttataccccgcactttgctgtgggatatgtggatgaatgcatgttatacattatagaaatgatagatgtatatgtttaaataatgtgaaaaatgatctggagataatgatttaacattgcttgtatattgagttctaaaaatacaacaaaattgttaatgatatgtcatgtttgcatgatatttaaaatactctagataataattgctagtggatgataatgtggtacacttgcatgtgattgaaaatactctagataataattgctagtgggtgatgatgtgacacacttacatgttgagatttatgagttagtgggcatcaactatatagatagtatagatgtgtaccatttcatatggaactatcacatgactatacaacctatcttcttaggtttctgaataatgaaatataggtgttggattgaacttactataaatcttcttggggcttgactgggaagcattcagtgttattctctgccttaaattgttaaacacaatgcatgtgcaatccttgaattttattaatgaactgtattaatattctgtcattttcggaagtgttctctaagggaagatggtatgcataaataaaaatatgtagcataaagcgcttaactattgcattacagcatcataagaggctattcacagttctcttattgccattttttgtgattgatatttgataactctccaatttcaatctttttgtatgtttcagtaagatgctatatattagttttggatatacatttctggcgtagtttagatatcatcgaacacccattcttatttggtggtaaagatattatgccaaattatattataggcgtcggatgctggagagtaagcttgcagatcctgatgtatctgaagaggagcaaaacaatattctgaaggacttcgaaaatagggagagagaaatcatgcgctcaaggaggcacaaaatgggtgttgatgattttgaattgcttaccattattggcagaggtgcatttggggaggtaagaagggcactgtttctactccctatattcgatgcagatatagttgactgttgtgtcatgcgtaataaacatcagtttctgcagtaccttgagaaaccttttattatacatggagaaaagaaatctatttttagaggcaatatatatgttctctgtttctcctgcagcttgcctccagtttacatttttattcttcaggtgaggctctgtagagagaaagctacatccaatgtatatgcaatgaaaaagcttaagaagtctgaaatgttacgaaggggccaggtaattcatgtgtgtttaagtaattaaatcagcttgtccagcaaacttttggttttctaatgtgttcttttcaggttgagcatgtgagagctgaaaggaatcttcttgcagaggttgacagtgcctacattgttaagctttattgctcatttcaagacgaagagtttctataccttgttatggaataccttcctggtggtgacatgatgactctactaatgcgcaaggatacacttacagatgatgaatctagattttatgttgcggagacaattctagcaattgaatccatacacaagcacaattatattcataggtaattcattgataataaaaattgcatggcattcggtagcaaatttgccactccatctttgctatacattttcagggatatcaagcctgacaatttgctgttagaccgaactgggcacctgaagctttcagattttggcttatgcaaacctctagatagtagtagctttccaaatctgagtgagtttgactatgcagtggggaaaaacattaatccgtcaatggatggtgataaactattaagtagctctgctgctcccaggaggacacaacaggaacagctattgcattggcagaagaatcggcggatgctggtatgttaaaatgctttatagtagcattttgcctcttgtctaattgcttaattctatatgcattccctagccagggcaaatcctaggcccaaacacgtacagaggacattctgtatgcatcacaatcatttgggcccttttggattagaggactttaagatagaccccttcagtgtggtagggatataagttcagtttctatacctatctgaacagaattgattaaattcaatctatccaatctaggcctaaacatgcatgcctgatgtgaaagtattccacatgtttgctagaagaagtcaagtatatttacgtaattttagctattatatgtaaagcaaatgcatgacgagatgattgactgtacagtcaaacagttcccattagttcatgatgaaaacgattacactgcattctgcataagatgaaaatgaacacatccaaaatgtcgatagaaaattgtagaaaaaatggcatggtaatcatttgtttgccaaagagccttggcagtgtgttttttatgtatttactttcatgataattgcaggcttattcaacagttggtacacctgattacattgctccggaggtactattgaagaaaggatatggaatggagtgtgacttgttagtacactttaatgaacttttgcagttcatgtcctaatgttttatatctctctcatatttgtactttataggtggtcacttggagccattatgtatgagatgcttgtgggttatccaccattttattcggaagatccaatgtccacatgtaggaaggtaactttaaatgctatagctaagccatgtcccttcaaagacttgtggatttgtatgtgaattctttctattaacttttgagttcaactttacagatagtgaactggagaagtcatctaaaattccctgaagaggccaaactgtcaccagaagctaaagatcttattagcaaactattatgtaacgcggatttgaggcttggaacaaaaggagcacatgagataaaggtgaaagtggttcacatgatctgttacatccttcatgtttgtaagtttggtaatttatagcatgatgtgttcttacaggcacacccgtggttcaaaggtcttgagtgggagaagctatatcagatggaggctgcttttattcctgaggttaatgacgagttggacacacaaaattttgagaaatttgaggaggtgaggtgtcattacgaagctattttggccagttaatggttccaactttttctctatacatattagagtacatgtctcaagtcaactttaaaaactttgaacatcaatatcttatagaatatttagaccgtatgtttagaaaatatatgcatagatttgtccaaaagcactatattatttttattgttattattttatttagtttttcaaatattttgcaagcaaatagttgtcaaagttgaattctgaagacatatttgatgtccaaaatgacatgtttcatgactggagggagcactaatttactgatagcagaagtttcacattgtgtgaagtcctgaatgtttctgcttatcctgctagattttatttgcatggtcacacaagacagtactaggatagctagcacatttgctttcataacctcgctatcgcatgattaaaaataatatcttgatgcagcagccaacaaaagaaatagtgttcatatcactaaagccctctggccagaatgggaagcaccatcttattattacatattccaaaagcagaagccacgcatcgttatattaagaagaagaaaatgaatctagaagactcaaacatgcccattagggcaaggtgtaatacatgacgacttgccaaagaaatagaaagggccatggccggtggcctatacaaacaacatgtactgccaaatgttagcaaggcctttagccccagctatacaccacaacctggccaacctaatgtagcagcagccatcgttgatgagagaaaccaaagcacatcagccaccattttagttggtaaatgctactaagttatcagggatctgacaagagggaaatgagctttttagccattcagtacactctgggatattatcattagttcatttggccttgtttgtttgactatgtcacaccctttattgcatctagtgttgtgtgaagaaaatatacactgaggcggcagatatttgtacattggcaagtccaatatattgtggctcttgtaacctgacttatttcatcagtgcttacctagtgacctttgtgtgtttggtgtcttgcagattgctccaatgcaaacttcatcaaaggcaggtccttggagaaaggtgcacttttttgcagagatcaggcgaccatttgcttttagttttttgtattgtcaatatattggaggatacatttttatttcaaaattactaagggtcgcttcaggctagcgatattttctcttactcttcctgtaggacaatgtttgcatttgaaataaaagtgtgattcgtcatattttaattaccttgtgaccttttttttttctgactctaggtcctgactaaatgtttctattgtgcagatgctttcctccaaggacacgaattttctcaattttacctacaaaaaccttgaactatcagatgatcctgaacatccaggaataggttggttcctttcctagtctactggcatttattccttgcaaaaccttgtaaaaattgtcttggacatagttttgtgctttacacattatttgtaaccatttatcttttggctctgcagctcaagtaaagaaaaagaataacaagccaacgaggcggacctttaaatcaatattgcatggtaaaaggctgtaacacagactcagatatgggatattgtcataatatttacgttgctttccctgacattttacagaatttgctgatactgaagaggaacctcaaagcagttccttgaactcaacgccatcacaattggatcagttgcccgagagccttgagccttctcctcactctagtatctcctcagaagattcacagtcgcggcatagatagcagttgtaatctgaagtggcaaaaagggtacataatgctatccgcagaacttaacggctattcagaagacaaatttggatgtatagaaaagctcctataaatttgcttttagataggcggtggggtgttccaatagccattttcttatattggagcctttagcatttgtttaccgacaatgccgtgcaatttggtttacattggggaggggtatccgtattcttctggtctgtaaattcctggattctgtcattctatacagggttgagattcattctttggagggaacgtgtcatgcgtatgccgctagtcctttttttttgggggtggggaggtggcagaaatctgcatgtccaccttgtcatcacatttgctgcaacgcaaatttctgagaaacaaagaaaacatgtactatcaagatgcatcataaaacaattgtttccccttctgtgcagttaatttccaatctaccaatactgatatcacgcgggacagctggagtaaatcctttactacctgttcaaaaatagttttcttttattttatgcgagaaaaacatagttttctatataattaaagtatactaatacagacagtaattcctttacaacctattcaaaataatttcttcatcaaatcagcagtctgacaaatagtagtaaatgatttagtgatttatggtactggtttcctatcagtaacggtttttggagagggccaaaaaaaagagaattacggattaacaggacggcccaacagaaaaacaagaaaagaggaacgggctgccgcgtgtattagctaccgattttaaccctttgccacggtaacagccgccaacagaaacccaaaaacaaattttttttggggggaatattatacctatgcatcaccaacagtcctcctatattgtccccaaaactgatgcagcatcaccaacggttctactgtattatcccaaaactgattttgagggctattagtgaaatattggatccaacagatcccaaaactatttttgagagctattaggtgaaatattagatctaactgatcctcaatggtcccgcacgttttggagttcccttcccgtatttgtcgctgagggtccctcccaactcccaatcgtgcgatgcttcgtcaaatcgagccggtcgtccatggcctccaccatcattagctgctagctggtgaccaccatcgtcgctcccactctgcctaggccgtgtttagttttccccctattcctaactttccatcacatcatatcacatcaaaaacttttctacacacgtaaactttcaacttttttttcaaactttcaacttttttcaaacttacaacttttttcaggaactaaacacacccctagtttcgttgacagcctcgtcggtagtctcgtactctcatgcgaagtactatcaccaacgtcgtcttcctcgtactaatcttcctccataagacacccaaaacgagaaccaccgaccacgtactagagaggaaactggagccaaggtgaggtgccagcgcgatcaccgtcgacccgcctctcgtagaacctcacacccagctcatctcgtggatgggcatggagcagagcaaatagagagacctgagccagccgcttctactcgatacgaagctaaaatgagcgaatgtttgccgtctgaaatacacgcagggtaggagtgccgtcgcagacgatggaagtgtggtggtgcgacgtgtgcgtggaggcggaattaggggtgaaaacaaacgggtacttactaaccgcctgcccaacccaaagcttgctggaataatatagagaaaataggatacccgatagtatccgagttcaaacccgaatccgtaaaaaatatgagttaggatagggaagggttgtatccacccgtatgtcccatgctataaaacatatgtgaatatctattataaattcacctataaatatgataaaagattagttaatcactatctttatgagctcacatgtaatattatataatttaatcattgatgtatctcttttagcacttcaattatcttatattaaatatctatcaattagtgatataaattaaatatccgttcctgaatctaattcgaagaatattgggtatgatacgggatgagtgatatgttatccaacgctacccgtatccgattctaaatttaaaggaagatactccctctgttttaggttataagacgttttaactttggtcaaagtcaaactactttaaatttgactaggtttatacacaaatatactaatatttatattaccaaattagtttcattaaatcaataattgaatatatttttacaataaatttgtgttgagttaaaaatattattattatttttacaaatttgaagcggtttgactttgaccagagtcaaaacattttaaactgaaacggagaaagtataagttagaatatagaaatattgtgatccgatcgtaccctaccagttttcaccccataggcggaatgccaggtggtctccggcaagccactcccgacgctcggaacttgtgttttcctgaaaagaccttgttacttggtttcggctttctccaaaaagccgggtaatagtaattaactgatgtctaaaaaaaagttcactaagtgtttcgagtgtacttttaatcaactttcaccttttcaaaccaccgcagtccagctccgaggctccaaacactactggtttcggttacataccggtgctgtttttactatcggtctcatgcaacacacaaaatgtcaaaattgttgtacatcgcaagtgtactctagcacttacacatatccgccaattttcagctcaatgttatctaaccttgcaaattctggtttcccttttttccaccagtagcaaagccatgaacagggatatctcatcatcggccacaaagttggtagttgcactcttgagctgaaggttgcattcagtcggggtaactgtggtgttttccgtaaccaggtggacgaaattaatagagctccaggaacatctatgatgtaggttctcctttaccatggataacatggtgcacgagcttgtctggtaatctctttgttgcctgaaatgtatgtagattggcttgtcaataattaattagtgcctatatatgaagtctagtaaaatacaaacgaacataggcagaactgaaacataaacagaaaatggaatcaaagattactcaatccagtttcataattcttgacgttttggatgatgcacaaataaatacatgtttactttaattatataactttaaaagacaaatccatatatgttgttctagatcttttaaactaaatacttttaaagttattgattgttaaagttacaaaagtttgacctcaaccttatccaaaacgtcaagaactatatatttcttttaaaaaaatattactatcttaatatggaagcaaaaccaatacatggcctgcatcaggttatatatagtcctagagagaaggatgcccttgtctctgaggtgtagaaagagtactaaatgagagagaaggatgcatattacacgagggaccatattggacgagggttatagttctatgtgctttttgaactgctatgtaggaaaaacgttggatgcatttttttaaca

SEQ ID NO: 23175 - DNA, 1394 bp, Oryza sativa
tacacgcctgctgaaatttgcaggttgaatggtgcgttctaatactagaattagaaatgttagcacaaaaaaaaacatatatacttcataatcagaaaccagctgcaacaccttagtcatatgctattataacgatcggtggcttcagatctacaatgattgtccagtgaacaaaaagccaatgcattgcagtggacggaagccaatgagtgaactagtagttagttaattatgtccagagttcaagataaagagggtggcaaacctggaaatgtcgcatatgcaaaatgggctcacacccaacctctgcaaccaattttcccagaggagtcttagcattgaatcggctagcctgataggcaactaatctgttatctctgtcaggaagctgatggcatactttaagcagtgatcttaaagaattcatctgcatggaaaggaagaattagagcaaggtaaacaattaatatcataaaacaaacataatctcagggaacatattgtaatttcttcaactgccataagagaaaaatcacaagaaagtaaaaataaaaatgaaataaagaaaaagacagaaaaactcattagtgtttcatggttaccaagctaaagaatgcaaaagatcaatattttttttacatttcattattatgaaataacaaataatacattatctatacccctttaaaagtatagtggtggtggcagtgagtccgtcaccccacctgctcccattataaattctgcaaattgcccctttaacttaatattcaaaaatcaaatccaaatggatagccacgtggaaaataaaattgatgtgaatattccctgtggcaaaaagatgggtaaagcattttgtgaaaaatatttttttatttaatcaatattataatatatttttattttttccatagcaaagcacgggcattaagctagtaaatgagaaaaggtttttgtgatgtgacatttcttgacatcttgattcatgtcttaaataaaggctctgcttccatggatgtatatagatgtcttgaacaaagcttacatgttcatttcaataacataatcgaaaagcttacgtaaataaacaatatatatttaatcaccaccaaccttcatgtatgggcatgaagcgcagcccccatgtatagagcaaccttcgccagaactcacaccaggaacaacactaacattgtctaaatcagtaactgttgaagaatcaagatggtgggaaccattgacagatgtattagaaacagcatctgaagaaactgggaacacgatttcaacttcaatattggcactttgttgagaagttttataggaatcaaataattcacggacagcagcaacaatagaagtgatcattccggattctgttcctaacacaaact

SEQ ID NO: 23176 - DNA, 7141 bp, Oryza sativa
acaactcttcgtctcttcccagttatcatgaagtagattaatatttttttatagttgaggaaagcataaacttcctacactagtttatataatcaaactgatacatattaatgataaacaaaaaattaacattatccattgctggcctgctgagcctatatgctcgtttttatacacatttcataccgtgctgtaaaatttttcatacttgcgcccattaaatatataaacaaaccatcgaaccaccggttcactggttgaatcactagtttgagataataacaaaatgtaatattccttaccagtttggttgaaaattcaaaatatacaataattttgcccttccgaacacaataattcttttcaattagagcatgactcgcaacaacttggccctgttctttattgttccagtgcaaaactatctgtccaattggtatttgctggttcataagttggaacagacttggatgcaaaccaaccaaaccaagcaccagcactggattttccagtttactggtccagttttttggactataagataaggaaacacagcacgtttgattgaacaaatttataaaatatcctaaaatgtgttgcttgtgaaataaattgtttttcattagattttagaaacaacaaatagaatcataaaagggacagatgtcaaaatgagtcaaggtagatgttatggaagaaaacttttatctgcccatctaaactattgcgatatatccactttactcccgaagtaaaatggctatataaagaataaaccaataaaccatctaaataaacccctaaggatagctccaaaagtggttgtcaccatggcacatcacaaggcagatgatgtggtgccggtaacaaattttcaaaaaaaaaaaaaactgttaatcaataaacactcctccgtgtgtacacatctttctcttccctgctgctgcccttctctatatatctgcagcaccgactagctacgtgtcattgattttgatcttgctttcttagtaacaaatttgttggttaccatgttatgaattatgtcccatagtagcaaaatcattatagagagttacctaggaaattttgcacagttccaaatagttggttcatgaaaaatagaaaagacgacgattgatgttttcttacttcacggttttgaagttgagtgggtaaaactaggcaaaccctagtagttcaaacttaaaaggggtcaaatagacatttttctattttaaaaggataaaatatgaaataaaaggttaaaaaacatgtgaaattggataaattagtactaacacaaaaatatagaaggatcacaaggtcagaaaatagcataaaaccaaacatttagaaaaagctcatatagtggaaatatttaaagataactttcaacgaaaattatatatgagtaaggcacgatatattaatatataagattaggacatccagtctcattaggttgttttttttttgcaggaaaagtatactgcagagaactattctttacaacaattaagttgaaaatctgtaactcaaaatcattgagaattaactaaaagcacatagaaggatcagaaccacataaacctggtagtaatgtaggcgtggcaacaaggcatttatagattttttgttgtgacttggatgtcttctgcaatttcctcatctgacatgacagccattctctgaaatagatccgcaatgtttgcacccatataagaatccgggccataccagacattaagacctggtatttgggcaaatgcctgaaagattaacggataagagtaaacaaaataaaatgagttaatgtagtgaacaataattaatgtccattctcaaaaaaccattcatggttggctagagtttgtagtagacaagaaaaacacctacctgtaatatagttgctacaacgtttgaagaagtgcatgttattgtaggtacaagttcatgagcatgagcttttgtttccaaagaagtattgatataaataacatgtaaagaaggaggagatcttgatgcttctttcaaaaaatgtgtatatgcagaacttgaagcagcgtctgccaatgaacagccaatttgatcacttgacattctataaacaccaacctgcataaatatacactagtcaggactcaggagtagaaactcagaaaagtacagaaatgtctaataaaatttatatcagatagctgtggattgtaaccatcaataaatggatacactgaaaatgctaatatgtttgactccaaccaatactttgtaacttttatttagctgcaagaccaacagaatgctgcaccataaagtctaaaattattaaatacaaataaaaagtagatgcatgtacctgttataattaccgatagcatggcataattttcataacaaaaaaacttgtgttgttacattttcattctaatgtctgacaaataacacgtagatattatttttgtagtttcttcatggcaaactgtaaaacagagctggttcttaatgcaaattatagttcacaattgcataaacattcattgggactatgtgaacaagggtgtcaattaggagaagggatctagaacagctaacctaaaggagagaagttcatcagagacttgggactcttaagacttttttggtccattacatgaaccactacaaggataggtattgcacccaattcaagctgtttgatgggccgaaatccaggcccatccacttgtatgggccagggttttagttcaatccatcggcctgtacatgggtagggccagattgaggcccatgcaaacaaggccttcaaagggattggccccactaattatctgtcaaacaatatagaaataaaatgacataacaaaaatgaaacaaaccaacctaacaagcaagtaaggagttcctggtaacattctatggtgtcacagacagacaagtgttcctattttctgttgatgaagaaacttgacaatgtgtctaaataattctcctggcacattcactccatattttgcaagtcataactaatagatcgaccacagaaccatggaattcttcaaatgttaaatgtaaacaagttggaattgtagaactaagatataagtcataactagtagatcaaccattgaaccataaaattcttaaaatattaaatgtaaacaagttggaattgtggaactaagatacatatgcttactcccaatatctctgacacaattgagtataagaaagcttgtggttagtgttctcttaaatgcacatgctcccatcatccttggctatagtttcatatgtaaaacttcaaacttatattactgctgcagaacaatttcatactttttaacgtgcataactagggaaaaaccaagtttggattatgcaatgaggacttcaaaatcaaaatcaactaacgattgtggatgaaaggatctttatagttataactagtggataccccgcgtgttgcagcagaaaatttgaaaatatttcaaagataactcgaaaaaaataatttgtaaatcatgtacacgtaatatctaaatgaacaatatttgttttatagtaattgatgtgaaactacaattctacatgacatatggatgattatgtatcaaacatgagagggatccaatggctattcatttctaggtgtcatggtttaatgtacattaagctttatagcaataactacatttagtgggttgtaaatgcatatggtaaatgaatggttgagatcaaagcatgagagagatccagaggccactattttctagataatgtggctcaatgcatgttaagcttttggtctcaactatataggatatatagatactcacagatgcatctgtctgtttgatctactcatttatggcatggttgtagatttgaaaaacatagctactgatctacagctctacgcatctatcaatcgggtccaatgagttctgtaacttagtccttccagtaaacaatggagacagtagaatagaaattcttcaaacttaatgacaatcagtgatataaacacataaataccttgctatatccagcttgatcaagtattgcacgaacattttctgacataaaatcaacacctaagacagtgatatattcgcatcctgcttcagccatcttcactgcactatctgccattaccaatgaatcagaaatgtggatgtgaggccaatgcttctttgaagcagttaatatgccttgcacctccggatccatataaaagtgtgcgacaatccctatttttttctccctaagggattttacaagctctgaagtcttggattcattaggagacaagaacattgcctgcacttctcaaaataaaatcagtcagtttcaagactacatggtggaaatgaagggaatttatggtatttctattttacatttgttgaaatacatagctttacaggaggtatttctattatgtacaacaaagtcacaaccgtaattattcagggtatctaacatattggagcatccccaggagatcctccatcatatgatggtgtacgggaggtgaaaatgggcctccagcagatacggcatgtttccgccaaatatggatgatgcgccaaagcgagcatgtttcagccaaatatagcgattctctctcctcacaccatatctcaacgcccacatctggatcgagctcccgcccccatccggacttccgtcgcgacgtccccttcgtcgtcgtcatcgccgttgccggccacaagccgccgacgccaagccgtcaaaagccacaagccgccgcagccgcttacgagcttgccggccacctgcgtcgctcgccacctcagcatctgccgtcgttgcctgtgtgccttcgcgcccgccagccattgccgtcatttcctcaccctccggccaccaccttcacttctgcgcccgctggccgcctgcccgcctgagggcgttgtcgcctgctcggctccgcgcctgctggcctccgccaccgcttccacggctgtcggccgcctgcgccacccgctcgcctcagcttccaccgccagccgcctgcacacatccactcctgctggccgacagccgtggaagctggagtagtctggacaggatagaagagaggaaaagacgaagaggatagaacgatagagaaggatagagaaagagagaaaaagaggaataggggttggaatagaatagaggaaagggcagagcatgggtagaaagttaaaattacccattaaaaaaatatccgttaaaatttactcattcgagagattatcaagataaataacactattaaaatttagtcattcaaaatatagcccttaaaatacaaatgtaaagttagttaaaagatattactaaaatataggagggtgtgatatggatgatctaatgaagtggagagggatatgaaggaggaatcatttttggatgctcatccatatgggcatatggaggatgaaatttggatgagctgctggggatgctctcaggtagtgtttgtgcaatcaatttttagttgtttaatcctttgaacaaagattttttaaaacatgtacaaacaaaaagtcccctacgaccataactacataagttgaaacatagaaactttgaactagcattaatatgaaactgagctgcttttgatgacatcaaagaataggttaacacatatcatagccccacagaaggtctctaaatataaatggatacaattgacgggtgtacttaaggtagttcaaaaactttattttcaaaatggtattaccagtgctggtaggatttgatgaagcaaattaaactgcgttgaaacattacaacactctattgttaaagtaggaaacagagacaactgctgccacaccccatgggcactaaaaccacatagggagaatgagctaagaatctgtaatactagaaagagagaaaaaataaaagaaaagaactagtagccttatggtccatttggcacaggtggccttgtggcccattcaggagtacaaggccatgaccatgagatcgatcagagcatgtgagcattttcacaaaatacaggaatgtatattacatattgcctttacgtagcatgaataggtgtttagggttactaactctttagtatagtttcctatatcaaaaggcagtattatatcccttgcacgcaacatatcctattgaagtaatattgttgttaggagtcatgactagtacagccttttcatgtatacttcccctcgcacaaggaatttgatatctttgcactagtagagaggcgatttcaagcaattgagtaagtaaattcctaaagcaaccggccaatgtggccacgcaaagtggaaaaagtaagaggtgatgttgacatcattaggttgacagttgagtctccattcttgaccatacacataaatatgaccactagtcattttctcatttacaaaaagggagaaatacactgaccaatagaaaagctaccttttctttgcaggtgcaactttgtggaaaatggaaatcggcatccaactttggcagattctatacgtcaaatatatccaagaaaaagcacttacatttttagccatatcctagtgaaaagcaacaaatcaaagatatacactactttctaatttgtagaggaaaccacgtcttttcagtcagagatcagtaatactggagtaactaataagaagagctgagtagctccgtgccgtactgttaacccttccgaagagaagcttggacaaatgatggagaacacggaacatggcaatacacaggaataaaatacagggaacggaaggaataaccaataaaagcaacggaatgaacataataaacaaacgagcaaaagatcacctgggcttcagcgtaggtgccttgagcgcggatggcgccgtcgcggccgatgataagcgacgggaacggctccccagcaggcctgccctcacgcgccgcgatggccgcccgcgcacgcttctgcatgccaatgagcacgttgtgccaggtgctggccctggaccgcgcccccgtccccgcggtggccccaccgagcggcgcgaggtcggccgggtccacgtcgagcacctcctccgggcgcgccccgtcgagcgcggagacgaggcaggcgcagtacccgcgggagagctccgag

SEQ ID NO: 23177 - DNA, 10867 bp, Oryza sativa
  unsure (1)..(10867): unsure at all n locations
gcggcgtagggggcgcgtgctttttcgtagggtggatcggtgcgggtggtgttgggaattggaaattctgaaggctcttggaaaaagggcaaacgcagcttcaccggtagtgcactgcagtggtagtgggcggtagcgtgtgaaacgttcggacgctgatggagtgggccagtggcgcagccgtccacctgtcccgccatgcgatccctctaccccggtcatccaatgatcgtgttagtttgagtactgccgggaggaaattcaattcatagcacagcttctcccagtagcagaaaatagcacaaaaaaatttatgcctctttaaaagcacagctccgtcatttttttccaatcttacagcacttccatcagtttggccgttagtcagaggaatcagaatgcagaaagacaaaaggaactttgtttcaccatcgtcctcctgctgtcttatttgcttctctccaagcgcggctgcacggcaccgtgtagcctacgcagccatgtctccatggctacgagctcgttcgaccgcgccgctattgtcggagcccgttcgccatgcttttggatccggacctcctcgctaccttctgcggcgctgttgacacttacgcctgggtgctcgaggaggccaagcaccacgacgatgacaacgttgttgttggattgggactgcgtcgtggctggttgctactgctattgcttgctcaaagccaaccaacgatatcgttgctttcgcatttcttctgttcttgctattttgggcgtcacagcgacatcggcatcagcgaggactccgtgggagacggtgccagccgggacgagctccgcgctactgggcctggacgccgcgttgccgcactcgtgctgccgcagttattcgtggatggccgatattcgggcagccgacgaggtggtcatgcgccaccgctgccgtagagagcacagagaggaagggaacgtacgaggccattggtttgacatttttttctacttcctccgtttcacaatataagtcatctagcatttcccatattcatattgatgttaatggatctagacatatatctatctagatacattaatataacttacattgtgaaacggagggagtatttttctaggattttggccctttttttgttagaataggaaaaccggttatattaactcgtcattcgctgaaccggttagagcatctccaaccgtctccccaaatgcctctccaagctaaattttagctagtcaagccaaaaaaaacatgctccaacgagttgctaaccggatggctaagccatccgactggccaaacacccacaccgcctggccaaatgtggagaggcaaactcactggccaaatggtgagccccacactgatttgtgtctccgactccgcctccttatccgggcgcaacaaaggcgtcaacctcggagcagcggcgcggacggggatggagctgaggatccaccgtcgctgtcgtcgttgccgccacatctcgatggcgtgagcagcagctgaggaccctcaatgtcgtcgtcgccgccgatttccgccgccaccgtcagatccacccgtccgccccccgcctcccttgccgacgcgagtagccgcagcccgcagcatcgcctctgcctctcattcgtgccaccagcagcaacgtcgtctccgccgcaagtagccgaagcccgcagcctccgcccgtccgctcgcctgcccacccacccccggaggatgcggcggtggggcggcacgacagcgagcgtcgccaaggcctcctgctcaccggccgctggcgttgagggcatgaagggagtggcaacggcgaggtgttgccgtcgcccctctccttgacggcgacgtacactgtacgtcgcctctgccccggccacatccggcactgccgcctccgaccccggccacatccgccgccgccgcctccgcgcccggccacaaccgccgccgccactgcctctgcgcccggccgcatctgtcgcgcgggaagagtgccgagggaagaggaagagagagaaagaaggtgtagtagaggctgatgtgtgggtcctagtgtcatagatggagagtatagatggagaggttgttggagcgaggaatgagtttggcttgacaaatcaattgaagagttggctatgggtgtgtttagttcacgccaaaattggaagtttgattgaaattggaatgatgtacagaaaagttggaagtttgtgtgtgtaggaaagttttgatgtgatggaaaagttggaaatttgaagaaaaagttaggaactaaaccaggcctatatgagtgtttggagagtccaatttgaagaagctgttggagatgctcttaggtttgacgaagatagcgaagcagttgaggaggagcccttgactgagaaaggtaagtcgctacacttgagctagggttgggtgctcgagatgcaactcgaggacaatagtacttaggctccgttcggtagtacaagttaccaactcctcctcctcgttttttgcgcgcaagcttttcaaactgctaaacggtgcattttttataaaaagtttctatgaaagttgcttaaaaaaatcatattaatccatttttgaaaaaaaaatagctaaaacttaattaatcacgcgctaaaacgctgcttcgtttagagccttaggggtagatgccgcaaaaagggaaactgacaaatcaggccatgatttcacatcccaaatttaccctaaaaagtatcttttaaattattcatagaaaaagtaaaaattggtttaaagcttccaacattaaaaatatacaatctaaaaaaatcaaatgaggcttagagaatttttgtatattttctcaaggcctaaaaggcttaacaaaattttaatggagttttcagagcacaaataataattataaagcaataaagaaattattatgaattttcttaaaagaaaaaccctaaaaacctccttctctctctaggccgaaagtcggcccacttcctcactctctcccctctcaccggcccggtctatctctccttcccccgcgagcacgctggtgggccggcccactcggccacgccctgggccactatcatccccgtcctctcgccgcttccgcctagcgcctccgccgctgccgcgagtcccgctgctcccggccgtttccgtccatgttggaaggggaatcactccccaagattccctctctcattccccccacttacccctctctctccctcatcaacgtggtcagatttagtccggcaaatctcgctggcaccattgatggcggcaaaatttgccgccatcgtttccctctctcctcggctctctctctctctctcccccgttgctacaaaaaccctcaccgcaacccctctctcgttttcgccaccttgcgcttcctctcatccatagaatcgagccaccgccatctctctctctctctccgtcatcaccgccgagctccagccaagcctcgccgccattcaggacacccctcgcctcggtgccaccaccactggcatcaccatcgccgccgacctcgtccaccccctccccgcgccagcgatcgctggaaccccgtccgcaccgttgacctgagtcgcgccatcgtcttcctcctctctggtcaccattttcgccacctgccgccgtttggggtgaaccacaaatgtaacatcccggcccagagcttaataggattaataaaatactcatatcaacaagttgcaacttcttttccggaagcccgtctccgaagaactctgaggactgattgaaaaaaagacttgtgttggtttgtgagggcagtcgatgacctataaaagctgccagatgtaagtgggcctggcctgggacaaggtgtgtcaacaagttgcaacttcttttccggaagcccgtctcaaaagaactctgtgacgtggccaaccttatcgacctataaaagctgccagatgtaagtgggcctggcctgggacaaggtgtgtcaacaagttgcaacttcttttccggaagcccgtctccaaagaactctgtgacgtggccaaccttcgggcgcaccgtgtggccgccgcgtgaggcctgcccgtcagccaccatcgcccctccggtggctgacgtgtggggcccacggcgccggtggagggcaaccctgtgagcccagtccacagttgaccgtgaggctgtcgtgtgggccccaccccatggacctggctcatgcgtcaccccggggtgctgatgcaataatcatttttaaattaaagataattcaagaaaatagtaaataatcacctaagcaacatataaacttgaaatggccataacttggtcgtttgaactcgggattggactgttcaagtctatatttttttcttaagaagtcaagaacccatttatgtgctttgttttggcctcttatgtggattttattagagtaatagtctttttcctttttatcggccgtgtagatgatgcagcttcggaagatccgctctacgtggaggttgaagccgacgtttgggaaagtgagcaaggcaagtcatatctccgttgaacatattgatgtcccatgttttaaaattattttattttaaattattgcattaccactttatttaaattcttgcgttatcactgttttatctagctttacctacccgtctttgttatagccttataattgatattgttatcataccttgttccccctaggaaaataaatccccaaactagtgtgtactctatctatggttccactagtatgattttagctagatgcttcgttgtttaactaggcaaccctatgaggttttataactttagactttgggaaagatcacatcacttgaacatattggattggttggcataatttggaattgggtatacacctccccctctactcaaaaccccccaaaatggttttaggttgggctcggggtgcaaggttttgatagtagcacctcggtcaccataaggaccggtcttcgggcctttgttgtaaagcactaccgtacttctacatgtctaagtgggtaaggcttagtttatagcccagtctggtcatgagcaaaaggacacaaatagagatggatgaagtagggtgatggatatctctgaggcaaatgaaggctatacgaggaggtgtccggtagtcaagatctcgtggcatgggatgggcatccagaaggccactcccgaaggatgttctaatgccgtggggctcgaccataacctacctgtcccaggaaccccggccgtaggtgggcgttgagttggtacttttgttcagggctagggtgagcgaagaagtatgttacgccctccgtccatataccgtggtggtatgtggcgtgtggcgacacgtgaggaaggcgtgtcttgtgggtaaagatgtacacctctgtattagtgatatgccctagaggcaatcatagagatgattgtatcacatactatgtttacatatttatctgactttattccttgaaatagataactcattattggttaatggatatgtgattctttcatgagactctttatgttgtttgttactatttctaaaggatccctgatcaaatatcatatgtggaacaaatatgtttaaataatcagcacatgtattaattgatgatcatgtctcatggatcatgatatagagataccaaattaataatgtggacacatgttggtgaacatgttgttggatagacccaacatgagacactgcaagagccatatgtgttgtgtcatcagtgatcttatttagtgttggtgttgaatccttagacctgagattatcatggttcccaacatgtgtagtagcttacttagggactactaaacgctactccgtaattgggtagttataaaagtagtttttgggtatgccatgaaacatgtagtgggatatgaataatcaagatgggatttgcccctcctatggaaagatatctctgggcccctcgatgttgtagattatggaagtgcatggccatgccaaaggtgattgaggagtcaatcacaagttatataatgtatcaataggttcgagtgaatgattgagctattagaggatggcacatatctagccttgagcttaatcgatatcatgaggcaaagtggttcatataagtatacactagaggttcaatcgatatgatctttatgtatgcccggtgggtcaatacgttctgctaggggccgctgttgacgcgtgaactgaaaaggagtttttgggtttcagccgagtgtacatgaacctacagggtcgcacgcttaatgggccggaataggtctcctacgtgccttggaggcctgagtgatggatcctatatattcgtgaggggtgtgaccagcggaggtattgcatcacatgagaaaccctagccgtcactcccctccccgagcaaaaccctagacgtgcgcgggtgctagcacatctgcacgtggcgttccgtccctgtacgtgtggataccggtagaggcgccgctggtttgcagtgctgatcggggtgggaatacggcgaggagaacgcacgaggaggagaaggtcgagctggtgcgatcgactacttcctctacatcgacgcgctacttcgcgagaattccttcgacttcttagagccttcttccgctgcgcagcgcgtcgagtggtaacgatctatgatctaataattgcatggttcctggtttacgcaatagaaaattttgatttatgctatcgtaccctacgcgtatcccaacactctgatcagagtataacctatttgaatagccataccctcggttatgggcaagcctagcaatgtacccaagttagtggtttcactcttaaaacttgttaatcaactaaaacctggaatggttttcctaggttggcttgggacgagctggggcccggctttaaggctgccagttcggtctgacttatcgtaggccttgggttaaggcaggttcgtgtaggttcacggccgtggataattgtaatattgtgtagacctaggtttgaatttattaaatggctttgagcaactaagtggtttaaaaggttgttttactgcaaaacctaactaattattattacacctttgtaccccttatatttattgtgcatttgtcagtgtgacttgttgattacggtggttgtactcaatcttgctcaatttttcccccatcccagaagaggaattcttggaggatgatggcttcggtgtctagctcatgcctgccatcaagtgcatatggtcttcgccctagtcttccgcgcttcttcttttatctctgtgtgttgggcctttggtcgcccatgtaataaaaatactatttacgcttcctcttgttaaactctaatattgtatcaacctttgtgtacctcgtctcctgggacaaggaataatgcacgcacgaatggaaaacctgtcacctgtcgggttatttccggtcgtgacacatgacaagtctcatgtgttgggcacgtcacgaagtgcatgtaaagcatacatccactgcaatgtaaataaataaatctattcaaatagccaagctcatggttaaaagagcaatggaattttcaatactcttgacaagcctcataatatttgaacttgcttagaataggttggataatgatgttggacaaccccggaaggcgggactggtcgttggttaagagaaatggtgattaattgaatggtgaagttaaactgaaccaaggtgggggtttggggaggtggatgaaccctctactattaactacaacttcaacaatatcattgatttaagttaaaaataggtaagtcgtaggtttgcaaactatttaaagaaaactagttttatgcaaaataaacccaggccgctccttaattccatgtgtgcattgtagtagtggcttgagagtacgttcgtactcatcgtggattatgcaatcataaacatgtaatccttaattcaatctttctcttagatgcaagcaatattatagatcgaacctaatcgagacagcatggattgctcgtaatttagacaagatgaattaaagtttacatgagtttatatcacaacctatgatacaatacttaggttaaaatatatatagtatcagctattactctgatacagccttatataagaatatcaatctaggaaatatagtttaaataaagtgatatacttatataaaggacaaatataacatgaaaaacatgattaaagaaattaaacatagcataacagttatatcaactaagattgactgaatccatgattctacccctattggcaatcaagaagcatgttagttttaatgatgttagtttttatgattctaagcaggacttagtaggtcaaactcaattgatgcagcataagtatgaaaaaaagcataaagtctaaacaatcaagcttttgaataattttcagggtggtggataccttagctaatctaaaccgacaaaatgataccggcaaaaccctaggtttggccgaaagaggtaaattgaatcatcaaattagattagctaagatatatgataaccaacaattacaaatattgttttctcccttatagcacatgaagtcttcatctgctaaagctatttgctccattttacaagtttggatatcatacttatagaacttttttaatgccaatagcaacatttttccatgaaaaacaactggtggacttgctacaggccgctgaataattgttggtggaccctgtatagtgcatcatcgtttactcgagtctattcagggttctgcttctgcccaacactccaaatctctagtgataacactggactgaaaatgaaacaaatagaattcatcctccacttgggttgaactggaagactttacattgtttgggttacatggaaacatactcgctgtgttcgtttgtggttgggaaccttccctcgtcacgcaaaagagagcgatggattagcgtgtgattaattcagtattggttaaaaatatttgaaatagattaatatggttttttaaagcaattaactttcctatagaaaatttttgctagaaacatactcttttcattttatattgatcatcatataagtattttcaccaagataaaggacttaactataccgtacaatttatttaatgtgagtatgtggtgacaacaatcaagaaacatgttgtcatgggcattgggcacaaaggcagaggccgtaggcagtccatatcaattaagttagagttaagattattagttaagttagagataatattagattgaatccttactcaggggtcaagctataccatctatataaggatgagattgtatctattatcattaagcaatgaatattaattagtctaatctctccctcccaacaatgtttttctctctagcctaaatctgcatcccttctctaggagccgacgccacccggctatctttccagcggtgtttatcccatcatgaccttgggtcatgacacatgtagactttttactccactacgaacaagaaacgagccattacctacccctgaatgcctgcatgcatgtatgcatactcaatttgcatgcacagatgtaatactattgcgtgtcaaagtcagggctatataatggtcaatttgaaatatctgatttttggttatatgataattaacatggaattataggagtattagtatttagtagtttgagaagcgtacgcgtgaaaatggaagttagcatagcttagtggagaagaaccttatacttgttgctacgagggtcaactccaaatctaagcgttgtaccatggttgtctttagttcacactgaagtttagaagtttggttgaaattggtacgatgtgatagaaaagttgtgtgtgtatgaaagtttgatgtgatggaaaataattctctgattgacaggttgtagaccatcttttttgtccttcatgttgcaaacgaggaataaatcatttcagtgcatagggacgcatctataatctgtggaaagtatgtgaacgtattgcattaccactcatacttatataggcccattaagaatgaccctttctcttcgaccattcaaggtgagcaatgatgaaaaatgggctggatatcctgcgatgctaagccttgcatacaagctttagctcttcctgaatcgtctacttactgaattatcagcagcaaccaaattttaatttatttttgaggtttttttcagcctaggctatcatcaaggattgacttttaaaccgtgaataatataaatataaaggttttatttattaattattttttgttgctacattgatatttctatagtccatcagccgtaggttgagcaaccgcactagtacgaaaatgatttttgtgtgtggacgaaaaggattttcgcgtgcagatcttgcgcccatctgcaacggggtgtctgcaaaaatacatttttttcgtgtgggtgacgcacccgctgttgatgcgaaaaacacacactagcctagaagatctgcttagctccagtacaggttatttgatgagatgcaggcataccagttagtttgatcctacaactgacaagatatataaacaatagatcaaatagccgatcggccgacaagccgatgaagtaattccagacgatgttgatacgcnncatgccgatagggtcttgattggctatatgtccaatgtagaatctggcgcatgaataaataatcatacaaagacaatcggctaatgataatcaatatagtaatataatccagtagaaaccaactgtctaataatgatatgataaaataagcacagattcaaaagttaaagcatacatcggctggaagaccgatgtcattaaatccagaagattagataaacagtggaaccttta

SEQ ID NO: 23178 - DNA, 3548 bp, Oryza sativa
tcacgtgtgggcctcttaaggttccgcacgtaaaaataggcttatttttgcgtgcggacctcttaaggaacccatgcgaaaatcgattttcgcgtgcaagcattttaaggatccgcacgtaaaaatgggaggacgatttttctagacgctgtcagttatggaccgcctgaaatctaagaagtggtcgtccaggaaaatcattttttatagtgccggtgccatagatatgacttgtagtctcaacagaatgctgaaacatcccctcatccgagatgctttgacaaataattgatacaatccgcgaccaggtgctccatagaacacgatgtctgtgcatcttttcaccaccatgacaagattctcaaaccgcacttgcacattataatggagtacttgcaatgctaatcggacaactcaacttccaaatgccattcgtgttggaaaaattgatctctcggtttgaaaaaccgggaggagatcgcgctacaccattttttccacccgttgtctacgcaaaatcaaagcgattcaatttgttttaattcttgattaactacgcgccattatcagtggcgcccaatttatttccttttgagtcgcccccgattccctacagcgctaaatataaaagaatttgttttaattcttgattaactatgcaccatgatcggtggcgcccaatttatttccttttgagtcgcccctgatttcctacagcgctaaatataaaacgggagaccagcccaagagtggatgacgatctctctcaatctcaatcttcccgacaaccaaaccctaaacccgatcaacatatgcgctggaggagaaacatgtgcagttccgagacaatgtaggtgacgaccagaaggctgccgctaccccacaagtgatcgccggcgaccctttcgagatcaagccgacatcctcaccaacgatacgcgaggtggttcgaggttccgcgtcatctacacccactctagttcaagctagaacaattgcaatggcttcaaacaacagtaatttagacctatcaggtagcacgctacctttaaaggcaaaataaaaactttggtttcttctccgtcgggtggaccaagatgcaaagaaactaatttgatttaacccaaaattatcaaagagaacgcatacctgaatgtcagtattccaggtggagtacctttaacggagctcgtatttcatattttcaaaaatcgacatgagataattccacctgtaaaggtcaaaactaaaatttggtgcaatgcacaaatgccgcgtcatctttaaatgcaacgaaggcatcaattacaatatgacgatacgactgtagtgccctgcgttgcaataactcgaagcacaccaagcagaggccagataaggtgtgcggcggtgcgtttttcgaaggggaaatcacttatttttgttatagagcaacactgaatcaacctatttacatgatcgctgaaccttggacatcttagaagtcactttggtagtacaatctgcatgctgcggacaaggtgcagataaaacaaaattactacattgtcaggcagacactctcacactcctatcttcacacactacactggccggggtaaagacggatccaactgagattttcactgccggtggccctccgggagaggaaccactctatagaacggcacagctctttgtggtagatttccatcctcctcgtcatcatcaaacaagagtagataactgccaaaaggaaataagacaagcatattttcaggaaaagcaaatgttgctattgaaatgttagtcataagaatattaagaagaaagtccgattaaaaccttttacacaaacatgtatgtttattttaaggtccagtttgcttggtaccatccaaaaaaatcatccgagttggagaatccatatcacaccaacttttggggctcactttttgtaagtaattgatttttttagcagacttctgttttttttttcgagccagaagaacttttttttggtccaaaatatggagttttggaaggcccattgttttttgttctaaatattgagtttttgtaggtccattgtttttgtttagccataatgagttacatgctggaaggaggaacaaaaatatctgaacacaaaaaaaaaaagatctcgctggaaacacgtaatgtatgattgtatatgcatagcttattaagttatggtagaaatacaaattttctccagatactgcagtaaggtagaaatacaaattaaacaaatacagaaccatcctaaacacataaaattaaatagcaacacatgagactatacaaagttgtaaaaacataaatacttactcgtcagatttcctctgcattgtttgtagcccagtttcacatcagcatgatgacagagcaaaaatagttaatcacttatcaaacaatagaaatcatagaaatgtaatagttgtaaaaaagatactatagatggctctgcaaaaccaatacatgttagggaatcatttgtggaataaaatcatgtccatgaaacataatgttgaaattcttcgtataaacaagacatgtcacacatgtaaacggagcttgctggtattaacagcatagtattattcgatagtatcatagtagtaatcagattagccactaatcaacaatgaaaccaggttacacgtttctgtttcagcccttctaagttttcagccctattttggcagccaatagttcatcagtcaccactcaagaccaaggtggtaaccaacttctcaagttcagaccgttagaacaacagttagcatgagtttggatacaaacaatcttaatggtttgtttcgaatacatgagttttcctgattccttcaaaaaaggaactactaggattcctgtgagatataggattcctgagctccaaaggagagagccctaagataatcaaattggcatcagagctcaaaatcttggtggttactgattcagagcctgtgaccagtcaccaacaatctggcaggaagagtttaatttcgaaaactaaatttgaattaagaaatcctcgcaaaaaatgaattaagaaaatgtaactggcaggcagttaccagtatttgaattaaaaaaacaaagaactcttaagttatgtattagaaacactagttgcttactcaagactaagaaatcatatttccatgtatatccagtaaaataaggtttcggggatgggtgcccatgatttctttggcaactggtttttgaagccttgattggcatatggtgtgcaaaatagcggtctgtataacagaacttataatttattatcgcaaagcaatgcttatcaaacatacgataactgtattcgaaacgaaccttgattgacttagtggtcccaagataatcaaactacatcccactaagtcagataccatagccaaccttaagacaatcaaactgggatgtagtgttctaaatagtgatatgcaataggaatttgtaatttgttatagcaaaactatgcttattgctatgcaaatcagtgcaatttatactccaaaaaggagtggtggtgg

SEQ ID NO: 23179 - DNA, 17908 bp, Oryza sativa
  unsure (1)..(17908): unsure at all n locations
ccaccccaccaccaactcccaacctttttaggaatggagaaaggacatgtggggccagagggcccacatgtcaatcacccaatcgccaactctgtttatgtggaaaggaaaaaaagacactgtgcagctagagggcccacatgtcagtaacaaaatatatatagaaattacgagatgatgatggtaatgcaggttaatgataattttcattaagtaaaaacccattgcaacgcacaggcaatatgctaatagtatcaggaattcaaaacttgaccaggtagtgccaacaggccgataataatttccaccaaactgctggcaagaagtagcaagcaaacaacttgcagttacacccataccagtgcaaaacaatatggttactggaataactgaatttggttgggaagcaaccagcatccgatgtgaaccggatgatatgtcaatttgcacgcgtatcaacgaaaatagtctgttatttttatttcagacagtatattctttcagcttaaattgtactattcaatttcaagtgccagttacattggtgtgaaacctaaaaatagtggtattttacataggttctaaccattcaattatgttattctgaagtgagagaacaaaaatgtaacatctctcgggaatctcagcaaaagtatgcagatgcattcctaaagataaggctaagaactgacatgaaaagggaaactaatcaaactacttactagagattcctttgtatgttcataactgaaatcggtcgtgtaagttcaaaatattgggataaacatgcattatacagcagattagagttaaaagagctcggtaaccttttgcactgtcgaaaaaagaacataagatacccatgtatgggatcttcctgccataattagcatgtgtatttagcaatattgtcaagtgtgctcaactaattgcacatatctaccatcttctcatgttcaacgaattgaattgttatgttgaaaacttgaaattggtctacatattgctgcataagtgataaattgtacaaacattgtcatgggacagaaaatgtatctatacaaataacaaatatgcttcatctcagcttcaatcaataacaactaccaaatccattactttggtgggagagcatctggattagaaagcattttgatgctcatatactccccatttctaggatgacttattttcaagttcatactttcaaggtaacctcaacttaaatgttttcaacaatcaaccatacttcttgacagaactaaaagtttcaagtgtcagaaaaagctcatcatcttgatggtataattgaatatgtaaatagatgaaactgaccatataacagggaatacatccatacatatggacaggacaggactagaacacagaaagaaactcaaattactgtcaagacttaaaagatttacataggattcatgaaagattttaagatgttaccttacgattagaggcaacagtagctctatatagtgctgttgtgctaggataaacagctaagacttgtcgaccctgcccaaaatctggggcactggaaggatcccctctctttggaaatggaataatatctgacataggcaacttgtacttcctattacaaaagggggaagtaacattattttacatgtggaacaaacatcaattatagtgcaaattaatgctcagagtttgcaaatgtttcactaaacatcatatacataaaaaactagagtgctttaacaagagtacagcgaacatgcgtatagcatggtggtaaatgccttctgttgggaagctactgaccagggttcaaatcctggtctttcaccaaaaaaggtcactcgctggttcccccaaaaaacatgggttaagaagaatcgacctatggagggtgggcctcaaagcacgggttaaggttcgatccattgagggcttctccccatgtagggaaaaccggtttttgtgaccgttctcggccccagtttcgggtgctttttcttagttgcaatacctctggggaggtctttccccttggggctgagttcttttttttacagtagtacagtagagggaaacaggtaaggaaaatgaggaagttgatggaagttaattttcaaccctacaacacaattcaactcaattaatcaaaattaactgagtcacatcttagcagtaaatatctataaataatccaaagggactaaggtttaattattagaataaacttaacacactattgttactttcacagaatcattaatccctcgtatggtattatcttacccattctcaacactagtaacacctctctgcctaaacacacatttggtggatcctgtaaagatgtaggagccaggaaaggagtacaagagcagagatccaaaccgactgatgttgaagaatcagcggatgagttgtggttagggttatcaaggaaagggtcacacaaaagcttgtgggttgtggctgtaggatactgtaggattttttttaatgaaactagaagtgnnnancctggtctctgcaccatgggtgctcataaccattacactgccataatcagcgataaaaaaagagaaacaagatagaaatactccctccgtttcaggttataagatgttttgactttagtcaaagtcaaactgctttaagtttgactaagtttatagacaaatatagtaatatttacattaccaaattagttttattaaattaataattaaatatatttttataataaatttatcttgggtcgaaaatattactatttttttctataaacatggtcaaacttaaagcagtttgactgtgaccaaagccaaaacatcttataacctgaaacggagggagtagaagacatggccaataaaggaatcatgctgaggccaataccaaggaacacccacaccaaccttgcgacagcttgcttcaacaggaacaaccagcatcctgatgccagggaacatgatgtggcctagcatcaaggaaattgaaggctacacctaaatcacctcaaaggatcattgacttatcatcgtgcccaaccaaagaagaccagactgaaggtcagaccaaggatttgcatcccagaaatcagttatgattagtcttttttttgtatgacatatgcttgctaattgcttggaagcccctaattaagttgaacctaggcaccttaggagttgccgctgaccatctagcaccttcttgaacactagttataatagacaaacagacaatgctgccatagtgctatggccaatccacctgatctggcaactaggtaaggacgccatctgaaaatctgcatgcctgagggcataaccgattcatgggagacctgacactagtgtcgtggcaatatctgatctggccagatagatcagaggccagactcagacagcacacacgcttgacatcgctgtctgtccaccaggaaacaacagctgcaggcagaagaggcctggtcgcagcagcaaaggtagggggaggaaaggaggaacagcagcttatgtttagtcctctaggttgacccaagaggcctcaaatgtagcgtaggattaacaaaatgaactagatggtcccaaaggttcagtatcaatgaacatttcaggaatcggaatatattgaaaaatgacctgattgttatagtaaaagcaaacaagaaaccaaaatgacagtcctggacttatctcatacttttgggcactctcttcatcgtcacctggctcctcatcaagtacctcatatctgcaaattcaatgaattcatgaatgcttccttcaagaatagcaatattacagaaccccactcccccccccctccccaaacacacacacacacacacacacacacacacaccccaataaaaatacgacatatattcaagtaggaagtaaaaatgggcactgggggctaagatgatgtcagacgatccaaaggaatcggacatgattttgcaagtggttttcatagtagggatgacgagtcgtgtctccacaagactaagccaaaagggtggcactatggtccatttgcaccaagagagagagctagtccattagagacaggaagaggggttaaatggaggtagtgctgtgctattgtgaacatgggtatggtcttctctcaggacaaacagggcgctgcataagcctcgtctcaggaaggatggagcatagaggcagcacagttcagtgtggtggaggagaaagcagtgtgggcatgaggagcagccaagtacaggagaggacgaggtaaaaccacaataagaggcagcgtggtagacaaagtggtggcagcttttcactataaagatggtcacagactagagttctctcctactaatcttagatctaatggttaatggtgacagtaattgagatcaaacagctcaaaattaaacggatggcgtggctcaaccaaagagctggcattccaactactttggttatatatagaaagatataaatagagtagccccacagctctgctggctgttttcatattcatgtttgccaggctcttctggataatcatgcaacctgaaatgataaccttcttgttatttacaatttccttgtctacctcagatatcctaaaatgctccatagacccaggactcatggtcctctcaagtaataatgactacaataagacagattaggaaatagttaatagtctaaaactgccctcatccgcacaaagttttttcccctagagcaagttttcatacaagaaatatataatatagataaaaggtgaataagacatactcttttgtttccttatcgaaatgtatcaccttcaccacaaaccattcatctttttcttcgtctgatttgaccttagctgcaacctgaaatggcatagcacaaatgtgagacatttaatatatacagcatgttatcgcacatgtgcaaaagagcagaactgatttatgcacaattgatgatgtgctaaagagaaaggaagggtaaatttctttatcaagcatatcatccgctacaagtaccaacatcaagtatcaagtttttttagcgcatggtaaaatgtctcaaatagatgtcagttcaaagactggaaagggtaatatcaagacaatcctaattaaccctggaccttggagttcttgccgattagtttgattaaatatatactatagacttaacaagtgaaaacaaaacaagtatggttgaacagtttttatgcagaggatttcagtaattttggtgtttttaattgataatgttcattaaatttacataaacttacatacaaaaatggatgcagcgttcttttcgtaagaatgcaatgatgttttcattccacaacacaaaatcattgcaactgaatgatgaaagtatctttttttctagaaaaacataaattataatttacttctgtatgctggtttttccagcagtacagagggcattaaaacatgatgctgaacaagtccaaatttaaggataatagaagttacagtaacatctccagctcagagaaacaaaataatgttcaggaagcaataaaatctaggtacaggtctttgatgcaagaaaaaaaatcattacataaaatagataacaaaccccagccgggtaccacaaacgttatggagatttgttccggttgaatattcttcccatgtttttttgcaaacttcttcaaaattttgcttactcaatcttcactaaatctttagcaatacattttttttaagtagttcttgatgactccaagaccaaaatgctatgttaaataggataattggatctcactctcacatgtacatcccatgagtagngttcatgtaaaaccatcctaaaatctatatatggcagttgtgagtattcaagacgcagaaataaaaagagtcaggcatgttgggtgtttgagggaacacattgcaaaattgacagcctgaacaagatttaaacaaccctgttaaaactaaaacaccacataggaaagttactaacaagtcttcacatggaaagtagaagtgtttttttcatcagcgttgctgtagcacaaacagctgaaatacaaaaactaactgatatttccaaattcagctgaagttgaaacctgttctcctttcaggtttgtagcttggtcaagttggctcctcatagatgcagaggagaatcgtgtagtatctgtatcagacttcatcctcttctttttctgctcaccaacttctgcaaatgtagcaagcatctttagtttttcatgctcaacaataatttgtcctgaacctgactcgcaaaatcttttctagtgcttacctatcttttttcgttgtgcagctgaagttccagattgcaacaaaccatccaatagtccaaccaaagcagacgatgcactgcaaagtaatacgaaatatttgatcacattgcaggagacgtttcttccaatagaagacatgcactcagagcggaccagataatccaagcaaatatcagtaaaatagtaattgaaagcaccaatataaaatcattgaagtgaaagcgctgctgttgtattgtttgtgatcccatgatggccagcatgaataaccatgttctacaaagccaatgttcaatgtttgaagaaattgtgcctaacaaagaagcaggaactttctgctgacaagtcgcacaaaagttttttcttgaacacacaggaggactgcgatcatttcatttataggcaagttgcacaaaagtaaaaaaatcaaacaagcttatagtccaccattctatgctaaattctgaaaaaaaaaaagtaaaataggttaacatgtgcaagatatacagcatattcatgacatcaaaagtgaaattttagtttcatcaaagaatttttttactagaaattcagtaaatcaacatttcacatagtatgtgatgctcaattctcttttcttatttacagtcatctactttttgaacggaagcttctgttcaggcatataggatgctgtacctattattgagaagtcaaaaccaatatgatgaacttctgagactctttttgaaattgttagcgcttcattttgattgttataactgaaccaaaactgttctctgaggtaaacagttggtcacgactactatctatttttgtacatgcactcaatagattcaggcagggaagtgtttgtactttctactccaccctgtcccacaaagactccacttttgagacaaagttgacaaattagtggtgagagaaagaccacagtacccctgattataagaaagtagtatgtgaagtggtaggtaaggggtattgaagggataaaagtaaacttctcgatttgcggaccgagggtaaataagaagctaaaaatggagtcttttggggacagttgaagggctagaaatgaagtcttattggggcagagggagtagcttttaagacttatccagcagatcagactgtagggagttccatgattttttgtagatcttaactgaacaaaagaatagcatgtgcaacacttgaacaaataaaatttcaacatacttgctcctaaatttagctaagcctggttaaaaatgcttcagcatgtaagatttcaatataaccgatacactgattgtgttcatcagtattgttctttgtgttcatttataatgttatggaagtccacaacagaatgactaccaccggaagaggccagatggaatttctttagaagaggaagcgctagatgaacaatgccacttggcagaggagagggctggaacatgaacaggagtacagggcttttttttttttttagttaaccttccaataacagttaggcagccctttatagatatggcatacactcaaactaacatgccaacacaactaacggatagaccaactaacagataacctgaccattcagaataacaagtcaactgactaagcctaatgacttatctgccacaggcctcatcccttgacaatgcagacttgccacatgattgctgccacgacaggcctgaagaagcctctcacatagtggcatttttcttgctctagattggtaaaaggaactaatatgtttgcttgtttcatttatatctaaacaacttagatttatagcatcttttcatataatagtttatgaacttagaataaagtgttaacttctattgcacagttgtagctggggatagagagaaaacacagatctgatttatttgttagactaatgattatttaaacccaccatccagaagcttgaaaagtaaccgaaataccacctcaactcattcctcttgacccacaaagaaattgacagaatcaatgtacattgctgacacatgcaatttcaacaagattgaaccacagaaacagcacctaatcacaatattgaaaattcaaattgataagtctgctcgcatttcgcatggaaattggtgatgacttcaatagataagctagtacaacagtggtcaaagttgattttttttttaataaatgtttcctaagaagaacagcatgcagcaatgtttttgaaaggagcacgaagaaaattgaagtgagaaaacaaatgtgtgttcacaaaatttttgacatggagctttgacaataattgatttatcctttttaagaaaacatcttaagataacaaaaaaagggaaaattctatcagttcaagcttcatgaaattacctgacttcactctcacaaagttctttggcacgtgtatataaagcacgaagccgaatcaacgtagcatcaacctgtttatcaaccatctctggagctacaaaacaaaccaaatgtaaagaattttaagatttatgtccattctagcagaccgtaaacattactgcccacttaaatagtaccaagcacaaaataaaatccatagaacaaaaatacaggagggcaagggctcaggcagacagaagcagcagaagcccagacatatatcagctggaggctgatccaaggaatagcaacaacaatctggaggagcactgtaataagatactgtagtgatccatattcagcagaaagaagccagctccaacacaagagaagaagcatggctaggatatctagcagaaagaggccataattccaacagagccaacagaagcatgcaaggacacctggcagcaagatgtcatttcgaacagacgcaccaccaacattcgagaggcctgtactgaagtaggagaattcttcaagggttttttctctatatgcaatatagatttatttgatggcttaacaattgtttcatattcaagttccatagtttcatttatctgtttgtgtctactaacataatgaaaacagtacgatgttactaatatgcatgcacgaatctgactatcaaaggaccaccatcatgacaacaatgcccatggatcaaaacttcagttatttatcttgagcagaacactcacagttaaataccagaatttcaacatgatttcaaagagaacgaaaaggacaatttcaagcagcctctagagtctagagaatacaaaaaacttcatgtatggaccctcacaaacctgaagtggcctttctgtaaacagtgattcagaaagaacaagtagttaaattttcagcatagatcaatagaaaacgaggagaaaaagggaactcttcattctcctctaaatccattccgcttctcctctcccagccaagaacaaaaatatatggatgggcttaagcatagtgatgggaacaaagcagcttacagaagcggagtattttgtggatttcattgatcttctcggtgatgctgtcctgatctttctgcagctgatccaggtgattcaacttctcaagcaggtgctccatgtaaccttgccctcttcttcctcctcctcgccctccctctccccctgccctagacgatgacatctcctactctcccttagataagaatttgaccagatttgcacgagtgaacaaggcacagattgatggagatccaaggaagggggttcggttctctcaatttcagctttaaaggtgtgcaagagcaggtgattggaagtaaataaatgagtagtccatttctaaaaggacaaattcaggcgcaaccaggttacggttgcaacctttattgctggttctaggcgtatgtgccagtttgccttcctagctgtcgttttgcttattgggctccgcaacttgctcattttcaattatgttcagcagagtatctaggtgctataacctcatgagtattcttaagcacatagtaatatattgtgtttcttattcatttggattcgacaaaaaaagtatagcctatgatcatccagtctactcgtatatatattccttactcttatatacattccttcttcaagaaacaataattgactagcttgattggcgaaatattaacgttttcataaagatgattacccaaattgatcgaagaaatatcaaggttttcataatcttctactattagttatattcttatcttctactattagttataatggtatatcattaactatagaagctataaagttctaattcgtctcatttaccctactacccttctgtagaaaataccatttttgcacacctccatgcgctgctcttgtggcatgtatggaggaaaacctacagtttttgttcagttacccataagagatttcgtatctctgctgctcctgataaatatgcatttatgttacctataagaaatttgtgtctatcctccttaaaaatatgcatttatgattgagtcaaaaagaagttgagcatgagcaagcatcttgacttaagttaactcacaaaatggtcttcatacgtaagtagccttcgagattgtttctttcatactcacactccccagccaataaatgttgttaaataatagaagaaaacaatatttactgatccaagtatttcagcaatgcatcatatcattacaaatttggcttttcaaaacacaaacctagaggttatattcatatttcgatttttttttatgaacaaagataactgggtaacttaacagagatgtatactgacatttttttttctactttaccttgctcccacttcccaacaaaaacactacttcttacgcatctccatggcatataattttactctcgaacgtctggaaaagaaaacatctactctttttcataggaagatttgtatgtttgacacatgcatgagattcatacaccctgaaactttaaccaaacaagcaagcacaatcaagaaaaggacaacagatcagagtttcagttctgtttttttttttaatagagggccaaaaggcctctttccagcgatcctagagtggagacaacagcagtcatgcacgccccatccaccccgcacaatcaatcctaatggttgtgctcgagcaagctatcagtcttgcagctaaacacatcctagccaactactagcatatcgcacaaaccaacaaaacaagtcaaaacccccgtagcaccgcctcccaatccacctaattcgaggtagcaagcagctagaaatccatctaaaccgtccaaaactgaacatccagctactggataagaaacgcatccaacatctaactgaagggggccgaaaaccgttcgtccgttatctacaaatataatccaacacctcggcaacaattcgaacagcacggaaacgaaaacagcacccacgcgcgcgcatggcgagctacttacaggagaggatcttcttgtgcatcttgttgatctcggtgaccacctcgtcctgctccttgcgcagctggtccagctccttggccttatccagcaggctcgcaatgtccgctcctccgccaccgccgccgccgcccgcgccacctccccctccgcctccgaccgacgacgacatccccggcgcggatttcccccacggttcggtaaaggaatcggagggtggatcgaatcgatctactactctccagttgggggatggggggacagctcgaggcgagccgaggcttttatttggtgccgtgcgccagtgcagaacagcatagtcggatgggagaatcaggaaagcattttctgctataaacacaaggttatcgggataaggatacttaaaatggtatcttagtatcgggatatgagattttttaaaaaaagtttaattaatatttatattaattacatatagccactatatatatataatatagtaataataatatatgtcatgcaaatataaatatttattaatagaaaccacgttggttttcatatatttaattgatttttatataaacttgagaatatttatttacattattttcaaactatcttattttaaataatattttatagtatcgaagggatcgtagaatcgggatactacctaaaattttataggatcgtgtaataatgaatagtaggatcgagatactatgaaaattaaaatactaggtgggatcggtattgttttggcttggtaggatcgtaatatcgtaagatacgatatgaatcaggatactgacaatattaataaacacaagcataccatccgaatatttactactctcactagtcaccatccaaaaaaaatactgcatctccaatactagattgttttttattttacaaatgaagtatttatcacttttaacgtagaatttaacaatttgccacgggactcacatgtcatagatatattagggcccatatgacatatgagtggcaaattattaaatgtcacaacttaaaagtggtaaatagttaaatgtcgtaggtttgttggggctaaagaaaaattggtgcctaagtgctcatgcgttacaatggatgttaaaaaataagtgaaatacatgattcgttatgtcatttacgtacatgatcttataaatcacataattaattcataataatagcttaatgtatctgttaatgaccaaatttggtagaaccatagatcggattcaagaccagagtcagggcggatttgaagggattctggttgagaaaagcagagtgtgtatcggctacggatggcatcggctgccatatgcatcggctgacactaaatccgacaaggacaagccgatgcaaccgatcccgaacaggtggtcctgcaactgttgtcgggatcaattaaggcacttcataggcattgccacgcaaggattagagtccagaaaaggaaattgtatctattaattagaatattttgttaaattccttatagatatttttggtaaaattccgcctaagggacttgttcgtgttttaaattgtaatagagatagagtcgtgtccagcaaggacatgttatatacttcgggtataaatatggcccgacaccttataaacaagggacgacagttcaataatacttcggcgcatcgccacccttttctattttcattgtttcgacgagtttttgcttttgagttgggctgcatcgagttcgatttccaacgaagaggtaaagcttgttatggcggtttgtgttatcgggattagtgcttacatctccatgatactctaatcccgcccatgtgaatcgctaagttatcatatacgctgtataatctagattgatctcgtcatctaacctcattggctagcctctatcatcgaaaacggccgatagatttagatatcgacattgagttagattatacaacgtatctaccatcttgaaggagttttcatcggtttgtttggatcttgcgtttctcttcacacttaatgttgcatcggttaggtccgatctgttaagtaatgtcttgaactgtaatatctaactcattctatgaatactatggagatagtatcggggtttcagacgatcttacctggtttagcagtcttgttccttatatggttcttgatcttctaaatctgccctttatattaagatctcacttgtttgaaatatatcgagctctctatcggtctgttagggtatcccaattcctgggtttatgcatgctttatatatttcatttgtactaatatcttagtgtgaggtggtatcggagtactagccaatacgcgttaggtttgctttatcggctatgctttgagcatatacgatccctactttgaagtatttttagacatcaagtgatttatgctgtctcggcatgttgtccgatctatcccaatcacttggtccaaatgtatttcattggacagattgtgtattgttgacatctacagccgatcgaatatctaataatctctatgcttgatcttccctcgccgatctaatgcaagttacatcggcttggcaccgaacgatatgtcatcagcaaatcaatcgatcggctaactttgttcttctttgtctcttgttggttgcaggatcaaaccaactggcacgctcaaaacctgaaagcagtttcttttgacctatactagagttaagcagatctctgaggccagtacgtgttttccacatgaacagtatcatagtataggtcaaaattgtgtttaaccagtctaagctttgcatttggccctcttaataccactgaggaaaaaaaagtgcaaatagcccctccttcctatagtgcacattcaaatatttattcagccccctctcgcacttcatttcaccatttcgactccctagcacaattaataaggagggcaacgattaggcgatgccgacaatcgtcagcaggccgaggtgctttgggcggtgatttgtatagcataataggtggcacacgataggcagtgcaacgtggcaccatcgctagcatgaaggtagttgatgaacatcaactttgaggggggatagggatatgccttttttctgtcacagtggcttatgtaggggtcaaatacaaagtttcgatcagtatggacagccacattagtgcccaacactggtcaaacgtgttttgcacctgattgtcatcattaaaccaagattatagacctaaatgtgcaatttagaatatcacgaacctaagtgacaccttggtcaaagtttaagcatcgatcgtgaatttcactcttaaaatatcaatctttgattttgggtatgttaaaccctatgattgctatatattgtttgtataattttctataactctcagtgaatttttttagcgttgtattttagtccaatgtcttaatcccctccaacgcacaaatgatgacataccaaatccaatccccgcacatatcttaccttctacttcgtcgagtctctattattgatcggtcacacatcaatctttcacagtaacaattgtcattctacagttatcctatttcatgatatcctagaccatactctctactagttttgccaatcccactcatcatccccatcattcccctagggactatctcattcattgttaggttatacctcgaccgtctaggtcttctgtaaacccaccccctctcaataccacccgaaatctatctattgtgcttgaaaaggaaataaggtgaaaacggtggtctaaatatttgtattgaatcaaaggctaaatttgaatgaaatcattttcaaagtgatgtgtatcatgtttagcaatttcctaaagagcacctattactttgtttagggtttttagtgttcaatgctactaatcattaaaataaaccatgcttgctattgtgaaaggagttgtgttcctagtgattaagtgtgccacaacattccacccatgaaggaacttaattgtcttcaatgagtaaagcaaacattaaggacctatttgccacaccatatgagttgagagtgaggcggaaatggaataggtttttctttgcattcaaaatgatcaagcaagtagtgtggttcatgcatggctagaaagtttgcgttgaaattcaacacgcaacagtttgtctaaaaacttagtagatcaaacaatttgatggtgacaagtccatccaaccctgagaaacaaccattttgaccgaatgtacatcattaggttgtgtggattagataattcatgatgcgaccaagagtactatggatgcaactatttctcgtgtaaagtatcacgaggtaaattcgaataataacatgctccaacttgattgcattaagaatatggcactatgtaatgacataaatatatttatttatttattcagtgacatataagaatggggctgcatgtggatattggacaagtcatgtgatgcatcagaagatagagatcaagtcttcacaagttcaaacggttacatatcgttacttctagtgtggtagttacaattatttcgtaacaatctcaatcttagtgatttgagattaagggagaatgttagataataaggcatagatttgtacttttttgtgttgtgttgataagatagtttctaaccctagaggttgttgtaaccatgaggatataagatatatatctcctgaccttttgtaatcaccatgccaaggggtttttctagctatataaacacacagacgagcttggaggaagggcatcgattcaactaacatcaataacaaaataattttaggaactaggaagagctaagcggcacgctttgctccatccggactcattgatttgctctagaacaaagagaacctccacattataataatttatagataacatgtgttgaatctcatcccaagagaatcaattttctggaagaatgtggtttgggtttctcaaagcacaaaagtcaacaagcgcaccaccatttagagacccaggatatcagagaagacaatgtatgaactatttgtggcgcaaaactaacaatggatgttggcatgttgcataactaccaatggcaggaagataaagatgtggggagcacaaatgaataaatgtcactcatgattcacttataccatttttcagaagcttaggatggccatatctccatggtgctcaagcatcgcatggttcacgttgtaagaaccaatcaattgtaggaagggatgttcattgcataaaggactaagagtatggcgggctcctcaatagattgaatagacatgatgtaaacattcattcagtcatttgtttaataggacttcagtaagaacaaagaaaaagagaagattttcattccacttttgtaggttatgcattgatagtaaaacaacataactagtgctctcaacctctgttacctaaacatcacaaacttgtcatccaatggaccatcaggagtatacacttatactacctttgttttctaatagatgacgtcgttgacttgtagaataacatttgaatattcatcttattaaaaaaatagtgtacatatgtcaaactgtaattcatattttgagagggaggctgagcaccacctcgtgcggagacaaaaataatgggattgctgggaagcgacacaagataatgtggaagcagtgagcccatgtgggggggggttgtaggatcgagatatcgactagagggggggtgaataggcgatttaaaattaaatgtcacctgatcaaaactaacctaagttgctaagctcggcgagggacaagtctaactaagcaactaagttatgttatgcaatcctagggtgaaaatggctcaagtatgtctctatgaaatgtaaattttacaaagtaaatgatacaagagacaaggaatttttcaccgaggtttggaaactcgccggtttcctactccccgttgaggcgagcccaactccaccgctcaaccacgaagccaccgcacacatcctttgtaaaggggtgggcaaggcgggagccggcccatggagaggactacccaagcctcgatcactcggggtagttcttccttcactccaaaggtggtgaactccaaaccactcacaaccggcaccgggcttcctccataatcttctcggagaggtcaccgagcaactcctccacaagccgtctaagaggcggcaacctccaaaagtaacaagcaatgacgcggctcggagatgatcaagtgccacactagctctacaatgaagcaatgcac

SEQ ID NO: 23180 - DNA, 2447 bp, Oryza sativa
gtgcaaggggtgtatgcaattgaagtaggtgccaatagagtccccttgctactggtgtgggagtatttatactcctacccaccaaaactagtcattgggggcgaaatcccccaacttagtgtactaccggtctgaccggaagtgtgtggccggtcagaccatgctactctacaatggctagttttctaggcgttgtagccctgacattgggccccatttgcccggccggtcagaccacagtgggatggccggtcagaccggcctcggctcggtcagaccgccatcggctcggtttgaccaacctcggctctggtggctctggatcggccaccccagagcacaccacccagggcatatggccggccggtcagaccggccaacacccgccggtcagaccgctctaaggcgacggtcagaccggccatgacgctgcgggcagaccggctacaccggccgatcagaccggcacttgggcagcggtcagaccagccctggttacccagaccagtgacaacaggagatagacaatgaaattgagcacaagtctaaatgcaaacatgacctaatgtggcaatatgaatcatctctcattacccctcttaatagtacggtgaagctaaaattaaactagcaaatttgatcaccctacaccttgatcaattggaaattaaaacactagtttagcatctttttctcttcgctttacgccatcaaattttaatccatcggtagtcatccatgcgcacacataatgtgaacctaacttaaaatatatagctcagtagaatggttagtctacaattagtgcttgtcattaattaccaaaattaacaacaggggctgtcagggttacggataaggtataccctctattgttggatgtacgttgtatactgatacggtatacccgtacgtacacggatagttcctttatacgttaaggaaatccatcacgtgataggaacagaatccacagatggaaggagtcctactcggacgagactgggtctttaccatatcgtgaggagtccgatatctccgattcctacttggagatcaactgacccgcggtataaaaggaaccccctgggcatgacctaaatcatcgaatctcaccgccaacacatccaccacagcctacgaagccggtgcctacaggagccaagtcgccgggagatctagtcgaaccaactcgactacggtctcgtcggtatcatcgagttccgctattccctttgtaatctgtggtttccatcatataatcccatatcaactggattagggctattacctatcaaggggcctgaaccagtataatccttgtctttttgtttgcttgatgtcgtactacgtagatcctggtaccaacggaccctaataccctctatatccgctctacgggtatccaccgtcgacaggggcctatatgcttaggggggggaggagatgttgcggcagtgccaacatgcgatgattggagtttcgaagtggtccatattgattgcctggagttgatctgctcaagcatagaccacgcatgccggaggtggatgaaggacatatattttcttttagaaagaatgatgctttgtttaacacgtcaagaaaattgaaaattccatatgtatctgtaaatttttacctaatccttgctatatcccttaattctcctcattcctttatatacttctgaattttagtttggacctttcatactctttttgttagtgttagttgatcgttaaattcctataataagttcattttgccatttggtagaaaagcataaaaatttataagttttattattgaagggtaaaaatttatttcatggggctattatatttaagagtttgttatgtgaaattatgatagaatttctttgtagatatcacaaaaagttaatatttgtttattagttattgaaaattgtttatgtatagtataaatagatttgtcatatacagaaacatgttgtactcttaaaaaatattttacatgtacaatttttaataattaaataaccattaatttttatatcatatataaaaataagtttttatcgtaaataatatatcgcataactcataaatataaaagtctcatagaacaaatttatatacttcaataatatactctgtaaatttatatgtatttttcataagaaataaacgatcaactaatggaaaatacatggaagtgatccaaattaaaattcgggttatacaaggaaatgagcaaaacttagggatatagaagatacatggaagtgaaccaaattaaaattcgggttatacaaggaaatgagcaaaacttagggatatagaagggattgaacatagtttaagaggtacacatgtacatatggagttttctcaaaatctatatagttttgtacagttcgacgcatcatataatgaatagtttggatttcttcgaatttaata

SEQ ID NO: 23181 - DNA, 8400 bp, Oryza sativa
atgttataaaatgtgtgatccacgaaaaaactcttgtcacctaggatctaaagctaacatatactaatctgtcaaaaaaaaaagagaaaccttatgtctaggttcgtagctaggataggattggggttttttttatagagggggtatgctgcaaatgcataacatttttttatttcttatttcttatgatctaaggttacccttagcaatatttcctttttaactactttctcaataaaggtgaaacaaatatattattttattgttattttacgtgtcacattgagcgtcagcggaacaggagcgacgatcaatgagcaagtataatagggactataagaaggctgaatgctaaggtggatgagagaggagagagagatgagaagtaggccgtaagtttacagccggtttaggcataggaaccaagaaaatttgtgacagacatgtggaccatatatttataatgaagagttaaccactacatgaataaactgagagatagactatatacaataaacaactgcttagggttcacaattccgatgaaaaccagttgaattccgtgaaattttgacgtttcgacacggctcggaattaagtttcgattggaattttgaaggttaaacagtagattttgtcaaaattcagttgaaaattatcaaaaattgatcaaaatttatcaaaaactgtgataccgatggggcttaaaatttagtgatcaactgataatataaaccttgactggctgtattattaaaatttagtgatcaactgctaattgaccttggaagaacctacaaaacccgcccccaaaaccttcccgtggctcgagccgaatattagtagggctttcttcatttccgcctccattgatttcaaacgaaaaccgccgactgcctcccctcccttcccctctccgtcgtgcccccttccggccttcccccaatggcgtcgggctcctctcgagccaacatcgaccaggtaaaccctaacgccggcgattctctcctccccatctctctctcccctcaccaccacctccaagcattaacgcactcctcgatccgcctctccgcagttcttcccggccaagaaggggagggcctcgtcgcgcaaggacgagccgccgtccgggagcccgaggggcgccaaggggtccctggaggggtaccttgtccgttccccttcaaccgcggcggcggcctcgttggactcgccgaggggtggtggggacgcggcgggcgccaggaggagcctctccgcggcgatggatgtcgatgtcggccatcccgccacggcggtggcgacagatgagggggattttgagctgaagaggtttgcgatggagttcttgtcattgtcccattactgcaggtatgcgattcttgtgcaagatgaggggttccttttttcctttctgtttaagaaccggtcttgtgcgaagttcaggttgtaattgttgttgcagtgttatcccttctgtcatgggtggtgctagcaatggcgaagcgggcaagcagcagaagaggagtgcgatccagtcgttcttggctccttgtagcaatgcatctgccaagaagcagcgcgttgctcactctggggacttggaagctctaaaggttgttgtgtgtgtgtatgttgggggggggggggggtgcatacaagattcatccgttttggcgattttctatgaaaagtgatacataagttgcaacttacatttggatgtattgcaggatgtaggtcataaaacccccttccgggaaaaatgtggcactcaatacggtggcccagaggctttggaggtttggttgatataagaaaatattgagtctaaaattgttttggaaattctcatattgttttttttttctttatggaattctgatggtgtccttaccatcaggaattaggtgaggggacaaagctgagcagtgagggttttgtggctttgcaacgatgtagctttaccccaaatactggacagaaaagggttggattttcaacagcaccaggggctggggaaacaccgatgtctgtatccacgaactctctgatttcacccggggaggaattctggaatgcagcaattgaatttgctgatggcatttctgctcgggctgagaagggtcctggaaggcctgagtgtgatgtggatgacaagtcatcctgtgcagttgcattgtgctctaagattcttcccagatccggaaatggtggttctgaccatgaaaacacagtaggaagcaatgagacaaagcaaatggacagatcttcatataaagaagaaccagtggcagcaaataatcatcatgtaaacagctctccgttgcctgtgaagcatttggacttttttcatgaggatgaaattcaagttccaggcctgaaaattgaagaaaaaggtggtgctgtagatctgagtcaaaagagtcaaatgaagaacagagaaaatctcacgcattctgtagataacgtgaataaaagtacttttgacatgcacatagattcttcagctacgattcatgatgagtgtctgtccaagttaacaacagaagggaaaaatcatccaacaagagtgggtgacagtggttcttgtctgactagaagagacctcaatcaactgatctatagtgaggataagctgcttactgcgtattcagatcatggcaagcctagcaaagattgtacaaataaatttgcatcccaagaaatggaagccaacactcctactagttctgttccccaaaaggaccactcaaagctgtcaagttggcttccccctgagctctgtgctatatacatgaaaaagggtattccagagctgtatccttggcaggttagttttttcagtttttgctcatgtccaatgtcgtgcttttgctagtcatctgtcgccagcagaataaaacattgctctaaagcacaactgtgcaagttaaaaaatttgtatttgctgctattctcacaaaatatgactatatgctactacctccgtcccaaaatataagaagtttcggggttggacatgggtattaagaaagtaggtgaaattaaatgggggtttgttgtgattgattgagaagaggaagtaggtggagaaattaaaaggtggaaggttgtgattggttgagaaaacaatgtaggtgcaggagttgttatattttgggatggagggaatatttcatttatgctagtaaagtaataaatatattctactcaccagattgaattaataacaaatcctaagaacctgttccaacttgtaagtacttgtgtcctgtcaaactactccatatttcctaaacattctgtgaattaagggtatgcatgccaaaaagctacttctcttctttatttgaagggatccacgcagaaaagtccaagctactatcttatcatatgtctaccacttccatttgtacttagcaacgcgtggacctggctttctacaatctgctttctgaggcaaaccactcaatttctctttaatttatctatttcactgacctgatgttacttgactatcttagtttttgccaaagctaagtgtttccacatttgtcttctattttttcaaagaagtataattgttctccatcattttcttgtagaacatatctgaacatcataagcaattaaagatgttgccttgattacaaactcagtttaaaagtaaccctcacatactgtctgtttcaagtgcttctccacagaggcatgctcaattgtattccttatccatagggttatgttcccatgtctactgcaggtggaatgtttacttgtggaaggtgtcttggagaaacgcaatcttgtttattgtgcatctacaaggtactgggagatcttgcactcttccctgttgattgataatctcagtatccccatgattcagccctttttgtataagttatttttaaacttgtttcttttgtttgaaatgcatacttctccagataccaccttcgagtttttattagtatattcataaaaataattcctatttcatatattacagtgctggtaaaagttttgttgctgaaattctaatgttgagacggatattgttcagtggaaagatggcaatccttgtacttccctatgtgtcaatatgtgctgaaaaggttctgccatattttactaagcttaccttttgaatgtttcagcatgcttgtattgggttgtataactagtattttttttaggctgaacatcttgagcaacttcttgagccgctaggcagacatgttcgaagcttctatggaaatcaggggggagggtcacttcctaaggatacatcagttgctgtatgtaccatagagaaggccaattctttggtaaacaagttgttggaggaaggccgtctttctgaacttggcataatagtaatagatgagcttcatatggtaagttaaaccaatttggtcctcaaaatttctccattttctttactttcaagatgttgcatcggcttcttgcttatgtttactttagagagatcatgggcatgggtcccattcatggcggatactcaaacacagtatcttccgctgacataacctattcccatgacaaatttctaacgtgtattgggatttaacttttatttcacctaataggcatctgtacacttaagagatacatacatagtgacattaagtgcatggatgtaatcatatctaagtaattcagaaattacatagctatttgacatgatcttcaacattttcaagctaaccattgacaagacatatagataagagatttatactagttgatcttagtcttatagaattagtacttattgttctgaaaatcagtttatcttaatgacagtatttgttgttgttccatgtaaaatggttttgaaaaatgggaaattggtttggtaccaacaaaatattacccttttaggtttgtacactgatatttttggttcacttccattaccttatttgaaatttctgtgctctctttgcgagaggaacacttgtaaaatgcctgacttactactgtatgttcctattacctgttgccacttggccagctgatgctggcgagtgaagtgatatagattcatgagagagagatacagaggggaaaattgccatgataagagcaaattgggcaaatttgagagcgctgaagtaggtaaagcgatttaggtgggatggaaaattcaggtggtataaaactaaacaaatcaaaatttggtggtatgaaaaattaccttttcatttgaaaaacataattctgccatccaatatattgtaaatgcggtacttccagaggacatgccaatgtagtgtacatacaatataatacattgtatttttggcctatactcaatattttcaagtttgaaagttcttgagcaaactgcgaaatgaatctcttcacattacaatatttgaagtactaacagtgtgcatgtgcattacaaccgaagttggtcttcattatattggaacatattggtgtacttttttttttttaaaagagaagatgagtttaccataacatattggtcaatgcttttgattagggaccagtctagcatttctcgttgctttccccattttttttgaaaaattcaatgccaaaaatataacaaaataaaagtgtttcgagaagcatttgttatgtcaagaatattgtgtctctgagtcccaagtcctgacctattcctgtttacctttcccctcatgcaatttgaagttcttttcttcttcctttggaagtcctttggatgttgaagaacatgcaatttttgagtgaatcgcacattgtgccacctattattaccaaagtttcactttgtaccaccacctgagcaatgcctttacttcagactaggttagatatcatttccattgcactttggaccacctcttcctcttcacccctctcagcctttcttctctccaaaactttggctcatcaacatcactacaaagagaagagaggaggaggatattgactgacaggatcaaattcagccactggcagtgccatgagttgaccaattgacagcgtgaggaggcggtctggtttgactagttcggccaacacaagcttgtccacggtacctctattagcagagccctgccactgtgcccctttgtcaatccctactgctatccgctgcactgttagacacagagttccagatggtggggagaagatactgagtaagatagaaagggagggtggaccgaagtgcaacaaatggaaatattacctggacaaaaaaaaatgcttaaatgatggtccaagtgaaactttggtaataataggtggcctaatattttatatacatgcatatttcatttttaacatgcaattttgtgtttataggttggtgaccaacaccgaggatatcttttggagctgatgctgacaaagcttaggtatgcagctggtgaagggaattcagaatcatcaagtggagaaatctcaggttctagcagtgggaagatggatgcaactcatggattgcagattattggtatgagtgctactatgcccaatgttgcagctgtagctgattggcttcaagtaagagaacttctgtaatttttgttcatactattatctgtttttttaagaaatgctgttatctaccataaacatgcttgcagtgtaatatcttacggtcattcaccatcattttgacaagaataatgtattatttaaccaaactgtctaatgaaatacagtagtaagtagtaacaagttatgtatgctgatttgctgaacttcaaagtttcacatgtatattttttgtgagttgattttccttttaatgataacaccaccatacttttgattattatgctgaaatgaaatagtgtactgtgctgaatgtacaagtagaaaggatgctgggaaccattgcattacagtgaggattctactgaattagctttttttttttccgagaaaaccataaaatttagcctgtcctgaggttccttgtagtgtctccacaaggtggtggagggctggacaaacactgtgtgcatcattttgacagttatgtcttaagggcctaattagaggcatctaaactacaaatgactgatgcaaccaatctgatttttatgctgcagaaggacgaagaatttactgctcaagtatttcactgaaaataatgtggaactgtgcgatgctctatagtgttactatatttgacaaacagtattagacatgctctataggctttcaacagtatttgacaaacatatttacagtggtacgggacattgacataggtgttagagtatgacttggattcgagtatctgattcagcaaatttggagaaaaaggattcgaagattcgtataatacatattttataaacatattatataatataaaatattaacatgtaaaatagtcggtcaaacacttaaaatacttttaataccagtgttccaaggagtattgtggacataagatccctttcctatgtctgttgtgcatggaagcttcgcttgtatgctcattggcttataagccacaggccacagccagaatttgaattttattagaacttaatttcagaattgattttgtagtttaattgttttctatttttcagccttggcttttggaccaataagaatagagtataaaagtcttaccctatttttttattactttgtttattttctaagcagtacctcaaaaggtgcaggctgcatgctctctctccagcctcctgcaatcctggaaaagctgcaacctttccgcctcttctttgtgcgcacgcacacactctctctcttcacttgctttacctcttaccgcaacttcgttcctctattatcagcagctgcaagcctgcaactctcctctctttcctttggactctgtcagatgggtgccgtcccacgtctaacatgcgttgacgcacgcgtgtcaacatggtaaaagaaaaaaaaaagggacttgcgagtcccagtaacactgcatatttatcaataacaactgtcatgaatattgctataaatatatctaagagaatttcacaaaattgcaattattttgtcaaaactatcactttgttacaattttacatgggtatttcacaaaactgcaacaatagtgaacgatttatcacaaaacaacaactttacctcctatgtgtgtatggcatttgggcccgacttacaccatcataagtattgcatgtgcgtatgacaggtaggctcaaactttgtgagaaataaagttgcagctttctggtaaaatcatacactttgaaatgtctagctgaaattgcagtaaattgataattttgacaaaatagttgcagttatctgaaatttactctattatatgaaatctgcaaactgaccttcaaataccagcttgagtctcaatgcatgatagaa

SEQ ID NO: 23182 - DNA, 6647 bp, Oryza sativa
  unsure (1)..(6647): unsure at all n locations
caggttgttcagcaggggcattctgttcttttgttttgctccagccggaaaggctgtgaatcaactgcaagacatgttgccaagtttttgaaagtggcttctgttggatcaagtgacgttggctcagaatttccagatgctacatttgcagttgaagccttgaagaggagcccttctgggttagatcctgtattagaagagacccttccctctggagttgcataccatcatgctggtttaacggtattgtaattttactataatttctcatatcatgccatgaagagttggtggaccttatttatgccattgtcgttgcccctaagcatttagaatctgcactgcgtagctgaatgaccttttttttactacattttagtagatgctgttttgaatttattactaatttctaaaaccattccattacttcatgacaacctttatctttcagtaggactgtaggaaacatgaatgtatgcattgtacttttcttgatgtctattttgacaactattctcctagctattgatgatcgtgagcttataatatgtagtcatttctgtttcatacaagtacggctttctcttttggcaggttgaggagagggagattgtggaaacatgttaccgtaaaggtcttgtcagagttttggctgccacttcaactttagctgctggtgttaacttgcctgccagacgagtaatatttaggcaacctaggataggtcgtgacttcattgatggaactcggtacaagcaaatgtctggtcgtgctggtagaactggcatagatacaaagggagagagtgtaagatatgaaactttcatttatactagatgtttcccatgaattcatcagcttagtttcaattttttatttatgtatctggttgtgctgatgttttcttgtttatgaatgtctaatactttgatatttgaaatgtagatacttgtatgcaagcctgaagaggtcaagaggattacaggtattcttagaagtaactgtactcccttggagtcttgcctctcagaagataaaaatggaatgactcatgcaatcatggaggttgttgctggtggaattgtgcaaactgcaagtgatatccatcgatatgtgaggtgtacgctgcttaactctactaaaccttttgaggatgttgtgaagtcagctcaggactcccttcgttggttatgccataaaaggtttcttgagtggaataatgaaactaaaatatactctactactccacttgggctagcagcttttggcagttcacttaatcctgaggaatcgttggtaggttactttctttagttattttcaatattttttaaatttaatcttacaattttctatttctctgtgtaggtcgtgctggatgatctttcaagggcaagagaaggctttgttctggcatgtgatttgcatttggtttacctggtaaccccgataaatgtagatgtcgaacctgattgggaattgtactatgagaggttcatgcaacttacttctcttgagcaggtatttctgttgcatcttagaacgttttttctccaacaattagtctgagtacatgtaatattttcatatcctatttgtgtatatcaatagtaaaggaccacagactgattcttgctattgtctatattgtccttatagcctgacaggcaaccatccttttcaagtgaaaaatgtatatatttttctctttacccaagtaaaaaggtgaacactaagatgacatattgagatgatcagataacttaaaatgtatcaagtgatgttgtcaaggaggtggcattaaacagtatgttgttttactcttattgtaaaatggtagtgatactaaatcaaataatattcatgtaatgcatcacaaggccatgaactcatgcacccactttacaagttcatggcactatgctagaacttactctattttatctatagtattgatgcttgttggtaatgtgcagtcagttggcaaccgggttggagtaatagaaccatttttgatgcacatggctcatggggctgcaatgcctgttcgtggaaaacctcagcgtgctggtatccgcaacaggtcaccaacacgaggttctggtggaaatgcacttattaatgagcaggcacttcgagtttctaagcgcttttatgtggccttgatgttgtcaaggcttgctcaggtataattcaactctgcaagattgtatcatcaatttgcttactattcctgaaacctagtagtatgttaacgatctatctctgccatgccagcaaagtgcattactctaattggttttggatctttttttatttgtaaatatagtatgattgaatatttaatgaagctatttaatgtattgtatctttcaggaaattcctgtcacagatgtttgtgaggcattcaaagttgcaagaggtatgattcaagctttacaggaaaatgctggcaggtttgcttcaatggtttctgtgttttgtcagagacttggttggcatgatttagaaggccttgttgctaagttccaaaaccgagtctgttttggagtcagagcagagattgcggaacttacatcaattccatttgtcaaggtttgcttatgtcactttgcatgcatgataaatcctaagttttgtcccatcatatcttcctacttatttttatatgttaatatgttatgggatgcagggttcacgtgcaagggctctttataagtctggtttgcgtactcctgttgccattgctgaagcatctattcctgaaattgcaaaagctctttttgaatcttctacttggtctggccaaggtctaatactctagctatgtttaaactttctattaaaatatttgtgtatgttgtgttagtctgaggttctgagactacagtagtgctgcaatgatggtggtggtggtggtggtagcagtagctttactattagagaaatggtgaaagtaatagctcaaaagccatcaaactcgtaaattagtactcttaacaacctgagaacaagacttctcttcctttggagatggctgtaatgtgtagtccacattggcattcctttctattttctatttttgttttcctctctttttgttcaacattttggatcagtttagtatcaaggggtcagattcatcctattggcttatttcttgtgattttcctgccttgtgtaataatatctgttcaatggactaggtgattctggtttacgccgaatgcaattgggtattgccaagaagataaaaaatggagctcgaaaaattgttcttgaggaggcagaagcagctagagtagcagcattctcagctttcaagtcacttggtgtacaagttcctcagtttactacacctctactcccaactatcgatgaacccccaactcgagatagcatggtttctgttggcagaggtcaagctagtgatgatacaaataactgcttcagttatggttctcaaagggcttctacagagagaactttagggaacgatatgcaccctggttcttccatacaaataacagagagtgcaagaatagtgaataatgccaacatcgttgtccaagtagcatcacctttctccatagaaactaaattaagcagcagaaatgtggctgacaaaggccctgttaatgcatataatttcccaggagggtttgacagttttcttgatcaatggtctactgttagtgagttttcttttgatcttcattatgtcaagaagtcaattaaatcatcttcaacctatttcgatattcttggtttggctgtctgttgggaaaattcacctgtttactactgcaactttccgaaagacctaatgatggctggtagcaatgactccattgaaatgtgggacgaactaacgagaagatggaacagagtaatcgaaattatgcgacaaaacagtgtcaaaaaaatgacctggaatttaaagttccagattcaagcattgaagtatccctgtgtttcttgtcaacggctctctagacttcatcttgactacaaaatgttgaagaatgttgaagtcctcgacaacttgtatgttttcctacaaccagtttctgtccacagtggattggacatatgcttggtggcatgggttctctggcctgatgaggaaagtaaaacagtgccaaatcttgagaaggtataatatcttatgctgtgatatagaactcatgcttggtttcctctttaaatgttttcatggcaatctctttcaaccttaacatttcccaatgatttgttaattttttgacagaaaagatttcttaattttgatgctgagatatttcagaaaatgtactttatttgtaatttttacctgatattaattaatagttagtgaagagacgactacacaatgaagctgcagcagctgcaaatcgagatggcagatggagaaatcagatgcacaaagcagctcataatggttgctgtcggcgtgctgcacagacacgggcattgtgttctgttttgaggaaattacttgtttctcaaaatctcaatgatttactcgaaacaattgagggcccattggtacgttctacccttgccaaaatgcaatattgtcatcaaatgctttgacattcacattatatttgttgggcaggtaaatgttcttgctgatatggaactttggggaattggtgctgacatggatgcatgtctccgtgcgaggcatatcataataagaaagctgaaagaactagagaaagaagcttataaattagctggcaagagcttctcactaannnnnnnnnnnnnnnnnnnnnnngttctttatacacacttaaaactgccagttccaaaaggttgtgggaaaggaaaattgcatcctacactgacaagcagtccttggaccatctaaggtataaatttgatctatttgttgtgtgtgtcatttctaggcattgcaaatttattatattagcaagtgtttttttttcctttcaatgtgccagtcacaaacttttcatgattcaagcatttttgaaatttaaaatgtatttccttgtatatctagtctcaacaatggttcactgacataatgtcttcatgttgtattatgtctggattgaagtatccttgtgtccattctagtttctgcatgttgaagatgtcattacggtgttgtcttgatctaagctggaattattggggtgccatcacattttattattatgtctgattacagtatgtttcaagagttgcatgtcatgtttggcttggtgcttcaaagaattatagtaaagtgagggtcagggaaggaagaaaataattcttacgcctttcagaatgtcatggcaatgctggctcagaatttgttgaacatgccaatgagttggccagggaaactttattacaagtagtgctgtaatctgtatattcttttgatgcttcactcaaccctcacgtaattttttgcaagtttcccaaggaaagtgtttgcactggtaacaataagatttcagtaaatgtggagaattgctcttgttgaacttctaacttagatcatcactccgtctaatagtcttttgctctgtttattcagggattgacatgtatttagagatgctttggttttgttcatttttaatacagtgtcatattattatgctctttttattcagggatcaacatccaattatatctgtaattaaggaacatagaacattggcaaaactgttaaatggcaccttggggtccatttgctcacgggctcagttgtgcagcaaatcacaaagatacatcatacaaggaaattggctccagacatcaactgccactggccgtctatcaatggaagaaccaaatctgcaggttatgttacattattgctagtgttttgtataatatgattatattcataggtcatagcaatgattgactgcattttttccttagaaaaaaaactgactgaactataatttgtagtgtgttgagcacttggtggatttcacaacattgaagaatgatcatgattccacaagcatgtcaatggttgatcatcatgaaatcaatcctcgtgattttttcattcccacccaagtattgctcactcaacaattgtttcatgctgtatatattttcctatcgcaagtaaggtaattttgtggtctcctttttgctaggagaattggttgctggtaacagctgattactcacagatcgagctgcgtttaatggctcatttttctaaagatactgcattgattgaacttctaagtaaaccagatggtgatgtatttactatgattgcttcaagatggactggtaaagcggagtccttgatctgttcaaaggaaagagagaccaccaaaagatttatttatggcatcctctatggaatgggtgccaactctctagcagaacaacttgaatgcagcccagaagatgctgcacagaaaatccaaagttttaagaggttctttcctggtgtctcttcatggctacacgaagctgtggcatcatgtcgtcataaagggttagtttgctttgtcatagccatttctgccttttatgctctgatatgttttccctttgatttttttatcttttcttttgaggtgaaacattaggggtagaccctactgaagtatagagtaaattgcattggtggtacatgaacatttttt

SEQ ID NO: 23183 - DNA, 25458 bp, Oryza sativa
aacactttgcgcatcattatttcttgcacagtacagtcgaaaagaagcttgtgcaagctgaaatgcatcccatgtatggctgcaggagctacataaaggaacactcgattattggatgaaaaaacaaaactaaatgggacttacgatacatacaacaaagacatgatgaatatgatacctctgaacaactgatatcaaggcttggcgaaaatgagatgctgcatacgatgaaaatgaatttctccaatataatacatatggaatcccctgggaatgaaagtgtcaaaaacacaaattccaaaatcacaaataagattctgaagtaataggagagtaggaattgttgttgaaagaaaaaagctcagtaaaactgcaaaaaaaatttgtaaatgttagcaatcatcttgccgaaaaatgaatagcaattgctcatcttacaagcatataatgatataaacattccaacaatagaacaacacctatgctagacaaaataaactaaacaaatgcagtttgagtatagtaattgtttatggaaactaagctcatgctacacatcagagcaattttttttttaaaaaaaagtatgaggaatcatttggatatttacaagtatatatgcatcccaacaagcagattcacaactgtggcaaaaagacatatggaacaatccacaacctgttcacaaatttttttaaaaaaaactaattgaaaatatcacaaaacaaactacctttaactgaagagattgagcaagcttttccccagcaggaacttccaaataaacctgtataaaagcttagacagtaagataaatagatagaaggaagacgaccatggaaaaattggaaaagaaaaccgtttatgaaacaaaacagaaaaacaaggagcataaggttttaaaaaataaaatgttagtagctacaagtcagacaaatataagtggaatatgtaaatcaagttatgggcattaaaaaaacaaaatattggaatatcagttttaagaaccaagttggagctgttgtgttgcgtttgtgttgtgattacatgtttaagctgttgacggaatacgattgttaaattaattgtggagtgtttgaggaatcaaactgaggttagataaatcctactccctccaggttgataatacttgtcgttttggacaaggctattgtcaaactttaaaaactttgactataaataacatctaaaatatttgtcttagaagtatggtgaccatatatatagactgatcttaaaaagtacttcaataaaatcatatatttattgatatttctatatatatatatatatagtaataaaaaatagtggtcaaagttgtttttaaagaccgtgcccttgtccaaagcgacaagtattatcagtccaaagagagtattatacaacttctgattcatccacatttgttcatttttttgcctcttaagtacgtgaccaagcattgcttttgcctcttaagcatgccagcaccagtattgacatgcatctcaacagttaatgcaaggtattagaggaaaagaacccataaaaagtgtttcgggaaatatgtgtgtcccacaaattcttatagaagccctaagaaaattgcccaacattttctacggagggagtataaatgtctgtcacataaataaaatcgaacagcacaatgaaacggaagcttatggtagtatcagttatcatttaattgaaagctaagagcgctgaccaacattgttgctagctaagagtttggtgcttactatggtcggaaaaggtggactaatgagtgaactaaatatctgtggatcagatacatcagcatcgccccagacaagtgtaccaatttcttcctcattctcaagctgctgaccctggaggtacatcaagttgggctgcacagcctgttgcgctttccggaattgatcaactgtgggattgatcagcgtatgcacctgcatcccgagccggttcataacacaacaaaagaaatgcatcaccacagtaaacagcaaaagcctactaacctccaatctcccagacgagatcagctctgggaatggatatgaaagccgtggtcgcttcacctcgggcaccagaccaggtggcttctgctgtttgtctgtaaccttcccacatagcaccgcaagcagcgtgcagttcaccagtgagctgctttggatttgagccatggctgaaccggtaaaatcacatctccccaattcagctcactccaccattgaaccctgcaacaccactagcaacagcaaatcattcatgaaactgagatcacccgaaccagtgcgtggatcaaaaagcaaactgaacagcttaagagattgactgaaaggttaaatatttcgggtgactgagaactagcaattcctggtcgtctagttttcagtcacctgaaaatttaaaatgtgtcagtcacatttgcaacctttggatctgcacatccaatgatagcagtttgtccatgctatgttgaatcaaacaaaatggttacaattccaagtgggcccattacaaaataataaaaaaaaagaacagtttggtaagtagtttggtcttttgcttgtgtccagaggattggcttcctcgttctgtgggctttaaacaccggcttaatgtgtcaggaacatttccgctcttccggcgagatttaattgctgctagtttagcccaggaagaaagaatatatttgtgtaacacttttggttgttactccttcatacttctttcctaaaactgtatgggtaaatctgtgctagctgaacaaacattactttactgtgatagattgccaatcgcaaaatataacatgtgtatgtaattttcaatttacaactccaataccaccgtaaaatttgatacaagaaaaattaacatgcttctgcattcgacaaatgcaaactggaaccatctacaagagaagaatgaacatccaacagtacaataattgcattagcctgcagtggaaatagcactataatgtgcaattcaaaaatatcaacacaatgtgcaattttgaattgattatctttatttaccagggcataaaaaaatttcttttacctatggtttccctaataactgcatttggtttattttaaaattgcacaaacatataaactgcaagacataacgatgagcacttcgcgaagcatacaaactacaaatcgcaatcaactaactgacacctgaaccaaaatcgattcacatacaggcctcaccaacatactgcatggcacaatgggacaagtaaagatgttcatgaagctgagatcactaaaccagtgcacggaccaaaaagcaaaccgaacagcttaaaaaaatgactgaaaaaattgaatatttcaggtgactgaaaactgcaactcccttcacgaaatttccagccaaaatcagaacaaacaagcaccaaatcgaaccaagcgaaccgaaccgaatcgaatcgagcaaccataccaggagacccaaatcgacgagcgcagcccaaaaccccgcgactccgagccgctatgacaccggcggcaggatgcgctcgatttgtgcggcgacggctagggcaaaagcgtggaggcgagagagcatggaaccctaatttagccgccgcacaaatccccctcttcgaatcattaataatacagacagaacgagaggggaataaacgcgtggtgaatcgcacgcgagccgacccccatcccgtcaaaatcaaatccagtcaaccactccggaaaaaaagaatctatctgtctaaccaaaaaaaaggaaaaccactggaattttaacctaaatccaccaaccctcctccccgtcttaatccctccgcggattagcaatgcaaacccctcaaataataaataaccgagcaagtagcaatctccaggaaatattttgattggccgggacgaaccgctcgagccactggagatcgtagtcgtaccgtgcacggaagcggaatccacagctcctgcttgatccctcctgcgcttcctgttcccctcgtggcgaggatgatgatgatgatgatgacggcgacgacgaccgcggcgatgattcatttacctgcggagaggaataaaaacaaagagcacggattaaattagctttttttcttttcgcagcgggatcgcgaggaaaagttgggaggaaattatacgaattctttttctgcggtttttttttcctcttccttctctctgattctctgctgctgcacgagtgctttttagattttttttggccacagcacagcctagttgcgatcgtatgttgttttggcgatttgggtttggttggttccggtggtgatcggaggaaggaatttgggtggggggaatcggggagcgtgcgacgcgacgccatgtggattgatgtggtgagattggtgcgtggagttcgtgctggttcgtcggcctctggataccgggggaagggtcagggcctcaggggacgggctgtccctgacttgtgagcccacagggctttgggagaataaaagcgagtaggctgtcctaaaataagtgcaatgacaagtattcataagtgcaatgacaaatattcgtatccaaagtttgactatcggtcttgtttaaaaaatttatgaaaaaaattaaaaaaaatagtttttatcatctaatgacaaaaaaatattaatcataaaaaaatttaaataagacaaatagtaaatgttgttaatgttgatcataaaaaaacttttaataagataaataataaacgttggatatgaacgtataaaactgtacttgtttttgagatggaaatctcaaaagagtattactatagggagattttttttttggaaaacagtggcgggaatatccccacggtagattttcatttcataaataaaagcataataaaaaatttggggagattatttgctatgtacaccctctgattcttttttacgatggcgtcatagattaaggatgtaggtagtacattgatttgattatattactttcttactcaaagttgtacgtacgatgtaatattgatgtgattcaacgagttcctgtctaatagagaaaaataagagatattcccttctcccaaaatatattcactccgttctaaaatagattatctaaaatataataatctaggggcctcatcggatggctgtttgggccaaggcttttcagccaaagcccatcgtctcacttattgggctgagagctttcagccaaatataggtagggcccgcaaggatgttggagcatacaatactcatcaatccatttaagccaaataagccaatcaatggattttctttagctgaattgaagaagccaactttggcttatcagccaaagcttttggcttaccgatgaggacatagaataataatccctccatttacttttgatagtcatatttttatcttggcacatagaccaaggataagtaattttacttatcatccatttaaacatgctactagtcatttctcgtaaacaagcgattcattaatatttacatttctcaaggcccatgtagccaatcatgtgtggaagaatagagagtcacgcattaaatccgagaaaatcattaagaggataggttgttggattgaaatatgactatcaaaaataaaatttttagatttggaaatatgactatcaaaagtagatggagggagtattagacacaaccttgtaagttagtactactagaaaagatgctcgtgcgttgcaacgggtagaaccaatttaatttgtaaatagtgtcggtggataaataatcacaacccattgtttcgtttattcatgtgtttatccggatgacttgttaccaaataaaatactatttgtgagaaaatcttttatatacatgttcttaactactcaaaagcaaatgttgtaaaataaagtacgataaaaaaccaaaaagtcgaattcaaaattaagttctaaaatttaaaatttgacttataggaataagcataacccaaacaatgagaccttcaaacacgagctcgatttgtcgtcaggttctatatcaagtcgggcagaaattgataactgacgaaatcatcaacttcgatcatcctttatttcagttggcatgatctttttgaaagtaaaactgattcttatggattgttgttatggtatccctggtagtacgtacgagcatgtgtgaagactgatttgacatcatgctaacatgtcccatgaatcgtatcgtgaaatacgaatagaatcgaatgatttgggcaacaacgtacgtgatatccacactgactgtgaattttcattcgcttggtatccacatcacacggactctctttcatagttcgctcgcgagtcgtgacttcgcaatgcatgttacgcatgacgggaattgcatacggacgacgtaccatagttttgataaaaacatcttcaattttaaaatcgtgggcgagtgcaacaaagtcctagtcggacatgtggcaagggcaaatcacgtgcgcgaggcgttgcgagcccaatcacggtggggcacaaaggcgcgggtagaaaacggacttaggtgcgagcccaatcgctacgtgcgacaaggggcgcgtgaaaagatgcatgcccaattaattcgcctgcgtcttgataagagggacactctggcataagaaaaaaaatgaaatgatttgacagaaaaaaattaaaaccgatttaaacacggatgatgtaccaaaattctagcaaaaatattttaaatttttataatagtagagataaatatgtactatgttgtatcaaatccagtggttgctatatctttggacgaaaggagtaagaaatatagtcactaaaaaaatcataaaagaaacacatgctacaagatattactaaaatatctagaagaatacaatacaaatggtggaatctagataatatgagacgaagtgctaattatatggagggtaattctctttgtcatatgaagatctcgagactcgagagccaaatctggctggttttctatatatatgttcttgtagcatcatatgtcaaattaatatgatgtcctcaattgtattgttttcactcaagaataatacagtaaacttgagggtaaaaaagaaacacctacttgaaaatatcataaaacatattattttagagatgaatcaagagatgtaaaatccattttttttctttttaaatccatatggatttctagtaggcatgtctgttgaaggagtttttaaggaggaataggagttagaacttaagatggacaaggctattaactactttgttcagttaggggacatgaaagtaaggtgggaatggagatttaatcacattgtctattgtatcgtgatgtttgcttgctatcaagccatggcacctggcagggtggtaaactgttaagtgataccaccaacaatcaccaattagcctgtctaaattctcatctagataccccaaatatcatagttaagtgttagggcctgtttggtacagctccaactcctaaatataactccaggagttgagtctggagtggagttgtggagctgcctaaatccagctccacaactctagtatattttgtgagagagctccacccaactccactcccagttctggtggagctgaaactatttggctgagctccagctccagaaggggtggagctggagctggagctgtgccaaacaggcccttaacttgtagatggtgtactggtgtatcattttattgctttttcctaagtaaaccattcacagtatcattgtacacagaaatctgagttctacgcaataaaatatccctagtggcttggttatacatcctcaatgaaaagtgcctatataggcatacaggtgcttaaggagagaaaataaatgacaaaaatcatcaagtatctcgtattagattggtatcctaagatgcaagtaatttgatgggtgctccaattgcttccaatttgatacatgtaggaaagtcattatttaggtctagtatcgcctccgacgaagagttgaatgcctacgccaaacatctcgctaatccgacatggcaaataaccagtttagtttcataagcacctttctaagcatttgtgttgggatgacctatgcgctcccctcctggttccaccacctctttctcttcccaattcctgctccaaaattatcccatgaggcgggacactaatttctcaaattactatattctctatattatgtatggattggataaattataccggttcttctcttgcataattctgattccattccatcttagtagtaaattcaccataatttagcccctgctgatctcatccttcgatgatacttttactaccattaatagttatttttactctattttgctaagataatggtaatagtaattcagtaattcttttcaccattaggatgtcattgagtgatttcttttccattatgatcgcacaacataaagtaaatgaattgcacatgtaatctaaaacaaataaaaggaatacattttggaccagagtacagctacgattgacgccgccaccaccatcctcctcttcgcctatcctccatgttgctgcatggagcgccagaaggactctctggagacgaatccgtcggcatagatgttcaactactgcatcctccaaatctagctggcgtagaggacgatgttgacaatagattggccagccaatgccatagcctctagatttggtcgacacgcatatacgattcagaggatgaggctcgatgctggtgtcgcacttcaccatcgcatgcgcccaataaagccatgctactcaatttcgatctgaaaaaataaaaatggtggattggtacatgaggatattgcagattgcaataaatacatatattatgcgaacaagataacttaaaacataccctatttgagggtaggagcgttggggttgactacttagatgtaggagggacacaccaagcattgctcggggtatgaggcatgacatagttctgatttaaactaatacctttcttctaatatagtacatcattcaatagaatacttaacaataagacttgatggtatcaagcattgtgaaagatttcaataaagcataagaaactagatgaatcccacattataatctttatgggctatgtacattgttgatgcccttacatatcatgttttatttatttatttattttcagagtggtgatgaagagtcaccaccaccaccaataacatgtgggccatgatgtcaaagtactttgctagctttttttttcttacttgtgtgtagtagttttgtagtccctaaccgctcttgctctgatagactaattttgttttaaccaaggaaaaactgattttttaacaagtacataatatttctttaactatttaaaatagtttgttgtaacgcacaggtatttagctagtattgtatataaaaaatagttgacaatgatcttcccaaaattttgcaggtttggcttctgagttctgctacggatgtggagggcaatcggccgtcattaatcgtagttgcagcacagcgtaagatcgttttctattcaatctagtatttgttttgaacgcataaatttctcatagaatttacggaaactttcagtttaaataatcctactgcccataacagattttctacgatctgatgatgccgtcgtagtactagcaggagagtagttatctgttacaggattctcaacatttcgattctaatcagttggactaccgttgacaagctgtagagaactgaatgaagcaaccataaaaaaaaaacatgttaagcgatttagaagcctaggctagaaaatacactacaatgaaacaaaaaaaaaatctaaaatcaagtttcaagattcaaattttggccgctgttaataaaccaacaaccgtacaatgagattcacacaaaaaaacaagacatgttcatcaaaactataagtttggattagctcaacatagaaccttgcccttgctatgacggtgcaagtgagctgcccattctctcaacattcagcatcgacaccacctttgcacaactacaaattgccattgcccttgtatccttcacctagctgaaaagaacgtgaaaaataataggttaatccctttcataagatgtttctagtccactccaactccgtttgcattaagaattacctggttttgacaccatatttcccttcactctgtccttcgcaagggatgcagaccatcttggcggatggtgatatagaccatttgcaatagcttcatcttcatcttggtttgtgcaaaagaaaagaagccgatccacatcttgtctatcgaacgaagatactggagtgccatttacagaagcaattccaagtggaaccaggcttttgtaagacgtttcttgagcaagatatttcaaaacctacacagttcaaacgaatcttcagtcagtgatgaacaagggtataaaacatgatatgttttagtttcgtagtggataaattgtcagtatatcacacatattaccaagctgtctagtcagtgtcatttaaacttttctgagaaaattaacctgtgctgcccacttaggtaaggtcatcaagacttcaaaagtggaagctccagaagccacggacattgaagtcaaaggctcggctgaagatggtctatcatcctcgctaactgagacaacacgaactaaccggcggctctcaataagttctttcttaatatgcttctccaaaagctacagaaaaagcgaatggcactgcaaatatcagaccgaagactaaaaaaatgctccataaatacaaaaccataccttgtcatcaaaacaggtttgcggactgccagaatgaagcagtgacacgtgtgaagaactggatgttgtgatatcacaacatattgtaaccaccccgtctaatagagttgaatcaacatgaagaggaggagcagcactgcaaagagaaatgttgtgagcagaaacaagctaaaagttttatagcaatcatgcaagcaacgatgcagaactgcaaataagaataagaagcacaacttaaaaaatgattacaaaaagatacatgttaaatattctattacaatgtagtttacattttacaagacataccaataaaagcatttagtttgttaccataaagttttgtctttagcctatagggaaatgttacctcagttaacctttaaattatagcagcaaaatataagttagctcatttgatatatcatcagtttgagctttaaatatttctgtggcatagaaaattacgatatgattactgaagcaaggacacagacacaaacataactcacacgtgagcaacaatgtttaagatacaacaggttgcaagatattgaatatgtattatacagcagttgaagatacctgactctatcctggagtttgcaccatcgaaactgaaaaaaggagagaagaaaataaaaacattaaaaaggtcctaccaacaattttgctacttgcatcatttttctcgtgcggtttactagacaaaaatgaacagagactagcagtatgtgccatattatcttgttcctaaattcatggtacataaaatggtgctagcaaaatatgagtgtattgcaacaatcaacaaatatacaagttccaattttaaaatttttatatatttcatgaaaaaaacatatacatttgcaatcccacatcaaccatcagaaaaataaatctacaaattagaagatcccaccaaccaaaagagggggtggtgggatggcagacccaccagtcaccaccactactactaagttcttggatgtgggtatgctgcacagtctaaaatgaaaatttacaactcagaaagtgagactatgagcaatctacatcaagcttcactccataaccatgcaagcatggactatggaacctagacccaccagctcgtataagctgcttacaagtagcaatactgactggtggccactagcacattacttaggatgcagcagtatttatgatttgtaagttagcatcacatacttcattactccaataacctagcatttcgacaaaataggtctctggggtaatactctattcagaactcagcactaattagacgtagaaaataaaaagcagcaacatatggtaactagaaaaaggattgacacatacttcaatattgagaagagcattcaaaccatcctctagtgagttcaatatagatgaatcctgtaaaagagatggaagtacaatcattgatttggaataagaaaaattgccatattttagaagaaaaatctcggcatgatcgcttttacttataggggtgcaatgtgctccacaaataagaagctttaagtgcacatcttcatcgtatatctttatgtctggaaaatattcggaggtatcttcttcctcagccattttgtttccaggaggggtgatatatatccttggagcatccccaagtagatgaggcccaagcatgagacgttgcacctcattatttcttacgcagtattgttcaaacgaagtatatgcaagctgaaatgcatcccatgcatggctgcatgagctacaaacaggaatacacaattattggataaatacacaaaacttaatggcttgaaatatattcaacaaatgcaagatggacatgagatacctcggaacaactgacatcaaggaatggcgaaaatgagatgctgcaaacgatgataatgaatatctccaatacattatatatgaaatcccctagcaatgaaagagtgtgaaaattacaaatatgaaattagaaataagattccaaagtaataacagagcacgaattgttgttttttttttgggggggggggagagggggtggggagcttagtaaaattgccagaaaatataaattagtaatcagcatgtgggaaaatggacagtactgcagatattaaaagcacagaattatataaaaaatccatcaatagaacctcactatgccagtcaaaacaagttaaacaaatgcagtttagtaattgttttgtggaaactaagctctataatactctacaagaaaatgatatttttaacaataaatggggacatttggatattgcatccacaaagcagattcccacctatgtggcaaaatgagatttgcagcaataaacaatctacaagctcaaatgtaaataagaaacagctacttgaaaatatcagaaaacagactaccttcgattgaagagattgagcaatcttttctccacttggaacttccaaataaacctgtattagagcttaaaaggtaagataagtagctacaaggaagaagactaaggaaaaattggaaagaacaacttttattaaactaaacaggaaaatgggcagaggaagctgaagaagaaatttaattgttagtagctacaagtcagaaaaatatacctggaatatataaacaagcttccaagggttaaaaaacaaaaattaaaatatgtaattttaagggccaatctgttaatctctaaattggcccttaaatcacaataaacctcagtaacaaagggagcctagatgcatgcaattatgaactactacctctgcagaactatataaggcatatattttcatcgcattaaaccatgatatccaattagataacctaaatgcccatatttatagctccataagagtattaatgctatcgctgcctggctctaatcccagctgcatgcatgcatgaattaatcatactattgatcactcaaataaaagatcaataccgtatgctaagagtggtgataactactttagcaagcgctctagcacccaaattatacaaattggcaaacttcatcagcaaacactaataactaaagtggatcagtaaaccaaacatgtaagggagcatatagatataactataaactgcagcgctaaaagaagcatagtccaggtgctatgggagctgaagcgccaagcagccaaacatcactacccaaaaatcggcgctaggcgcctgttagccacctgcgattatgcattacatggtgtattaggcggctaaccatcctttggtgctcttatgctgctattttagtgttgtattgtgtaatttttatgtaatatgcttgctaatttcctaggcaccagctctgcagaccctctagggctcttgtattgtctatcatttgccggtttaagttagacatgataatatgatgtagtacatagaaaaccagcatagtttggtgcttactatggtaggaaaaggcggacaaatgagtgaagaaaatatctgtggatccgatacatcagcatcgccccagacaagtctaccaatttcttcctccttgtcaagctgctgaccctggaagtacatgaagcggggctgcaaagcacgttgtgcctccagaaattgatcaaccgtaggattgatcagcgtgtgcacctgcatgccaacttttcaagttcagaactgaaacaaaatatgtacttaagagcaagtttaatagtagagctaactactagctataagccaatctaaaagtagcattagagctcacatgtctaataaattggttataaggttgcctctaaatttcttctctcactttctctcatttatataattaattcatttatcttagagcatatgtatagctagcttttgcataagagctcaaacttattattttcctggttatctcaggggcatatccatcgctggggctggggggcttgtcggggctcaatccccagctctagctgccgaacctatcagccactacaagctgcaacgcagtactgagagccaataagaatggcgaaaacttaaaaacctgcgagcattaattggccagattgcttgttagcttgttaatcctatcacataatagatgagcagattctgagattttacctcatgtgccaactagtcaacgtggagaattccagtttattaattttggtttttttaatgttccaaaaactataaagtcatagataatttgggaatttggttatacggttaaactattgacttggccatgggctgcaccaacaattttgaattataatttggttagacaatgcatgttttctttgttttatttataaattaattaactgagttagaaaatgacaggcatatgcatatttacttggctgctaaaataatttacatgtatatgagcacaccctcgattttcattcaagattcgccactgggttatatctcctccacataggtttatcttgaaataccaaaaattttagtgcaaaattagtatctcgacactcccagtacttcttaaggatggtaaaataactctatgagttttgtcttttgcactggtttccaacaagaagcaggcttcaagagtgtactgcacatttttcggtttcaaggtagtgccatggtttcatatacttatccaagtacaattccaggtcaaggaaagctccttacctaatctgttatctgatcaactgatagagcaatgaaccagatggatttgttcttgcaagatgcttgttaggcagagaagggaactagcttactaagctagaaaacgtactatatctatgcttgctttgaagtggaacagcaggctgtcacagctgatggtattcagtgtgacgcgccacagtagtcgtgatggacagctatagtagcgtgccaggaatagagtgaaatgggcctgcgcgctcacatgagttgtgttgggttgttgggcctgcgagctcatgctgttgcttagctgtaaggtctataagacaagggaccactcggtggggaagacatcatgaatgaaaaggaagaaaactaatcctcccccaaactttctctgttctctcctctgttcttcctatccccttctgttcttcccaaaatccccatctatttctgaaatcatcgctgcgaatattacagtggtatcagattcaggtcgttcgtggtcgatttaggctcatattctctcgatccggctggtaaaattcctatgctcaggtaggcggctacccttgggtgcggctgctgtaaatccggttctggttcggctggatttggaggagtctttcaccacggcgccgatcaaactctccgctcccttgcgccaatctctcgacgccatggaggctaagcttctcgagaagctggactccctcacgctgtgtatggaggctttggacgacaagttaaccaagcagagcggccgaattgatcaagtcgctaccaaggtggatctcgccatggatgctgtggccgctttgcagaaggagcaagtgcaggcggcgcagctgcacaagcaagccatggcttcagaaccggtgagtattttgggttccccgtcttctctatcagtggcaagtctgggcacaacaacaccaccaccaccaccacctcctcctcctccaccgctggttttttctaagtcaatatctcgttgggggaatggtgaatctagtgcgggttgtgatggggggttgcgcgctaagagttgtcttccgaagatggattttccacgttttgatggggctgatgtgagagtctggattgatatgtgtgagacattttgagatgtaccagattcctcctgtatttcaagtttcagcagctgttcttcacatgtcggggaatgctgcccagtggtatcaatcgtttaagctcgtggaggaagttgctaattggtctcagtttcgacatgctgttgtttgtgagtttgagagcacctcgcaacgtgagaagattcaggctctgcaaactttaagacaggcaggttctgtggctgaatataagcatcaatttgattctcttgtctatcagatccgtgtatttgatccatcagtgggaggtttgatgctggtgtatcgtttttatgttggggcttaaggaggacattcgtgcagcagtgatggttcagttgcctaccacagttcagcaagctgctgctgtggcattgatgcaagagagtgttctacttgaattgagtactaagcaatctaagcgattgatgtataaaccattgcctaccaaaggggagttgcctcagggtggtactgatactcctgctattaagcctgaacgagcagaactatggaaggctcgacagttaagggattatcgaagagccaatggtctttgtttcaaatgtggggataaatattctcctgagcaccagtgtgcgctgggtggtcagattaaagctatgcaagttactgaagtgattccggatgatcttttgaatgcagtgactgctgaagaagactctgaccaggatgagaattgtcatatttcactcaattccctgtctggtgctagtcatgtgaacactatcagactccgagctttggtccagaataaggtgttgctcttactggtcgactctggcagttctcatagtttcttggactataactttgctcaactcttgggattgcagttgcagcccattgctccctccctggttaaagtagctaatggtgattgtatacactgtcagtttatggttcctcagtttacttggtggtttcaagggcgtactttcacttatgatatgagagttgttcctttgggtggacatgatgctattttggggatggactggttggcacagtggggtgatatgtcttgcaattgggccaacaaaactttgaagtttatgtatcagggtacttgggttgaacttcagggagtccctgattctcctccccaaactgagttgagtgctatgtctttgtctcaggttcttaagtgtcaaaaagggtgtgatatatgggcagctgcactgctggaaacagctgacttcccttctgctgattcagttccacctgctgtttctcagttagtgcatgagtttgctgatgtttttcaagatccacacagtttaccacctcacagagtttatgatcacgctattactcttttccctggttcagctcctgtgaatagcaaaccttatcggtattctcctttgcaaaaagatgagattgaaagtcaggtcaaggacatgattgattctgggttgatcactcccagtatgagcccttttgcttctcctgttttattggttaaaaagaaggatggcacgtggcgtttttgtgtggattatcgcaaactcaactctattactgtgaaaagtaagtttcctatgcctattgttgatgaattgcttgatgagcttgctggtactcgtttcttctctaaacttgacttgaaagctggctatcatcaaatatggatggtggaggatgatgaatataaaactgcttttaaaacacaccatggtcaatttcaattccatgtgatgccgtttgggttgaccaatgccccttctacttttcaatgtgtgatgaattcagtgtttgcacccttaatcaggaagtatgttttggtgtttatggatgatattctagtgtacagtcctgatttaccgtctcatctcacacacttgaaacaagtttttgaactgctgagacaacacaagttatatgccaaaaggtccaagtgttcttttgcctgttctcaattggagtatttgggacacataatttcagatcaaggagtcagtactgatcctactaagactgcagctatgttggcttggccagtccctgccaatgtgacagaactcagagggtttttggggcttacagggtattatagaaagtttgttaaaaattatagtatcctggcaaaacctttaactgtcttactacagaagaaagcgttccagtggtctgatgatgctcagcaggcttttcagaagctgaaacttgctatgagttcaactcctgtactggctttgcccgatttctcccaaccttttattttggaaactgatgcttgtgcgtttggagtgggagctgtcctcagtcagcataatcatcctattgcatattatagcaagacattgggagtggctaatcagaagctttctatatatgaaaaagagttcctggtgattatgatggctgtggataagtggcgttgttatttgtaacgatgcccttttatcattcgcactgatcacaaaagtctttgtcatctcaatatcaggttctggggactgatttacagcaaaaggcaatgactaaattgatggggttacaatatactttccagtataagaaaggagtggagaacgtggtagctgatgctttgtctcgagtgcctcctcagtctcacttatctgctctgtcagtggctagccccatttggttgcaggaagtgttaaactcgtatgctgtggatactcaggctcagaagttattggtagaattggcagtccattctcctaatgatcagggttattctttgactgatggtctcattcgtcatcatggtcgcatttggataggagctaatctgggtttgcagactaagttaatcactgcttttcattcctctccaattggtggtcactcgggcactatggccacttatcaccggctcaaaaagttgttctcttgggttggtctgaaaactgcagtattcaactttgttaaacagtgtcaaatctgccaacaagctaaacatgagcattgtcgattgcctgggttgttagttcctttaccagtaccgaaagaagcttggatcgacatctcgatggattttattgaaggtttgcccaaatctgatggttacactgttatacttgttgtggtggatcgtttcactaaatttgctagtttcattcctttgagacacccttatactgcttcacaagtagcggtcacagtggataaatttgtgtttaagacccatggcttaccacagtcaattgtgtcggatcatgacaaagtgttcactagtcgtttttggggtgatttgtttaaagtatggaacactcaattgaacatgagtacggcatatcatcctcaaaccgacgggcaaaccgaaagagtgaatcagtgtctcgagatgtatttgaggtgcatgattcaagctactcccaccaaatggaacagttggctgcatttggctgagtactggtataatacatcttttcatacatctttgggttgttcccctcacaaagctttgtttggagtggaacctcatatcagtcaagtgccggtgctgctgtcctcagttcatcattctgtggtggacttaatttctgaacgcaatcagttgtctgtctttttacagcaacagttacaacgagcacaattgcgtatgaagcataaggctgataaagggcgatctgagcgttccttttctgttggtgatcatgtctttcttcgcttgcaaccttatgctcagtcttcggtggtgaatcgcccatatcccaaactggcattcaagttctttggaccatttcaaatcttggagaaagttgggtcggcagcttatcgtctggctttacctgaaggcagtgcggtccatcctgtgtttcatgtgtctcaactcaaagctcatgtgccagatcacactccagtgtttacttctctacccacaccggttgtactggatgctgccgatgtgtggcctgaactgattctggacaggcgtctggtaaaaaaggggaatgcagctcatgttcaggtgcttatcaagtggtcatctctgtctgctgatgatgccacctgggaggattatgatgtgttgaagacacgattcccttctgcgccagcttggggacaagctgcatctttggcgggcggtactgtcacagctgatggtattcagtgcgacgcgccacagtagtcgtgatggacagctacagtagcgttccaggaatagagtgaaatgggcctgcgcgctcacatgagttatgttgggttgttgggcctgcgagctcatgctgttgcttagctgtaaggtctataagacaagggaccactcggtggggaagacatcatgaatgaaaaggaagaaaactaatcctcccccaaactttctctgttatctcctctgttcttcctctgttcttcctatccccttctgttcttcccaaaatccccatctatttctgaaatcatcgctgcgaatattacacaggctaatatggaaccacaagagagcaaatggaaagtaggtttagattttaggggttttgacaacaaagtgagccacttaatttaatacacaactgtaaaagtgtaaagatctgtttgcaacatgatttatattcatccttccatctgtgctaacaagatttggctcgatcaattggctattggggtaatattgcgaaatggattgctttgctggccatgaataggatagttgaaacttgcaagagtgatttctttagttaatcaaggcacacatgcatgtttacgagtttctataagtaatattatatgatagatgatattaacctgtgctgcgatcctattttaacttcattagccatgtgtgggttgtcgtcatgtgtataaaacacttttggtattattttaggccgaattaataaaactgaagtgaaacgagtatttgcctgcgcgcggcgtgtcgccgcctgggcacgtctattaagtataagtgagtggtgacaccagtgccccaacatcctcgatctgccccttagcctactactacctccgtctcagaaagactgcagttttgcactatttatatctactgtttgattgtccgtcttatttaaaaaatttttatgattagtatttttgttgttattagatgataaaacatgaatattactttatatgtgactattttttatgttttttaaaataagacggacagtcaaatattggacatgaaaatttcataactgcacttaaaataaaataaaataaaataaaataagatggagataatattaaacttgctctaaaaaaaataaatagcaaaaggatacttacgtccaacctcccggatgagatcaactccgggaatgggaatgacggccgcggccgctgggactcgggcactggatcaggtggcatccgctgcttgcctaccttaccgcacagcactgcgagcatcgtgcacttcacccttgagccgctcgggaaatgaggcatggttgaacaaagaacaccacagatccgcaaccgctgaaccctgcaaaggcctgccacaccaagcacaacaacagatcaaacctccacaaaaacatgtcaacccaaaactaacaagaactaaaacgaaaagagaaaatcaaacaacacaccagatctggatctagcaaatcgaacctctaacacaagcccgaaatcaatcgactaccacaacacgaaaccggggacttccgagacgctaggacgccggcggaggtgcaaggcgcgctcgatttggtggcggcggcggcggcggcggcggaggaggaggaaggggtagagctgggttgtgaggggcaacaatgctatgaaccctagcacaatcctctcttcgagcatttaatagagccaaaaatgagggggaaacgccaatcaatccccagaagcaagcaaaaaaggcaagatcgtaacggcaaaaaaaaaaatgattgccgggagggacgaacccgctccagccagtggagatcgaacggcgcacggaagcggccgggtatctcctcaactcctcacattgctacggctgctgatgctaatgccgtcgcggtggagatatccctagcacgtttccccttctcgcggtcgcgtccacgacgagatggtgatgacgacgacgacgattcatagcttgcggagagaaaaacaaaaacaaaagagtaaattaaacaaggtgacgaattaatttagcattttcgcagcgaaattgcaaggagaagtggagagaacaaaaatgcatacgaatatgttccgtgtttttttctgggcgcgtacctcagctttgattatctgctgctgctgcttttggggtttttcggccgcatccacctcgagagcaatacgcgatcggatgcgtcgctgaggtgagaaattggacattcggtcactaatgccattacgtggaatggcgtcgttaaaatatcacttccaaccgataccaaacatttattttgccatttcagccatttcataaaattttcaccatttttcacacttcaactgaccaagatatctttctctcctgcagtttctttcacctcctcatccggcgaacatgtgggaagaggcgaggctgtgcgaggagaaggggaagaggcagcgctgtgcgaggagatgttctggacaccgtcgccggcaagagaatgacgaggcggccgtcctcgtgaagcgcgagcacccgggccgcgctgtagcggccgacgcggcgaggcgcgagcacttggaccgcacggcggcgtctgactcagtggccgcggcctgccatttgtggtcggcgtttgacttgatgacgcggcggaaggatcctcttgatggactgaagctatactccggcgacgagcactactggttcgtgagctcttcatcttcctcctctcctcctcttgatccacatgtccatcctccattcttgtttcatggctgtttcttgatttgattctgctcgtcgttcgtgacaaagcatgcgtgcagtcggtcgggttcatgtcacgtccgaaaattcactagtaatttccgaacttatttgtgcataaaatcctcgtccaggaatcagccgaggtacacaaactgacaatttaatatacagattcatcaaattaactaaaacgataaatacttacttaagaggcacttagtcctcaccatgaagaaaactgcagcggaaaataaaatctagcgaagctccggctccactcccacaggcagctcaactggggtataagccaaacgtcttctcctcctagatcctttttcttcaactgaggttgattgattattgcaagaatgagcatatgacatactcaacaagccacatagcaaatatgcaagtgcacaaggataccaaaggatggcataatataggctcatttgcaaaagcagcatttagcaaaacatttaagagaaataaaacagtggagtaattaatcagaaattttaatcaacactgaacaacacacccatgctgcacaggcccaaccatcctgaacaaccatacccggctgtacagatctaactccaaaccaggagctaagcaaattattaccaggtataacatccataattattgtgagaggtgtgagactaatcacgaaaaacattgctcaacccacccataaccgcgggcacggctattcgaatagttttactctggccagaggtgtaccactgtacccacaagacacagccccacaacatgtcaccatgtgcctcaataccaccacggtacctcggaaaggagctgtgacaataccccttgcacaacacaatccaccacagcgcacctttcctggatcataatcacccccttataaacaaggcatagactccccagcgacccccgtgggcttatctccgccacttctcagtctggtgctctgcaatgaatcatgctatacaaaaggtaaagccgttgcccacgctggcttgtggttggcacggttaatgtttcacaacagtagctcgcgaaccggtccttaattgtcatgagcacgactctcaaaaccatgtgctcacaacccaccattatcaagttttagttggcaagtaattaattaaccaatcacgattgaccatcgtgaactatcattaagccatcattaaataataatgagtcataagtaatcccaatagtgtgctaatgtttctaagcatggctaagcaatcatatctaatatctagctgaaccaatatatatagctcaactagtcaagttataataacccaaggtatcaaggaataaagtaatcaatgcaaacgggccataacaaaggaatagattcacaccacccagtgatattcgaaaagaaatgcacagttgaaataaatagagaatttaaatataggatcaacatgctcaaaggattgtgtttaggatctgtgtgacttgtcttgcaataatcggtcttcaattaatcttcttgaatacttccggcgcactcacgaaccttcgcaacgacggaaacgacaagctaacacgtaaaacgaagaaaaagactaataaaaaccaaataaacaatacataaaaagtaaacaaacatgtagatcataattttagatgaattatgagacttgaacggcctcattctgacttcatatgaatttattatgaattttacaagattaaatcggattaaaacacttatatggattttaattgaattatgacgcaataatgaattatttttgaaaaggaaaagggaattattgcgtcatcaaaggcggtccgggtgcacgggacggtctaaggaaacgaacggccgagatcgatcttatccaaaacggacggccgagatcgaacggtccacgaccgggccacggcagacggccacgatgacgtcagcggcgacgtcacctccggcggcggctcgggagcgcaagctcgccggcgaacgacggcgcgaggacgcgaacggagggcaccaggacgtagagagcgacgcggcgaactcaccgatgaccaaaacgacg

SEQ ID NO: 23184 - DNA, 3573 bp, Oryza sativa
gctagggcgcttccgacggcgaaagacgaaggcgagggtggcgacgggaagcggaggacctggggatccttttataggggttgaaaggtggcggcgaaggcccacggcgaccggcgacgagaaggaaaggttagggttcggaggagagagaccgatctgaatcgacctcgaatccacggatttccaaacgaaattagccgatgattccaaaagagaaaaggtagaggagatcccgaagaacatttcccctctattgatttcaccggagaaggaaagacgcggccgaatttggaaggagacgacggcggcgcggcgctagggttcgggcggcggcgactggaggaagacgacgggtccgacaggtggggcccacctgtcagcggctgagagagaggaggaaggggcgcggcggactgggccgactgggccggggagggagagagaaaaagagaggttttgggtcggctttcggcccaaagccaaaagagacttttaaaaacctttttcaatttaaattattcatgaaatgcaattccatttattaaaaatacttccttggctcaaataaatcccagaaaaaaatctaggaaccatagaatcaagtaaagtatttaacaaaattttatctagcccaattttatattgagatttagcaaattaaaattagatcttctcttttagtcttttaagatcatttctaataattccttttaaacaacaatttataatttaaggatttttaaacaagaaaagctctcaacaattataattagatcattattgatcaaataattactgaactgttctttgtatcatttaggaattgagctctgaaaaatctgagaaaatttcagagagttgacttaatcatggagaatttaataaaaattaaatccatccatgctttatatttaggaaattttatttcccacatttaacttcacttgtaaattaatgaacatttaatataaattctaataataatttattaaataatttataaatcctgaaacaaaaatcaggatgtgacagttcacggcggcgccggtgttcgcctcagccaggatctggttcgtcgtgttcggcgtcgctcgccgctgcgtacttaatttctcctgtcacctcgccgccggtgagtaaactaaccgccgcgccattgttgcaacgtggggtgcggcgtgctgtacgataggcaggggcagttcgacgggagcacgacggcgacggtggagtacatgacgggtaggggcggcgagcgaggtgaatatcttggcgatggagcacttcttaccgttgtcccctcctcctcctcgcttttgcttccagccaacgttggtcatagcggtggcgacggcgtcgtcgaggctgagcggtggtcctcgcttgtgacggcgacgaggtggtggaggtcggagagaaataacgcccggaagggtattttggtcagcctgggtgtgtaattaggtaaaaatagagagaattggcccaaatggcaaaacaaatgtttgacatcggttggaagtggcattttaacgacgcggaatggcattgtggcgaaacccactctttgcagtggcttaatgtccaatttctccgctggggtggtgttgtgttttgctcttggctttggatccggaggagtacttttgggcggaaatcgggatcgcacggcaggtctccgaccgggaggcgtgcgagcgccgagtggatgcgccatgttggattgcttcagagtgcgatggtgtgcgtccagttcctgcttgttcgtccggctcttgatatttcgatgacatcagcgcaaatgaacgatactagggcaagggggactagggaagtagggaggggatagacggtccatgagagagaggatgcccagacttgcacgcggggccaactaaataacttttttttactttaacttaagtgtgtttagttcacgccaagattagaagtttcattgaaattggaacgatgtgatggaaaaattagaagtttgtgcgtatgaaagttttgatgtgatgaaaaatttagaagtttgaagaaaaagttaggaattaaaccaggccttattctaaaactagcacgagcctcgtggtcataattttttttcacataatcttaacttaacttttctgtcgtcactgcgatttcatccgtcaattttgtgctaatttatcattcatatacgagcgcatacgattacgccatagactcgtccccgatcccctagcacgtatataagaaaacttaatccccatacgtttgtgacgacctaaaccccaagtcctaccgattctaaaagtgagttaagaaattattaggaggagactcatatcagtataagagtaagaaaatccccaaaattcaaaacctttattttgatttttccaaaaattctgaaaccctaaactcagaaattccccaaaaattaagaatccaaatcctgatttcagttaaccccaaaccagcgaatccccaactcaatgagaaaccctacgacactgagtttagggttagttcgtcggatttcgcggcgcacggcacgagctccgccgtgtgcgtgctcctccaaactctcagttgcctttgtgcgactggtgcatggcttcacgcgccgccgtgcatcccttagccgccgtcttggaccggcctcgcacccacatcagttagtcgcgcgaggtcgaggctcaccacattatagtcttgatacgtgtcgtggaggagaactaaggtaggaagaggaatcgacgcatggcatcagctcgcagcgtgccgttaccaccattaccgccatttcgctcggtgccagtggcctcggctcgcacgaattgtcaacttggccatgacatcccattgcatgtcgccgccctaggctcgctggggccatgcgcggcatcaagttcgccgtgcatgggtgcctcaatgttgtcgctgcgtagtcgccgctgctccatcagcgttcccgtgaccgcgacccctcacctagtgttggaaaaatcgggtcggggagaaatgggaatagggttagtgacggagcgtggggctcctcaccgggagaccgctcaggcccccctttgccggttcggccgggggccctgggtgagattctaagctcctagtctatgtgtggaaggttcgcgagaatggaaacacacaagacacgggcgatgtatacaggttcgggccgctgagaagcgtaataccctactcctgtgtttttgtggatctatgtatgaagaagctacaaaagagctggagaaccagagagctcttactctctccctctctgatcgttctggatcccaaaaaaaattcatctcccttctaagtgggcaaggtcctccttttatacctcaaggggataccacatgcaccatctctctcttttttgtggggacttatcctatcttttcataaacagacggagacttgtatggttgccgtccgaatgaccttctgatgggacggcccatacctacctccacttccgccggaagcaggcgcgacgtgggaacatggctgtctgctgacgacatgaccagtgtcagaccggtcacaaatcggtcattcttg

SEQ ID NO: 23185 - DNA, 13439 bp, Oryza sativa
caacgtgccacctccaggagctaacacgccgaccccggctagggatgagtgctggaggctctcatcctgacgggatggggcgaggcgtgcgtcagaccgcctgtcgccacctaacccacgatctgatcggtctgtgactggtcacagaccggataaacgagcgcgctgcactgcgttacatacggcgtgacgcgctcgtccaaaccgcaataaatgcggttaggtgagccccgctgcgctcacctaacccatacacgcggcgcaaaacctacaaggggtcggggcgcctcagccctcggggccgaaacgggagcggtccgacccctcgggaagacaaagaggggggcggccacatcaccctcgggcccgacccccccgagggggtcaggcctcgtgggtgattgctcctgcccaagcctctagtcatgatactcccggtcccatgtcaccgacagtagcccccggcgttatgccagggcgatcgccctccccgagggaagcggtcgggcgtgacgccacttctaaggcctggtgacaggtggggccggttcctacaggtgccgtcgaactacatcacccagagggtggtgtgaggcagctgcgatgggcccgagctggcctcgggggcggagacgagctcgggagctggggtccactccgccacaaagtcggcgagggcctggctcttgatcgcgtggcttggttcaaagcgcaaatcgaattcagagagttcgattgcccatttcaccacccgtccagtaccctctcggttatacaagatttggccgaggggataagacgtaaccaccgtgacctgatgcgcctggaaataatggcgcagtttcctcgaagccatcagaatagcgtaaagcatcttctaggcctgagggtatcgggtcttggcgtcccggagggcctcactaacaaagtagacgggccgctgcacctttcggtggggccgatcctcttcgctaggggccacatccctggggcactctttgtccaagcggcctcgcggggtgcactcgtcttctgtgccgacgacctcggggtcggaggacgacaggggcggccttcccacagtggcctcggggccgtcctgggggtcgggggctcctggcgtcgtctgacaagcgggcaaagggccaactccggtcgtcaggggccttaggccaccgttcggctcgggggcctcttctccctgcactctcccgggtcgagtcggcacagggttagcctcggggtcagagggcgataggtgcggccttcccgcagtggcctcggggccatcctgggggtcgggggcgcctggcaccgtcggacaagcaggtggagggccagctccggccgtcgggggccttgggccgccgttcggctcgggggcctctcctccctgctctctctctctcttcgggcagaatcccggcggtcgcaaatcgtgcgcatcagcaagggaaaaccgaccgacaataatgagcggcccctcggctcgcgtttgccttcaactccgacgaggagtgcggtgacgacggtgcggacgacagcgacggcgaggccggctacccgggcgcgtcggagtgagcccccaggcctccgccaatcttaatagcctttccttcttcttccgaggccttcgggcccccttcttgttataggctgatttaatctgcaatcaaataaagagaaaatttttgtgtcaatttcatttgttctgtgtatgagacgaggatggtctgtgccacggtccttctgtgtcttggcttgaacaagggctcgtgcccaggtcccagcctcaaacggcgcggatcaaggctagtgcctggggagatccacatgtcgagactggccaggccgggagcgtggtgaccgagggttatgggtgacccgattgtgggtttttgccgattcccccccggagttcaccacgtcccggggcacggctcggttctgggccccttttggcgattttagccgacccgagcccccgagggtaggattgagcacgagtgacctatttcaagtcaagattcttcaaaaggaaacaaaagcacagacacagcctttaggaaatcgaaaatgcttttattgaaatacggaagagaaaaaagataagcccccggccaaccctgcacgcccgggggggcgcagggttggcccgagcccaagacctgacacccgacccctactaggggtagaagcgacgaaggtgttcgatgttccacgggttaggcagctctgtgccgtcgcccgtggccaaccgaacggagcccggccgggggacaccgatcactcgatacggaccctcccacattggtgagagcttgctcaatccagcacgcgtttggacgcggcgtaggacgaggtcgtcgacgcagagtgatcgggcccggacatggcgctgatggtagcgccgcaggctctgctggtagcgcgcggctcggagggccgcgcgccgccttcgctcttccaagtagccgaggtcagggagcgtcggcttccttctttttgtcgctcgcaggcctcccctttcgggtggccagcgaaatgccatcgacggcgaggacatgaccctcgtcgtcggaatgggccgacctcttcttcctcctcctgtcccgccgccctgaccgagcggcggacccgggggcggccgaagttgccacaccggaaccggaggggttccaagtccaggcctcctccttgcgagccactcggtccgcgagctgaaaaagctccgcggtagtctggggctctttggaggcgatcttttcgagcatgcggttgtgccgcacaccccccctgaacaagtagatcaccgcgtgtgcagggatgcatggtatggtgttgcggacttgatagaaccgctgaatgtacgagcgaagtgactcatcatcccttcgctatactgcgtgcaggtccgcttcttcacctgggcgcggatatgtgccttgaaagttcatggtgaactgttggcacaaatcctcccaggagtggaccgacgcgggtggcaagttcgttagccaaccccgtgcctgtcccttcagggccatgggaaagaaattcgccatgaccctgtcgtcacccccggcggcctcgatcccggtcgtgtagacctggagaaactcggcggggttgacgctcccgtcatatttttcggcgatggtgggccggaaccttgggggccaacggacgttccgaaggctcgccacaaaggctctacagccgacaccaccaaccgggggcacggagggctgatccccgcgtccgtgttgatgtgacactccggacgaggaggcgccctcctttgcgtgggcagcacgtcggccattacgccggcgctcgataccgatgcgggcatccggccccccacgcagatcttcctgggtcggaggcgctgacgaaggagtggcggccgaatggcgagcaacagccgccgctcgccgcgccctccgccttgacgacacggagccggtggtagcagcgccagaggtcttggtggcggaggaccgcccaccagcacctaggcgctgccgtgccgtcatgactaagttggccacgtcgtccagccaacgttgggctggagactccgggtcagggacaatgggcgggtgacgtaggagcgcgcccgcagcttggagcgcgccctggggcgtgctgccgtcgccgtagacgaggaggtgacgctccccatctcgccgcccttccccatcacccgtggatgtcgaagtcgcggatccttcgaccctctcgagcgcctcctcccgcctaggactttggcgtggagggggcggtggagtacgagctcgacggcgtgggttcggctccccgtcgtcaccgctaacactcggagagaggttgtgcgcctttgcttgttcggccattgggctgaacaggaaaagcttggcgcacacgaaagaatgcgagagcttagaaaaacacacgcagagccccctacctggcgcgccagatgacggagcgtggggctcctcaccgggagaccgctcaggcccccctttgccggttcggccgggggccctgggtgagattctaagctcctagtctatgtgtggaaggttcgcgagaatggaaacacacaagacacgggcgatgtatacaggttcgggccgctgagaagcgtaataccctactcctgtgtttttgtggatctatgtatgaagaagctacaaaagagctggcgaaccagagagctcttactctctccctctctgatcgttctggatcccaaaaaaaattcatctcccttctaagtgggcaaggtcctccttttatacctcaaggggataccacatgcaccatctctctcttttttgtggggacttatcctatcttttcataaacagacggagacttgtatggttgccgtccgaatgaccttctgatgggacggcccatacctacctccacttccgccggaagcaggcgcgacgtgggaacatggctgtctgctgacgacatgaccagtgtcagaccggtcacaaatcggtcattcttgtccaccacgcgtcagtttatcaatctgcatattcgcccctcttcatacaatgtcttgcttgtaatggttaggatgaagcctggcatatatctgaccgggtccaacgtgccacctccaggagctaacacgccgaccccggctagggatgagtgcttggaggctctcatcctgacgggatggggcgaggcgtgcgtcagaccgcctgtcgccacctaacccacgatctgatcggtctgtgactggtcacagaccggataaacgagcgcgctgcactgcgttacatacggcgtgacgcgctcgtccaaaccgcaataaatgcggttaggtgagccccgctgcgctcacctaacccatacacgcggcgcaaaacctacaaggggtcggggcgcctcagccctcggggccgaaacgggagcggtccgacccctcgggaagacaaagaggggggcggccacatcaccctcgggcccaaccccccccccccccgagggggtcaggcctcgtgggtgattgctcctgcccaagcctctagtcatgatactcccggtcctatgtcaccgacagttagggtttcagctggtggcaattttttctggggtttatcgatggcccatgactctcccgcactgcatcagccacccatcagagatcatcgcaatccattaggataggacaactcacactgacaggtcgcacttggtcttcgcgtgcctcacgggccagctctggcctctgggccacggccgatctttgggccaaattgaatttctcttattattgcccgaattaatgatttcctctttatataaatgcattttaatccgtttaagcaattatttgatgacataaagttgcattataaactttcttatgcaattgagatcatatgtagctaaatggaaccaacaagaaatttggctacaaaatttaatttatcaccattattcatatattaatgttaattttaccttatgtcactttatgttttaatattttattattccatattgtcttacgatatgaaggaataggtttttatttatgtgcacaattaatatattttatttcaatcatgtcatttcactctattttggcccaatgatattatggaaatcttacgggctgggccgaagagacgcagaccaagcagagggacataggaggcagcggattaggctgcggctgaaaaggaaggaaggaatgggctttcgacccaaaagcaaggaaggattttaattaacctttccaattataatgtatagcgataccaatattttaatttttttctcagctcctaataattgtggtgccattggaaaaaatgacttttattgtaccactggaaaaaaacgactttacccgttgcaataaacgagcatttttctagtagtatttttttcacattttattaattaaatatattaaaatagtaatagaatttttaattaatggcaatatgttcgtgcattgcaatgggtgaaactaatatttatattatcgatggagtagatcgtgactacggtgttcgcagggtatagggatcgttagtaccatgatatacgtgagattgtggtaaaagagacggagaaaaatatttttatataggttcgggccccttatctatatggtaacaacctactcctgttggtcgaagccggtattgctcttattcatcaaaatcacataagtacaatatttgggataacatatctggtcatcgtcgacttggtgacatggaacaccacatgagggtggtcttctccctcgaatatgaactcggcgaggtttgggtagcgctagatccctcatgtctgcctctggggctccggattggatctatctgggcttatctctcatgccgatatctattggtgttggcttgtattggtctctattctgactggacgtgtcctctcctccaagagggtcttctttttatacccacggatatcctattgtccaagtagaactagcgagacaagtatgtatacgatttgagtagttcttgtagtttctctgtagaactctgtttctccttccttatccggaacacctcccgtatatgaggcatggttttgtataagacttggtatatggtgggccccgccgagcttaactcaagactattgagtatgccttatccatagcactgacaaatattaacaaaaaaaataaatcctaataattaaaatttaagtatcataatgataaggaaaattttatttttttttcactaaatttcttgttggttccatttggcaaaaaaagaaattcaaagtgcaaaaatattcctaaatggtaagtccgttgggccaagacgataaaggaaataatttaaaatgcacatgcataatttgctgcagatatatagcttaaaatgaaggctcaaggtgactaaaattaattactaatttgtgactaaaataattactaattaagtattataatatgtaattttcgggtgaaacataaatgaaaaatgaaatttttaccaacatgccggtggtggcccaaaaggcgtgcttgcttatgaggcatgagatggcctagcatccgcgtgagtgtgacatcctagactaattaggatttgaactgtgtgacccataagagttgtgtgcgcatgtttagtactaccttgatagttgagtaaggttgaaaccaacttataagggtttgtcactccaaccatatcactcccggtttaacccttttactgaagcgaggacgaacgtgtaaatgagatggtatgtgtaagtggaccctcccatcggatgggctgggctacaccgttgtggtgggcgggatgttacaaatggtatcagagctgaccctcgtggttgcacatacggataaatgtgcgtgcatattggtttcagagccgaccgtcgcggttgcgcgtatgggtctatgcgtgcatattggatttgctagatgtacggatgtgcgctaagagggaacatgttcctggatttgcctatatgcttgtgcaactatacaagtaagttggactgacaaggacatcgggtcttttgaggggtgtgtgtgacatcatggcctaattgggatttggcctgtgtagccacggggatgtcgggtcctttgagaagagttgtgtgatatcctggcccaattaaaatttgacatgtatggcccataagagctatgtgcatggttagtatcacctttctaatctagcaaggttgaaaccaacttacaagagcttgtccctccaaccatatcacttacgggctaacccttttacacaaaacgaggatgaaagtgtatgtgagctcacccattggatgggttgggctaatgccgcacacagctccggcggagttgaagccaacggcgcacaatgggtcgacgtccccaaattaacacaagtcggatgttcttgcgagttgagggtcgacgacgccaaggtgatagcagcagcggcgatggcgcacggcaggctgaggccggtgaaccacaccccaccacggcttctcttccttggtgtcgccaaagccgcggccgaggcaagcctcagtctcatgcggccaacttaagtagggaccggtttgggcggtggagtcgaactgcgacaacacggatgcgtgatgtggcagcgacactcgcgtgaagggaaccggcatgaagctagtggaggagctcagaggtgcacatgcgggttgaagttggtgccacatggggagggctccaacgaccgaggtcccgatccggtgagttaagccccaagttctttagggtttgcaccgatttagggttttgatttgggtttgcaatttgggaatttagggtccttgatttgggggaattgaaaatcagggtttataatttggggaaaatacatgggaaggatttagttggcattctgttatattctatgtatatttatgaatcaaattggcactcgttattccttttctttttctttttatctaccgtcatgtgcagttgaatcaatactaatataaggcctacatcccttaaaaaaccttctatgcaaggtcacaatgcatttctcaatactaatataataccaatctctatcacattatctggtgaatttctcaatacatctgccctccatttggaaataaaaaaaatggtcgaaatggcattgtagcaagatggcttcgtttcaaagtggcattataacaaagccacattccggagtggcatttcagcaaaaccccaccctgaagatggcaaaatatcaattttctcgttaatgcaaggatgtggtttggaaaaaataatagcttgtgttaacacattttggaggaaaatatctcataaaaagtgcttcgggaaatgtgcgccccacaaaattctatagatcccggagaaaatcacgtacatttacattttctatggaggggtattaatgttcgtcacataaataaaatcaatagcacattaaatcagaagcttatgaaatgggaaataagtgataagcgatttagaagcctaggctagaaaatacactacactgaaaaaaaaatctctaatatcaacattcaagattcaaattttggttgcagttaataaaccaacaagtaacattcagatcaacactaaaataagttaggttcatcaaactacaagtttggattccctcacatatgactactgtcagctcgattctttgaatatcgcatccaaattttcatgcagttcattgtgccaaacaatgagccttgcccatgctatgacatactgttcatgtgcgagtgagtaatcaccaactttagcatcgacaccgcctttgccccactccacattgtcgctgcccttgtaaccgatctgcctcgctgaaaagagcatgcaaataataggttaacccctttcaaagatgtttctagtccactccaactccattagcactaaaaattacctggttttgaacctatacttcccttcactctgtccttctcaagggatgcagaccatcttggcagatcggaatataaatcattttcaatatcttcatcttcatcttggtttgtgcaaaagaaaagaagtggacccacgccttgtctattgaatgaacaaactagagtgccatctacacaagcaattccaagtggaatcaggcttttgttctgtttctggagcaggatatttcaaaacctacagaattcaaataaagtttccgttagtgatcaacaagggtataaaacaccatatgtttgagttttgtagtgtataaattgtcagtatatcacacacaacaccaaggacgctggagaagcgaaggaagcacttgatttggtggctgcagcggcggcggaaagggtagagcggggctgcagggtgttagatgtatatgtattcttgtatttccccattgtataaggggcttttgtgcatatttacccactcttgtacctgtatatatttgggcctagtgcccctataacgaatagaagtgctattcataacaaaggagtgagagagctacgaaccctagtttagcctcagcacaaatccccctctcgaagcatttaatacagccagaatgaaggggaaaacgccaataaatagcagagcaattagaaatcacgagaggcaagacaaaatggcaaagatcataacgcgaaaaaaaatgattggccgagaggacgagagtgacgaacctctcaagccacaggagatcaaatggtgcacggatcacatagctacggctgttgcggatgctgatgccgcccccacgatggataacatgccatccagtaaaagagatggaagtattgattagaataagaaaaatgcaatattacataagaaaatagtactaatttagtcatgattgataaagcttactcgggtgcatggtaagaagtgttccggggaaatatgtgtcccacaaattcttatagaagctctaagaaaatcacctaacattttctacggagtataaatgtccgtcacataaataaagtcctacagcgcattgaaacagaagcttaatgtagtatcagtcatcatttaattgaaagctatacttctcttcactctgtccttcgcaagggatgcagaccatctggcagatcggaatataaatcatttccaatagcttcatcttcatcttggttcgtgcaaaaaagaagaagccgatccacgccttgtctatcgaatgaagaaactgaagtgccatctacacaagcaattccgagtggaaccaggcttttgtaagacgtttcttgagcaagatatttcaaaaccagcagagttcaaataaatcttcagttagtgataaacaagggtataaaacaccatatgttttgagtttagtagtgtatcgattatcagtatatcacacataacaccaaggatgccggcagaagcacaagaagcatttgatttggtggcggcaacggcagcagaaagggtagagcggggctgtgggggcgagagagctatgaaccctagtttagcctcagcacaaatccccctcttgaatcatttaatacagccagaatgaaggggaaaacgctaataaatagccaagcaattagaaatcactataggcgagacaaaacggcaaagatcatgatgccaaaagaaaaattatttggccgggaggaccagagtgacgaacctctcaagccacgggagatcaaatggtgcacggatcacatagctatagctgccgcggatgctgatgccgccgctgcggcagatcacatagcatcatgtaaaagagatgaaagtactgattggaataagaaaaatgcaatattacataagaaaatagtactaatttagtcatgattgagaaaagcttactagggtgcatggtaaaaagtgtttcgggaaatatgtgtgtcccacaaattcttatagaagccctaagaaaatcgcctaacattttctacggggtaagtatattgggcttttgcttgtgtccacaggactggcttcctcgttgtgtgcagttcaaacaccggcttaatgtgtcgggaacatttctgctcttctggcaagatttaattgctgctaatttagcccaactaactagcatcctgtgaaagagatggaagcatgattattggttggaataagaaaaatgtcatattatgtactccctccgttctaaaataaataaacctagtacgggatatgatagagaaagtatatgtgagtggtgacaccggtgccctaacatcctggatccaccccttagccaactattaaacttgctctacaaaaataaacagcaaaaggatagtcacgtccaaccttccagacgagatcaactccgggaatgggaatgacggccacagccgctgggactcgggcattggaccaggtggcgtccgctgcttgcctaccttaccgcacagcactgcaagcatcgtgcacttcacccttgagctgctcaggaaatgaggcatggttgaacaaaaaaacaccacagatccgcaaccgttgaaccctgcaaaggcctgccacaccaaaaatacatctcaacccaaaactaacaagaactacgacgaaccaagaaaatcaaaccaacacgccagatatggatctagcaaatcgaagctctaacagaagaccgaaatcgactaccacaacacgaaggagcaaggcgtgctcgacttggtggcggcagcggcagaggaaggggtagagctaggatgtgggggcgagaatgctatgaaccctaacacaaatccccctctccgagaatttagtagagccaaaaacaaagggaaaattgccaattaatccccaaaagcaagcaaaaaaggcaagatcgtaacggcaaaaaaaattgattgccaagagggacgaaccgctcgagccagtggagatcgaactgcgcaaggaagcagggatctccccaattcctcacattgctacagctgctgcggatgctaatgctgccgccgcagcggatcacatagcatcctgtaaaagagatgaaagtactgattggaacaagaaaaatgcaatattacataagaaaatagtactaatttagtcattatggataaagcttactagggtgcatggtaaaaagtgtttcgggaaatatgtgtcccacaaattcttatagaagccctaagaaaatcgcctaacattttctacggagtataaatgtccatcacataaataaaatcgaacagcgcattgaaacgaaagcttatggtagtatcggttatcatttatttgaaagctaagagcagtgaccaacattgttgcaataagctaagagtttggtgcttactatggtcggaaaaggtggactagtgagtgaactaaatatctatggatcagatacatcagcctcgccccagacaagtgtaccaatttcttcctcattctcaagctgctgaccctggaggtacatcaagttgggctgcacagcctgttttgctttccgaaatttggattcgctcaacatagagcctcgcccttgcgatgcttgttgatgtgcaagtgagttgtgcattctctcaacattcagcactgacaacacctttgcacaactacaaattgccgttgcccttgtatccttcacctagctgaaaagaacgtgaaaaacaataggttaatccctttcataagatgtttctagtccactccaactccattagcactaagaatcacctggttttgacacaaaatttctcttcactctgtccttcgcaagggatgcagaccatcttggcagatggtgatatagaccatttccaatagcttcatcttcatcttggtttgtgcaaaagaaaagaagccgatccacatcttctttatcgaacgaagaaactggagtatcatttacagaagcaattccaagtggaaccaggcttttgtaagacgtttcttgagcaagatatttcaaaacctacacaattcaaacaaatcttcagttgtcaatatatattgagtttagcagtggataaat

SEQ ID NO: 23186 - DNA, 1655 bp, Oryza sativa
tctaacagagctgaatcaacatgaagaggaggagcagcgctgcaaagagaaatattgtgagcagaaacaagctaaacattatatagtaatcatgcaagcaacgatgcagaactgcaaataagaataagaagcacaacttaaaatatgattaaaaaaggatacaggttaaattctctatcgcgcagtagtttacattttacacaccaataaaagcatttaatttgtgttaccattaagttttgtctttagtctatatggaaatgtaacctcagttaacctctaaattatagcagcaaaatacaggttagctcatttgatatatcaccaatttaagcttcaaatatttttgtggcatagaaaattacgatatgattgcgacatgagcaatagtgtttaagacacaacaggttgcgagatattgaatatgtattatacagcacacataactcacacatgagcaatagtgtttaagacacagatgcaaacataactcacacatgagcaatagtgtttaagacacaacaggttgcgaggtattgaatatgtagtatacagcagctgaagatacctgactctatcctggagtttgcaccaccgaaactgaaaagagagaagaaaatcaaacattaaaaaaaggccctatcaacaattttactacttgcatcatttttctcgtgcagtttaatagacaagaatgaattgacactgtgcagtatgtgccatattatcttgttcctaaattcatggtacataaaatttgcatacaatggtgctagcaaaataccggtgtattgcaacaatcaacaaatatacatatatttcatgaaaaaaaacatatacatttgcaatccacatcaatcagaaaataaatccacaaattagaagatcccaccaaacaaaagaggaggtggtgggatggcagacccaccaatcaccaccaccactactaagttcttagatgtgggtatgctgcatagtctaaaatgaaaatttacgtctcagaaaacgagactatgactaatctacaggaagcttcactccataaccatgcaagtatagactttggaacctagccccaccagcttgtataagctgcttacaagtagcaatagtggtcgatggccactagcccgttacttacgatgcaacaatatttatgatttgtaagttagcataatagcatcacgtacttcattactccaataacctagaatttctacaaaataggtctctgggtaatactccattacagaactcagcacgaattagatgtagaaaataaaaagcagcaacattgatttgacacatacttcaatattgagaagagcattcaaaccatcctctagtgagttcaatatagatgaatcctgtaaaagggatggaaatacaatcattgatttggaataagaaaaattgccatattttagaataaaaatctcggcatgatcgcttcaacttacatgggtgcaatgtgctccacagataagaagctttaagtgcacatcttcatcgtatatctttatgtctggaaagtattcagaggtatcttcttcctcagccattttgtttccaggaggggtgatatatatccttggagcatccccaagaagatgaggcccaagcataagacgttgcacgtcattatttcttacaca

SEQ ID NO: 23187 - DNA, 20061 bp, Oryza sativa
  unsure (1)..(20061): unsure at all n locations
ctatgccagtcaaaacaagttaaacaaatgcaatttagtaattgttttatagaaactaagctctataatactctacagaaaaaaaattgaacaacaaatggggacatttggatattgcatcgataaagcagattcccacctacgtggtaaaagatatttgcagcaataagcaatctacaggctcaaatgtaaataagaaacagcgacttgaaaatatcagaaaatagactaccttcgattgaagagattgagcaatcttttctccacttggaacttccaaataaacctgaattagatcttaaaaggtaagataagtagctacaacgaagaagactaaggaaaaattggaaagaataactttcattaactaaacaggaaaacaggcagaggaaggttaagaagaaattgaattgttactagctacaagtcagataaatatatctggaatatataaacaaggttacaagggttaaaaaacaaaaaataaaataagtaattttaagggccaatctgttaatctctaaattggcccttaaatcacaatcaacctcaataacaaagggagcctagatgcacgcaattatgaactactccctctgcagaactatataaggcatgtatttttatcgcattaaaccatcaaatccaattagataacctaaatgcccatatttatagctccataagagtattaatgctatcgctgcctggctctaatcccagctgcatgcatgcatgaactaatcatactatcgatcactcaattgaaagatcaataccgtatgctaagagcggtgataacactaaactaaaagatcaataccgtatgctaagagcggtcataaccactttagcaagcactctagcacccaattatacaaattgccaaacttcatcagcaaacactaataactaaagtggatcagtaaaccaaacatgtaaggaagcatagatatagctataaactgcagcgctaaaagaagcatagtccaggtgctatgggagctgaagcgccaagcagccaaacatcagaactcaaaaatcggtgctaggcgcctgttagccacctgcgattatgcattacatgctgtattaggcggctaaccaaccttaggtgctcttgtgcttctattttagtgttgtattgtgtaatttttatgtaatatgcttgctaatttcctaggcaccagctctgcagaccctctagggctcctgtattgtctcatttgccggtttaagttagacatgataatatgatgtagtacatagaaaatcagcagagtttggtgcttactatggtaggaataggcggacaaaaaagcatagatatagctataaattgcagtgctaaaagaagcatagtacaggtgctatgggagctcaagcgccaagcaggccagcagccaaacatcagtactcaaaaattggcgctaggtgtctgtcagccacctgctattatgcattacatggtgtattaagcggctaaccaacctaaggtgctcttatgcttctatttccgtgttgtattgtgtaatttttatgtaatatgcttgctaatttcctaggccaggctcttgtattgtctaacatttgccggtttaagttagacatgataaaatggtataatacatagaaaatcagcagagtttggtgcttactatggtaggaaaaggcgaacaaatgagtgaactaaatgtctgtggatcagaaacatcagcatcgccccaaacaagtgcgccgatttcttcctcattgtcaagcagctgtccctggaggtatatgaagcggggctgcaaagcccgttgtgcctccagaaattgatcaaccgtaggattgatcagcgtgtgcacctgcatgcccaaatttccaagttcagaactgacaaacaaaatatgtacttaagaccaagtttaatagtaaagctaactactagctataaggcaatcgaaaattagcattagaattcacatgtgtaacagattggttataaggttgcctctaaatttcttctctctttctctcatgtatatataattaattaatgcatttatcttagcatgtgtatagctagcttttgcataagagttaacactattttcttggttatcacaggggcatatccatcactggggcttgtcggggctcaagtcccagctctggccgccaaacctatcagccactgcttcagccactgcaagctgcaacgcagtactgagagcctataaggatggtgaaaacttaaaaacctgttatctgatcaactgatagagcgatgaaccagatggaattgttctcgcaagatgcttgttaggcagagaggggaactagcttactaagctagaaaacgtactatatctatgcttgctttgaagtggaacagcatgctaatatggaaccacaagagagaaaatggaaagtaggtttagattttaggggttttgtcaacaaaagtgagccacttaatttaatacacaactgtaaaagtgtaaagatctgtttgcaacatgatttatattcatcattgcatctatgctaacaagatttggctcgatcaattggctattggggccgttttgcgaaatggattgctttgctggccatgaataggatgctgaaacttgcaagagtgattttttatttaatcacggcacacatgcatgtttacaaatttctataagcaatattatatgatagataatattaacctgtgctgcgatcctattttaacttcattggccatgtgtggattgtaatcatgtgtataaaatacttttggtattattttaggccgaataaataaaactgaagtgaaacgagtatttgcctaagcgcagcatgtcgaaacgcgggcacgtctagtaagtgagtggtaacacctgtgccccaacatcctagatcacctgtgccccaacatcttagatccgtcccttagcctactattaaacttgctctagaaaaataaacagcaaaagatacttacatccaacctcccggacgagatcaactccaggaatgggaatgacggccgcggccgctgggactcgggcactggaccaggtggcgtccgctgcttgcctaccttaccgcacagaactgcaagcatcgtgcacttcacccttgagccgctcttgaaatgagacatggttgaacttgaacgctgcaaggctgcaaaaccaatagcaacaacagaccaaacctcctccataaaaaatctccacccaaaaccaaccgagcaaatcaaacaaaaagatctccacccggaaccaaaaaggaacgaatagaaccgagcaaatacaacagatcggatcgagcagaataaatcggatcgagcagaacaaatcggatcgagcagagaaaatcgatcgagcaaatctaacctaacaggagaccaaaatcgactatcacaacaccgaaccgggactcacgagacgctaggacgctggcggaggcgcaaagcgggctcgatttggcggcggcggcggcggcggcggaggaagaggagagggtagagctgggatgttagggcgagaatgtgatgaaccctagcacaaatcccctctccaagcatttaatagagccaaaaatgaggggaaaacgccaattaatccccagaagcaagcaaaaaaggtaatatcgtaacggcaaaaaaaaaatgagaggagagtgacgaaccgagccagtggagatcgaacggcgcacggattcctcacattgctacggctgctgatgctgctactgatgccgccgcggtggagatatccctagcacgcttccccttgtcgcgcttgcatccgcgatgggatgatgatgacgacgatgactcataacttgcagagagaaacaaaaacaagatgacggattaaattacagcgggatagcgaggaaaagtgggggaaaatgcgatgcataccttctctccgatccgtgctgatttttgggatttttttttggccgcatccagcgcatacgcgatcgatgcgccgccggggtggtgatgtggtcggctcctgtcttcgattccggcggggatcggaggaattttggatgggattggggaaggggcgacgcggcggcggtggatggtgaggcagttcatgcttgttcgtcgggttcttgaggaacgctcgcgttgcgattactagcggagtagcggggagccggggagccaggttgggtcttgggtgaggaatgtcacaaggtgaggtgaatctcggcactcatccaacgtagatgcaacggctaagattcatccacatcattcaaattttactcgcaaatttactcaggattaaaaattttgctggcggtgggtggggaggggatggacggccgtctcaggctaacatgcgggaccaacaataatttttaattcttttttaaattcatggcactgtttaaaacattttttcctctactcggagttaaaaaataatcggtacagtactacttgagaatgagttcccaacccatctcccttattttccacatgcacgttttttaaactgctaaacggtacgtgttttgtgaaaagtttatataggaaagttgctctaaaaatcatattaatctattttttaaattttttattgctaaaacttagttaatcatgtgataatctatcgctccgttttccgtgcggagtggaggggtttccgttgggatgaaaacgtagcggatactgatggataatgctcataccatattagttttcatagttttttttcagatgctgttaacaaccaaatgtttttccatgtcagcagatgcggaaacaaatacggatagtttgaatacggaacaaaaacggattatctcgaatacaaataagaatcgaatatgatcggacacaaatacgaaaacatttttttctcggaacaagaaaaccaactcaacttttaatagaaacaaatatccaacatatataattacctcattttatataaaatatagtataatttataaatattttttagaaaaaataaataatattaatagcgtggactagtgtcaagagatgaactactattaaaatctgaaaaggtatattgaaggacatggagttataaagaaatggggtatgggtcatggcttctgaggatatccgaatagcactattcaccggattttcgaattattttccatatccatcaaaaattccgataccatattcgtattcgtatccgggagaaaatatatgtattcatattcgtatccgaagtatccgagaattatccgatccaaaagatattcgtatttgtttttctccggagcggacggaaactatccgctcagttttcatcccttcccaaccagttttcatcccttcccaacccctccaaaacaacacagccttaattaacatagaataatatttttaaaaaaacttgataaatataatctttacagtacttcattaacatagaataatattttgaaaaataaacttcaaaaatagcttacaacaattggtctaaaaaactatgaaatatttttgatttggaaaatagataaatagcttacaacaattgattttgcgtttagaaaaatagataaccaaaatttagaaaaggctaaaaagaaccgtgcctatattatacatttgatttggttatattgttactttattattgaaatttgtatattcattttaatattaagaagcaatatgtctaatagtaagtaaacaattctatcagagcggttcttttaatttattctaaaacaatacccatagttagatctctagtaaacatttaattttaaattgtaaatttaacattttacatttgtttagcatgccataatggattcaaatatgtctgacttttctaagaattggtatgaagtgataccaacgagaatgtgagcttgacatgcatatgagtaaatatattcacaaaccttatattgacaaactcctactatgcattaaggcaacatcaagttgccacatattgcatagacttttaaagagctataaacacttttcgactgtaaatgctgcattaaacaagttaaaaataccaatccataatatataagcttttaggttttaggtatttggtcgacacttaaggacaagtttaaatgtccgtgtaatttactcaagagcaatatatagtttctaattgggtcatatcaagtctaatggaattttgatcattggaattttgccctaaagcgttatatttcattattctcccctccacccaccctatccctgattgagtgaaaattgtcacatttgttcgcttgcatgctttaccacttgttaggtcatcaacatattttagatagagaacgttgctttcattaatttatctgtcaactatgtcaacaaaagacaactcaaaatagaggatagtgcatgtataagatatgatatggccttcaatataaacctacttatgttcctctaccttttccctcatattttgtgttcgagcaatctcttcacaaaaaataatactaagccatttatatcccatgcccgctcttcatatatttgacgtgatgagacaacttcttttttttttctcgaggagggcaactttgtttgatgatgcttacaaacaacttgttcactgaaatgtaaaaatttgcttactaggatatatagacttgtatgtttataaagtgacatatttctattcatctatcttattatatttttcacctttttagtgggctatttgaatggcatgaaaaaggcggagatatcccctcgagagataaaaccattttccctactaaatggcatggctctaactttttttaatgaaacaatggtctggctctaaatcttgactattgtagaaaacatagtttgtatataaataaggagcttgcattgcggtgtgtggggtaaatcatacactccttacatcccaaaatgtatgacgccgttatctttttgcataacgtttgatcattcattttatttaaaaatttagtataaatataagtaaatattatagttcatttgacgataaaacaagtcacaacaaaataaacaatatttatataataagatggatggtcaaacgttatgcgaaaagtcaacgacgtcatgtatttcatgatggagggagtaaattttgtggaatcgtgaacatgacgttttacatagtactactatgatactagaatataacaattttgcaaatattttgaaaaaataatttatttatggcaaaatcgtaatgatattaatttacttctaaataaccctctaatgggctttcaattttgtgtttgtcgaaagttgagaattgaagtataatagtaatatatgagcaacattgctacattggtaaaaaaggtactaaaaaggatacttgtccgacacatggaaagcatagccatcgtagtgatggtcacagtggtcgctgcatgggcgaggatggaggggttgactttggggatggtcggtgtcaatggtaccgctgttgcggctatgatggcacacaactgcttttagttggttgatcaacaccaccaacccacaaccatcgtctctgccgagatgttagccatcatgtcgtcatagccgcatagtgtcgttgtcttgtcacctccaccgatactaacaccaccactccaccagtcgtcatcgctgccgcctttctcaccattgcgatatgatcatcttcttgaccgatcaatcgatctatgcgcagttgccgccttcaggtgcatgcattagtatatggaggagatctgggttatctcgtcttgccatgcaaacatagtctaaatatatgaatgtggcttacataggacaacgaaacgaagctggaacacatgaacaatctcggtgttgcttggattaacacacgacgaaaacattttttgctttttaagtagtagagaaatgcatatttagtaaaaaaaaaaattttgtagcttttaataaattagaaattttgtttgagagctcttaaaatttcaattttatcacattcagttgaccggttctagcatgccaccgacgattgtataagcaatatagtgtgactgtcgtcggtgtggcaccttttttttatatatattttgagctttcatctatctctatttatttcaatttcagagacatacgtggaatgtaaggcgtgttgaattgttgattttttttctaacgaagtcttaaggtctcatcggttacccatattccgtggcttattagagaataaaaattaattataggtaaaacttttacatatgtgttcttagcgattaggaatatggcttattagagaataaaaattaataggtaaaaattttacatatgtgttcttagcgatttaaaggccaatgctgaaaaaaaaaactacgtataaaatatcttaaaatcaattcaaaattaagtttgaaaattcaaattttaactttggttttggcttattaggggaccaatgagcctcttacgtttttcttttcttttgaccaccgctatttgttttccttccaaagtatcattatttatttcacattttatattatatcttccttagtttttcctaatttttattttgcaaattttcagactgtgtaatgtttattatagtctagtggtattgttaactcatttgaaggatctagatattcctagtttagtttattgataatgagcttagatgtcgggtcccaaaactaatgattcggaaaccgacatgtttagactgtatcaagccctggatcagtagattgatataggttcaacgatctggatcttcattgcatacatttgatcaaggttttaaaggagattcctttacataaaataatagggtatttacaaacttgtggctaactattacagcagaagctatacgatgacataactctagtgttttgctatagagttaaaccatctatctaatctatacttgagaactaagttaaaatgagattaacttatatgattgaacttccagcttcggcaagaactccaaaatgactctgaaaaaggggttgaagcgagggtgagtacaacgtactcagcaagctattatattaaccaacaatgaatgcatgaaatggtaacttctgtgtagaactaggtttacttgcagaaagcagagaatattgaaggaaagtctataatgttttaaatgcaacagtatttaataaagtttgaaattatgttctaaccaagatgccattgtgagccccaatgcccgataaccgcgagcacggctattcgaatagttttaataatattcatactgcagtagatgtacgctttacccgcaatccatgacgtgccaaacacattagccttgtcatgtcaaagcttttcggttactaacatcagtggtacctgttccatgaaccctagtccccatgcgctctgaacgtaacgttatcagcagcgagaggagttctggtgttcccggggtttttagagagaactggttgagagacccccgtcatctcaatcaggttttcataatacacacacagctcgcgagataatcaagatatttacctgcgcctcggtaaatatcacaatcgccctgctcggcgtaagtttgcctcctgcgcgaggacttaagaagaaccactatacagaggtaccacttttgctagataacttaatcagctaggtctatgcccatacgagaattgcggtcgtactcgtatgttcttcacatgtacttggcaatcttatgtcggttggaacagtactagccacccggaaatcaaccatttctaccgtactgttccaatctaagttcattatattttatgcagtctaactaggcagggctaagcaaaagctagcatatctggtttgctatgttcaggttatgcatttgaaatcatgtatgactaatgcatagaatagagatatagaatatagggcatttatgctcaaaggagaggaataataacttgccttgctctaacgcaaataaatccgagataggcaacctgattatccgatccttgaaataccacaggttgccattcaaaatataacagactctactgtagaagaggaagatccaaattcaataaaagccatagaataacaagaaaacgacaaacggttaagagggctagggtttagtgtataacctatcttttctatagggtatagggattattggctaatattttatgtgcaggttctaaagggttggaggctaaggtggataagagattaagcaactagggtcgcttatatttcatgcatgggcttctgtggtttggaggataggaaatatactggataaatgatgtggttaagtaggcatgtggctggtataggtcaaggtcaggctttgatagaacagtggctagagtttagttgttctcgagtcgatgctgaaatagtatagcatatcggctcgtaattcttgcataggctatgggtagttggagggtaaatggttgagattatagctggcggggagtctggctaataagctgactaaggtttcaattgtctaagccgatatcgaggtaggataaatatcggctagggtttgggtgttcgctagtcgtcgctaaagcatgacgactatgtttggtatcttctctagccagtgtcaacagacaatataatggctagagggatgggaggtttgtgcaggtttagtggggcagaagtgttactccgacaaccgtgagtggcggcggagcggctaggatcacacatggcccgagagctaactgtgcggcgtgctgtggaggtcgatggaatagtgaagctccgaccgctataggcatcgaggcgtggggtgctaggagcagcacttcgaccttaggtttggttttgccgggctttacaaccaacggttcgacgtcggggccagtagaccacacgaacgtccccatggaaggcgtaaagttccaaccggcggctttttagtggctaatgggtatttttgggtaaaagaaaatatttgaaaaaggcaaatataaattcaaatgatatttgaataaattcaaataaaattataaaataacaaattaggcatcaaaatgaagcatttgaatttatatgaatttaggtccaggtttcactgagatcggatctacggtttaggagatatgggcttctaaagattgggatttgaattaaataaagaaaatatgaaaggttactattcatgggcctacctgtcagtgcctattcccttttctcttctttctcttcttctcgtcttcttcttcctcccgcttcacagagagccgagagaagggagaagagagggagaaaggggcgctggtgctccggtggtcgataggctgcgacgtcggcggcaaaacatgttcccgagcgacgcgcatccggggagggtggtagctagctaggtggagagggagatggccggaacagcgacggcaggagctcaactccggcgataagagaaggtggtggtggcggtttatctcaaggtggagggagaggggaaaggggaaaaatggaatcacctcgtcgaggcgaagccaatggcgcgaggatttggttagtggagctctggtgagggagatcgggcggtggcggcaatagccggttatggctgggagagagaagggaaagagcttttagctcgatgtgtgggggagaaaggatgggctcgccggtatttataggcttcaaaggtcggttcgcagaggaggagggcgacgaaggcacggctgcagcgacgtgaaggaaagaatgacgacaccggttctttcctcccattggacgttggagtcggttcggcttgcagatgtcgtcagcgaggtgaggtggtggctgacgtaagattgggcggcagaggaggaaggcaaggcacggcgtcggtggagtggggacgaagagaacggcgccggcttgattccttagcggcgaggtttgcggcggcgtgcgccgtgcacggcacgcgcactgagaggaggagggaggcggctgggttgtgggttgaattgggccggctcggcttagctgggccggcagcccaagaggaaggaggaaaatagaaagaaaaaggattgggccaaaaggaagaaagaacggagtttcggcccgatgacaaaaaggaagaaatctaatttgtatacttgatttggataactaggttttgcgaagaatttgaattcggagagaattcacaaaggagatttcctaatttatttgagtgcaatatttagaggtggaatttgagggaatttatttggaagcactcaaataggaagggaaattaatagtattcctcaaaatatttttggggatgtggtacgaaaataggtggaggcaaaagaatacgatttgaaccctaaaatatatggcatgggtttcaaggaattgtttgaggctaaaaggaaatttaggtgacaaggatataatttattttcttagcacaagagcaattattcacaatatttgtaataatattattcttgtgccgagaaggaaatcaagccacgggaattaaattagcggctagatcaaaaggaagaatttagatatttggcgataaataagaatatgtttggaatcaaaggataggtttaaaatcaaaggatgggtcgacaattaaatccaattggaatcgtttggtttaggttctaggacaatagtggagaatttcttggaccataattcataaaaaatagaaaggggttttcaaactaaatttgaataaaagaatttttgtcaaaagaaggttttaaaccaaatcaagaaatacctcaatttaaccaaatatatattttaaaataaaaaacattttagagattaaataccgcataaggattctgtgcaagttagttttaggaggtccctctaattatattgtcctaagtttaagaagttattaagaacataagaatcggcatgatgcaggattggaaaatgacacattttcaagatgttacattagaactccagagagactgcaagctgcaagaaagctcgagcgatgtggcatctctttctttgttacatgtgtatttatttatttatttttcgcatatgactccataatctattttaaaagctagttctgccaattgcaccaactttagaagtattgaatattgattgattaaaaacattttctacccctaactcgaacgacaataatatttgaagctagagagatggtactagttaaaaaagtttggagtttgaattaaacaaacatggccaacatgaagatgaagacaatgacactagcattctcattagccaaaccagcgttaagtccttaagtatatgtcgatttccataaggaatgacacacaaattcaatgaacaaaaataaaattacctaatgtggtataaaaaaatcaatagatgctccaagccagcgatagcagtccaccctgtcttaaaaaatgagttgaaagcaaaattggaagagagaaagagctgtagccggcgactaaattagcgccaactcctcacgagttacaagatagtcagggccggtcctgggtttttgggccccaggacgaaaacttatattgaggcccttatatatctatataaactaatacatatatttatataatcttataaacacaacatttaatattcgatttgataaaatattatctatatataacattttaaaacttcaaagagaaataacataatcataaacacttactagttggcactttcaaaattttggctcattgatgcattagcattacttgtgaaaaattctgtcaatagttcctcgttgtgtttcaatgaaatcatccgaacgctttttccgtttccttttttcgctaccggatgcatattttctcgaccacatgattaatgttgtgctgaaaaaataatcatcatgtgctggtgattttttatttatgaagaggagaaaaagatggggaaatttaacagatgaaatttacctcgaacgagggacacgacccgacgagcgtggtgagccgcgactgcgagcgccgagcagcagaagcaggcgagtagcaggcgcctggcgcggtggcgccgatcggccgatgaggcgatgagcaacactgcaacaggagttgaggagcaacagacgcctgcccgtggacctaccggagtggattggtcattggacatctgacatcggctngcaatccnntgatggcncnntctagctccgtagtacttactatacgtacgacatctccatgagcatcgtagggctgtacgcgccgacaggtgcaggatngtcatgatcgtctttctctcttccttttgatctcgctctaggctcttggtctgactggactagtctccatttgggcccattgtgcgccattcatccctatgtgtgggccctctacatactttgggtagtccacatggtcggccgcacgggctgaccctagggtcggccctgaagatagtgcaaagcttaagtaattggctcacgaatagctgagcagtacttgctctatacaaatgaaaaagatacaatgtgataaataaaatgaaaaataatatttagaaaattatgcactgcagcttattattgtactctaaccatggctctacatgatatggaaatttttggagccatccactggctatactattgatctcgctcttagcgccattttccaaccatggcgccctaaagccaacaaactttccaccacacttaaaagcgatatttcgggaatatgcatatgtaaaccaccaacagtcacccactcacctgttaatccgcccacattctcatcccagatacccaaacgccgctgccgtagttaatccactcacccactcctcagactgttgagtgcctcctatttaatctccgcgcgaagacgtgcgagagaaaccgccgcgaaacgaggcaatggcgtcggggtcttccagttccaacgacgccgccgccgacctcaccgtcctcgtcgacgacttctacttctccgtcctctcccacggccgcaacgacgacgacgactccgccgatggagacgacggcgagctcttcccgatatccgacgagaagtacgcctccgagctgcagctccaggaggtgatcatgtcgtcctccgtggcggccaccacggcgcgctcctcgtcggcgccggttatcttcataggtgagtgctcctcctcccacgccgcgtcgtcgtcgtctcggttgacctcgatccccgccgccgccgcgacgacgctcgtcttctgcaagatctgcatggacgccgtgccgccgtccgccgcgcaccgcgcgagccgcgggtgcgaccacgccttctgcgcggcgtgcctcgcgggctacgtcggcgccaagatccaggagaggatcgccgacgtccggtgccccgaggagcggtgccgcggcgcgctcgacccggagctctgccaggggatcctcccgcgggaggtgttcgaccggtggggcgcggcgctgtgcgaggccatggtgctcgccgccccgagggcgtactgcccgttcaaggactgctcggcgatgatgctggacgacgccggcgaggccgtcaccgagtcggagtgcccgagctgccggcgcctcttctgcgcgcagtgcgccgtgccgtggcacgccggcgtcgactgcgcggcgtacaagaagctcggcaagggggacaggggcaaggaggacctgctggtggtggagatggccaaggggaagaagtggaagaggtgccccaagtgcaagtacttcgtggagaagtcccaaggttgcctgcacatcacctgcaggtgctgcatcattttatcgttcagatgtcttttcttccatatcttgaattttctttgcaggagtatatatgttgtatcaaattgtttttgagatgatcatgatcatcacaacattttgcaggtgtggcttcgagttctgctatggatgtggagggcagtggggcgttactcatgcgagttgcagcactgcatgagaattccagtttaattttggctgggctgatctgattgaatttttctgtgttctcagtgagaccctagtagcatcaattatcatatttaggagaccgatggtcatcagtagcatgaattatatgtcattctctcaccgaattaagtttcggttatcaaaagtatgaacttggagctaatttctaaatctaaattcgctacacatggcacacagctaccgcgataatattcgcttgaataccacattcaaattatttgcaatctatatattgtctgttaaacgttcgaccttgcttcatttgaccattttagatctgtgagtgattaaaagtgcttccaatgtgtatacactcgggtgttcaataattcttctggtaaatgatgtacccgttaacataagttagtccaatcttccggagatgtgtataggggtagtgtgtgcgtttatagcgatgggtatatgcgtgttataatcgtctgcgtttgtaacgtgtttcctaaaaaaatatgtactagctggctagctgccattctggcccgttctagcctccttgttttgttaattagacagaattgagagtatgtagcaccacagaaaaaagggttagttatcgaattgtttccatctcttcaatgttagcacttgtaaacttgtggatcttgtccatttatttgatccctcaaatccgatgcatgaggccttctttgaaatggacgaatctcaaagtttttcttttgagcaatttaactacatccaatgatttttcttttaacataaaaactgcgtgttatggtgccataaaaaggttgcatccggttttatggctaatagttccatcaatattcctccaattgttaatggactgactgctgtaaattttttcagtcccaatcagaacgcaagataggaaaaaacaccagaattgaaatggttactttcatataaattgagtcagcctaaaattatactattttacctaggctgagttttttttcccaactttcctaactcatctacatttttcaaactgctaaatgattttttttaaaaaaaattatatacgaaagttgctttaaaaattcatatttatcaaaattttaattttttagctaatagttaattaatgatgcattagaagccttagtagattggtgccaaaacagtgcatttggcgcatattacaactgtaacaatatttaggcaccacaagtcccaaacaaattactagctgattcttaaaacgaaaaataattctggcccattccatctcaaaactattgttgcaaatgtgcaatgatcaatattggcacgatgactgtgtttatttcctttcaaacttctaatttttccgtcacatcaaatgtttggatatatgcatggagcattaaatgtggaaaaaaaatcaattgcgcagtttgcatgtaaattgcgagacgaatcttttaagcctaattacgccatgatttagcaatgtggtgctacaataaatatttgctaatgacgattaattaagtttaatagattcgtctcgcagtttacaggcagaatctgtaatttgttttattattattctacgtttaatactttaaatgtgtgttcgtatatgtcaaaagaatttcgccaaaacacaggccatcttttttttagagcaatattgggacatcttgggggaacgtggagcaaaccgcacgaacacgtcccgggaaactgaaacggtaggccggctcctcaactcccactaaacccaacccaacggaaaaaaaataccaacagaacccaccaaatccccacgttcctagggttaaagttaaacagatggatttggtcggtttttaccaagcgaagataaagcggttcatttatgttaaatctatccactaccccaactacatcgatcgatcaccgcattttcagcagcgagaaagctttcccatctttcccggcaaagctggcgccgcgcacgcgagccatggcgatggcggaagcggccgagggacagcggccgcggcagcggcagcgtcggcagccgcagccgcagcggcagcagcatccaagctgcggcatctgcatggagcccatgccgccctccgaggcgcaccgcggcggcggcggcggctgcgcgcacgccttctgccgcgcgtgcctcgcgggccacgtccgcgccaaggtcgagtccggcggcggcgcgggcgccgtgcgttgccccgacccgtcgtgcggcggcgcgctcgacccggagctgtgccgcggcgcgctcccgggggacgtgttccgagcggtggtgcgcggcgctctgcgaggccatgttcgccggcgcgcggcggacgtactgcccgtaccctggctgctccgagatgatggtcgccgacgccgacgacgaggggtgcgcgggcgtgacgcagtcggagtgccaggcgtgcaggcggctgttctgcgcgcggtgcggcgtgccgtggcacgccggcgtgagctgcgccgagttcgggcggctcggcgagggggagcgcgggcgggaggacctgctgctggtgcaggccgcgcggaacggcgggtggaagcgctgcccgcgctgcaggttctacgtcgagaagtcccacggctgcctccacatcacatgcaggtgcgccatctgtgatccgaggctctgtcgctggtgatcttcttctatactgccccgttcttttacgatgaagataaagattttaactcggtttctgttaacacgtttttcaaactccgagaaaaacacacgaaacagcacgttttatgtgtgaactttatatatgaaagttatctttaaagtatcaaatatgtattattttaagtttgtaataattaaaacttaattaatcatacgttaatatctttttttatgcccgtatttaatctgaatctttataagattagaacgtaggctactatctaaactaaagatccatttgttaccacggatattataagagataaagaaataagtatagatggtacgtaacaaaagtattaacgtgtggaaagtatagaaacttatatgtcaacctagagatatcattgctaattaacatcacttaaagatatatgctttagggcagtagagttacattgatgatttatttgtgattaatcacttaaagataatgtatctatgtctggattcaccaataatgccatgccaggtgcggctttgaattctgctatggatgtgggagacagtggcagctgatacatgacggctgctctgggtaacgatgccctggtggtgataatactcctcgatgatagtcaagcagaagtcgatttaattacaagcgaacatgcactgatctctcgctcgaatgacatatgccacttaatgtttttttttaatgtttgtttcgttgatcttttctgatcacttggactcaacagtgaacacaggttttcctactgcctttattttttatgggaatttccgtgatgaatccatttgtatgggagtctagaaatttcctggtggaacaattgtgtcgaagtcttactcttcctcttagatgcaccaacttttgcccattttttgggagttgattaaactgattcttatgaagtatgaacgtcatgcaaaattcaggctgaagatgaaaaacgcgtcctccaaacgaggagaaagttgatgttttgccaccctatccggtgcgcttggataagatacaaccctctacattgcaactaataaatgtcacccattttgttgtaacctctaggattttcctctgttttgggattaagcgaattttaatttctctttgctctctagttcgtcactttaccataatatcccatccggatctgatacctcactagtatcaactgatatttgttgatataagatttgatattttattgatatttgttgatataagatatgatatttgttgatataagatctgatactatatcgatagcaactgatgtacctattgataaccaatcaataccaggttgatatcctctcttccccctcgatatcttatctggtgacgatgacttgcacctcaacgacgcctctctcctctttggcgaaggcggcatgctccccgtcggcgtggaacccttctccggtaaagacccctcccttcccccacccctctctctctggagacgagctccctaatgacacgacgagctccctaatgacacaacaagctggagaagt

SEQ ID NO: 23188 - DNA, 8539 bp, Oryza sativa
gcgcgcggttcttctccgccgggtatgaggccacctccggccgcatgaacgagacggcggaggtcaggtcgccgctcgacaccgatgggcacgggacccacacggcctccatcgccgccggccgctacgtgttcccggcgtccaccctcggctacgcccggggcgtggctgccgggatggcgcccaaggcacgcctcgccgcgtacaaggtgtgctgggtgggcggctgcttcgactccgacatccttgcggctttcgatgccgccgtcgccgacggcgtcgatgtcgtgtccctcagcgtcggtggcgtcgtcgtgccgtactaccttgacgccattgccattggggcattcggggcgacggaggctgggattgttgtttcggcttcggccggcaatggcggccctggtgggctcactgtgaccaatgtggctccctggatggccaccgttggcgctgggtccatggaccgcgccttcccggccaacgtgcagctcggcaatggtcaagtgctcgacggtgtcagcgtgtacggcgggccagcgctccaatccggcaagatgtatgagcttgtatatgctggagcaagcagcggcgctgcctcgtctgcggctgacggctactcggcgtccatgtgcctcgacggctcgctcgaccccgccgcggtgcggggcaagatcgtggtgtgcgaccgcggcgtgaactcgcgcgccgccaagggcgacgtggttcaccgcgcgggcggcatcgggatggtgctcgccaacggggtgttcgacggggagggcctcgtcgccgactgccacgttctgccagccacagccgtcggcgcggccgctggcgacaagctccgtaagtacattgggtcgtcgacgcggcaggcgccggccaccggcaccatcttgttcgaaggcacccacctcggcgtgcatccggcgcctgtggtggccgcgttctccgcgcgtggccccaatccccaatccccggaaatactcaagccagacctgattgcccccggcctaaacatcctcgccgcatggcccagcggcgtcgggccggccggcatcccctccgacggccgccgcacggaattcaacatcctctcgggcacgtccatggcttgcccgcacatctccggcctcgccgcattgctcaaggcggcgcatcctacctggagccccgcggcgatcaagtcagcgctcatgaccaccgcctacatcaaggacaacagcaacggcaccatggtggacgagtccacgggcgtcgtggccgacgtgttcgacttcggcgcagggcacgttgacccgatgcgcgccatggaccctggtctcgtctaccacatcacccccgtggactacgtcaacttcctctgcaacctgaactacgccgagcagaacatccgggcggtcacgcggcgccccgcggactgccgcggcgcgcggcgcgcggggcacgccgggaacctcaactacccgtccatgtccgccacgttcgccgcggacggcaccagggcgacgatgaagacccacttcatccggacggtgaccaacgtcggcggcgggcgcgcggtgtaccgcgcgacggtgaggtcgcccgaggggtgcgcggtgaccgtgcagccgcggcagctggcgttccggcgcgacgggcagaagctgagcttcacggtgcgggtggaggccgcggcgccagccaagaagatggagcccgggagctcgcaggtgaggagcggcgcggtgacgtggagcgacgggaggcacgccgtgaacaccccggtcgtcgtgacagtgcaagcgccgctgcagtaaagacgacaaatccgacgcgatcatctcagtgttgttcagtgagtgagacattgctccttggaccataattgcattagtatctagtagtgttagtattattattattatacatatgtataagcttaagctatactgggactctagctcagggttctgtaatcttcttcttctacctccctttcagtctcctcatcttgatcatctcttcttttcttctctgaagcatatgccattattatgtggttttgcagtggtgctactactaccaccacagtaccactacaatgtgagggttttcaagaggttttatgatgtgtgtaaagaggcaaggaattaatccaatcatctgtgctatcaacacccatggtcctcacctgagctcacatggacgtgtgagactcgattgagagatttggcccaacgtgtacttgctagtgtaccacctggatcaagcttaactgccttcaattcaacctacctcatcctcctcctcctgcctcttgaattttttgggaggagatggagggaaagccaaaggcggctgcctgccgctgctgctgggaggaggagcatcagcaaagcaaggcaaaaaatcatcatcatcatacgcggcgtggcttttccgaaaggggccttgcactgtgagagcaattacgtggcatcaatggcagcgaaagggggtggcaaaagctggtgcggtccggagaccaaaaatgaagcttgtgcctgggcggaacatgctgcaagttattgctgcaatgccgtgctcgggacaaggatttacttacagaagccgtcccttgacggtgctagtggccatacagagacttttgtgtgtaagggtggtgtggtttacctgtgctggtgggtgggtgactgttttgtgttcccccatgatgctaaacaactgatgataataaccgcttttagtagtactgctgctggatattgtatcgaataatgtttgttgagttgttgacttgatttgaccacatgtaagtagtgctacgtactccctccgtccataatacgagggattccctccgtcccataatataagagattttgagtgtactccctccgccccataatataaaggattttaagtttttcttgtactgtttaaccactcgtcttattaaaaattttttgaaattattatttatttattttgaattactttattatctaaagcatttaagcacaacttttcgtttttatatttgcataatttttttaataaaataagtggtcaaacaatataaacaaaaatttaaaatcacttatattataggacagagggagtacagaccatggctagtggattaatgtactatagtactctactactaggagattgtgaccagggaggcgatttttttttaattttcttttactgttgggatcacacgcacttgtggagctgtcgtgagtggaacacagaactacagaagaaatagtgcaccgagatctttttttttttactaccagaaatttatttcaactagaaacatagaacatgttcgatcatacaggtttccgatctgaagaggtttttcagagagcttcctttgcaccgtgcaagtgtaaccacgcggcattttcttgttggttcgttttattccatccggccagctctactaaacacaaacacaagtgcttatcaaagcacaggcatgtgttagctatgcccgtgatgctcacggctcacggctctaccatgttcacttaattctaccatctgctacacgcagttacatgcaaatgcaatgcgagacaagacttgtaattcttgcattgagcctcatgagtacacactattgaaactaaccccactcgtaacacatggatgcacgcgttaccaactaactcagggaggtaacaagactttgaacatgcacgtaaacttgcacgcgaatatgtatgcacggttacatcattagtacatgatagtgatactcaaaagtcaaaacgtgcactcggcagatatatcaacatgtagctatatattgcaaagacagtaactgtggcttctatctttcaaaaagaaaaggaaagaaaagaaaagaaaagaaaaagaaatgcggcatgcgaatctctaatagtcagcactcctaatggaaaaacaactgctctgactaacttgtttctaggcttacgtcttctttgtactttaacctttttcctcactgtcatcgccggatatcgaaattcaataggccaaatttaggggaaaataagcaatcacaaacgtggtgaaaacttgaaaactaccgttggatcgagaaatgaacatccgagattcgttcacgtcatcatgagtaaaaattttactcccaacaaaattttttactcatgagtaaatctgcgagtgaaatttttaatcgtgatgatgtggaagaatttcggacgtctatttttcgattcaacggtagttttcaagtttccatcacatatacagcttccaccatatattttctccaaattcagggggaataagtccacattgactcccttaaaagtgacccgaatctaatccgtgaccctcaaccgcaaaatggataggacgactcttcgaactattgaaactagtgcaatttgactccctcagcggttttgtagggcggttttactgatgtggcgttgacgtggcaatgttgacctagtcttcatctcatgtggcgcttctgtggcatttgaattaaaaaatatacgtggacccatctgtcattcataaaaaaaaatatattgtgggacccactgacatgcgggacccacgtgtcatcccctctctctccccttcaccggtctgcaggggcgggacttgacgggcggcgacagcaggcaggcgatagtagggaggcggcggcggcgagcaaccaatagtagcgcggcggcggtcgagggactagtcggcggcgggccagagcggcaacggtcgttgcgaggtccgtgcctttccccacacatggatctcgccgaagccgaggtgacgcagatgtttccctccatctcgccgatctcctagaacggtcgggcctccacctcgggcgacgcggggaactcgtgggggtagcctttctccgagtagtattagaggtcgaagccgatggaggtgtgccagaaggcgcggccgcggtcgccgaggaggaggactcgacctgctcgacgattgagatcccggaagagacgctccactcccatgtcctagaggaggaggaatccatgaagcccccgtcctcggcctcggcagtgctcgccgccgaccggctccagatcgacgccgccgacgcatctccccgccgaccgcccagccgtcgctcgtccttgggcaggccgcttcctcccacggcgacggcgagctgcgatcagggagcggggtagggagcagcgcgagggacgtcgctgcccgccgcagccttcgcttcgtcgcccgaacgcggacggctcagccatcgctcctcggggcgcgctgccgccgatctgcatgggacacctctgggagatcggcgagatggagggcaagagagaaagagaagagaaagggggagagaaagagagaagggagagggaggaggaagaagagaaagaggatgacgtgtggatcctatatgtcagtggggccgtggcctatatgtcagtggggcctatatgtgggtcctatatttttgtaatttaatgccacgtaagcgccacgtgggataaagattaggtcaatatcaccacgtcagcaccatatcagcaaaaccaccctccaaaaccgctgagggagttaaattgcaccggtttcaatagttcgaggagtcatcttatccggttttgctgttgatcagggtcatgtattagattagggtcacttttaagacagttaaagtggacttattccaattcagggcaagagcgggaccgattgctgatttgctgtctcatagatcgacacaatctaggggcccattatgctagccctgaaaaggtttcgtgaggacatgcttaagtgcagcccaattgtctctggacagccatggctccgcgacttaaagtgcagccctagtgaagtgatcagggcggaaggtctacgtgcaggggaataagttcactttaggtccctaaattagacaccgagtttgaaattcaaatataacgggtgcctcaacttacagaaccagtatgcccaaaattccaagcaatatagtgcttgattttaactaacgtggtgagtgagacctatatggagccccatatgtcaggcctatttctctttctctattatccctagtgagagtggattttaaactcttgagagtcgagagaacgtccccacgttgcttgcatgctatttaaatagttatgaacttttttaaaaaaataataagaagactatgaatacacgttttctagctgtaatttaatttgatttttcgttgcgactgttgaacttgaatgtttgtagagtgatatatcacatattaataaacattctcagtttttttaatttttcttaactatttaagtgacacgtaaataacgagggattgtttctcctctctgtatcttccataccccatctctcatatctctctccctcgccgcccccttctcatcggccccctgccacagtcgtagccggtcggaagcaggcccctcgtggcccccgcgtgacagctgcccagcactcgtagccgtgttcctccctttgcagggaaggcatcttcttgccggcccacactactggagaaatcatctttggtcgatcggccaaatttcacaatagtcccggttttattaaaaaccgagactaaaaaacatctttagtcccggttggtcacaccaaccgggaaaaaagatcggcatacgtggagatcgaggcatgcgtgcggatcggatcgagatagctatctcctccctcctcccggttctatctcctcctcctctcctttaactcctctcctcctctcctcacttaccatatctgttcctctccttctcattctcctcccctctcctccccacttctctgcacacccctcctccccacttctatgcacgcggcggccggctgcacggagggcggcgcccggtggccggcggaaggcggcaacctgcgtggcggcgtggccgtgcggcaggtggcggcctgcgcgggcggcgggcggcgaggcggcggccggattttttttttttttgagaatttgtgatttggatctgagatgtatttgatttgtgtgtaatatgaatatgtgatgtatttgtgatgaattttgtagaacttgtgatgtaattttttaaagattttgtgatgtatttggagatgatctatttgaggatttggaggtgataatcgatttgggattttacgatttggggatgggggatggagtgaaatcaatatattaaaaacaatgaagaaaagaagaaaaataaaagagcaaccgaacctagcccggctccatttcactaaccgggactaaagatagatttttactcccaattatttcacacgggaaacaggggttatccaccgggagtaaaaaacattttgctaaattggagtaacaacaaacaaagaagcgagcttcttgctgctgctagctaaccccgtatcctaccggcgctgcagccatcgagacgaccggttgtcgccgtccaaacccaacagacaagcgctccctttctcattcattgattcatttgtcaattaattagtgcgcatgcgcgaagatgaacgatcggctgctgctaagcttggtacgtaattctgcgcgcggcgtgtccgtatgatcaggtgagagattcattcaatttattttcagagatcgatccgacaatccatcagttcccaatatactgcaggatttttattttgcaatttgcatgccatgaggcacgcatgagcttactatacctatcttatacgcagcctgaggccatgccgacgccttcggagtcgatgtagccactggggaatcggggatgcctgagccagcctcgccttcgcggccatcggcgcgagctgtgttggcacaggagtgggtcgacgcggcgatggaggtaggccgcattcgaggtcgacctcgttgatctcacgagggtaggagcagctggcagccaccgcagcgctccttcccctccagctgctagccacgcctaccacgctggctccccgccggccatcgtcgcaagaaggtgaggactgaagaatagaggaagagaggtgcagggcctcatctttccgcttatacttatccttatctgccaaaatttaaatttgcaaccttaaatttgaaacggattttaaggtttttttatcgaagtttatttttcagccttttcttttggatcgataagaacacatatataaaagttttatttgcaaattacttttcgtttgtaaatatgccgatagctcctcaagagaggataggaacttgggaagaactagtagctgactcatcttaccacatcaattaaaatagtgcataatactaccaagaaccttaggtaatcggttttgtaaattaagagactgttatatctgatatttcggtttagagatgaatcttatactgggcgataattttagggacctaaagagaactatttaatgtgcaggctagaccgccatagtagttgggtcgtgacagagttgcgacttacgtgcgggtcataaactttgggccagaagcggagatgcgacttaggaggaaaaagtacaccgaaggtccctcaacttg

SEQ ID NO: 23189 - DNA, 2854 bp, Oryza sativa
ctatcctaaatataagcatttttagctataaatctggacaactgtatattcagattcatagctaaaagttgttacattttgggatagaggtagtacactcctagttctatagtactttctctgtaaaaaaatctctattttatcaaatcattattatagaatcttaaatatgtatcgaccttaagatgccaattttttagttgataactagtagtctggtatatagttatataggtatcagttattaaatcggtacctatactattatggctatgtttagatccaaactttggatccaaactttcaactttttctatcacatcaacttgtcatacacacacaacttttcagccacatcgtaccaatttcaacccaaactttcaactttggaaggaactaaaacagcctatgcattggtactcttaaattaattccggctgagaaaacggtacctatagccgattcttaactagcaccaataaaggttcctgccgtagtgaatcataatacaactatttctcattttatctattcccaatataattattatctattttgataaactctggcataatgattactttaaaaatagatttattttaaaataaataaaaggagttaaaaataaggttgtgtttagttcacgctaaaattgaaagtttggttgaaattggaataatgtgatggaaaagttggaagttcatgtgtaggaaagttttgatgtgatggaaaagttggaagtttaaagaaatattttggaactaaacacggcgtaaatgtattattgcgtgaaggaagtactagctactactccctccgtcccacaatataagggattttgagtttttgcttgcaacatttgaccactcgtcttatttaaattttttttacaaatataaaaaatgaaaagttgtcttaaagtactgtagataataaagtaagtcacaaataaaataaataataatttcaaaaattttaaataagacgagtgttcaaacgttgcatgtaaaaactcaaaatctcttatattataggacacatggagtactagctagcatcagcagcagtcgtgaccaaattcgtaagcatcgatctctgtcaagccttgctgtttactgtacgagtgaccacacaaacgaggagaagtgggtactcgtacgtagccatagctaacagctgtggctctgactcctctatctgaagttctgaacctctctataccgcccatgcctgtacgccctgagctgggaaaacgctcgcgccgctcgtactcctacaaaaaaaaaaaagcacgtacaacaaaccctgaacccacacggccgggcggccggatgaggccgcgacacgcagagccgagccgttgcgatgcgcgcggctgtacgctgccacttgcggcatgggcgcagggcgcatggcgtgcaggtagcgggctatcggccagagccagccggcaacgcggggcgcggcgggggcctgaacgactcttcgtcctctcgtcgtcttgtgatatctgagccctcgagccccgcatgcatatggtactcctagtagtacgcgcacgcggtgacgcggacgcaggctttccccgtcatatccctgcgtcctaccgaggcagcaggcggcatccgtctggttgcgatgcgagcgcccacgagaggccgccactgtcacgccctccatccccacgtaccgcgtcggtaggctagatgccctgtatggtgtactatactcgagcgggcaaggccaacgatactagtatgcgaaatcaaccaatctaataaaataaaccgcactgatgcatggggcctacctgtcatccgattaaagcccagtaccacctgggacccacctaattagcagttcttgttccttccttggaagggactcctatgcgtgagtgacctggcgaggcaatcggacttgcaattattggccacggtcaatcgaacctatagccacgtaaaaaaggagacgtcaaacaggatgaaaacacgttagttatggatttggataattgtgtgtctaatttatagccaaaagttattatattttgggacggaggtagcacctggtaaatcatagctctattttgcttttaaatcgttgtatttttttatttgcatctatgtccattatgtgtagtatgcccctaagtattacaaacatataaggtctacctcttccctttccacatctttttctgcctctccccttctcgttcctaggcgacgccgcttctcccgtcaactctcccttcccacagtggcgccgcctctcctctctctctctctttctcttaggtagcaccaccaagaaagcgtggatcaacgcatggatggctgatggacgagccggaggaggggatcgatgtggcaaagacgaataatcgacgacagaggtagggatcaacgtgacggctgtgtggatcaacgcatcggtggcagattgacgtggcggcgatcggccaagtagcaggcccgacacccgacggtggcagatcgatgcagcgatggccgacggagcttcttgggtaggctcttctcccccgtccatcccctttccatcttcttcctcggtgcgggagccacaacggtgtagggcgaggcctctccctaatacggtacctcgccctttcctcaccgtggctctgacgaaattacgtaaccctctggcagggggtcacgcagttttgcttgggtgcggtcccatccgagctgacacgaatattcctctcaggctgtcggtgacatggaaccgggagtatcatgactagaggcttgaggcagacacaatcgcccacgtggcctggcaccctcggggggcgtcgggcccgagggtgatgcgttcgccctcc

SEQ ID NO: 23190 - DNA, 5594 bp, Oryza sativa
gagcgtgtcacgtcgcatgtaacgcagtgcagtgcactcgtttatccggtctgtgaccagtcacagaccggtcagatcgcgggttaggtggcgacaggcgatctgacgcacgcctcgccccatcccgtcaggacgagggcttctaggcgctcgtccccagctggagctagcgtgttacctcccagagatggcacgttagtcctggtcagatatatgccaggcttcatcctaaccattacaggcaagatgttgtgtgaagaagggcgaatatgcagattgataaactgacacgtggtggacaagaatgaccgatttgtgaccggtctgacactggtcatgtcgtcagcagacagccatgttcccacgtcgcgcctgcttccggcggaagtggaggtaggtatgggccgtcccatcagaaggtcattcggacggcaaccatacaagtctccgtctgtttatgaaaaggtggggtaagtccccacaaaaaagagagaaatggtgcatgtggtatccccttaagatataaaaggaggaccttgcccactgagatgggggactggacttttccagattagaaacccagaacaagggagaggctggctgatactttgtagctccttcatacacagatctcccaaaacacaggagtagggtattacgcttctcagcggcccgaacctgtatacatcgcccgtgtcttgtgtgtttcctgtctcgcgagccttccacatacagagagcttagaatctctccctgagtccccggccgaaccggcaaaggggggcctgcgcggtctcccggtgaggagccccacgctccgtcacaggcgaggtgagatcatgctccagtttggagcattggccatggccttaagggcttgtttacctcattaccaattctccccccccccaaaaaaaacacaatatgttgaaaactggactagcacatcttaagattttatttaaatgtgtgcatgcatatccctatgagcacttataaaagctggattggtatatcttaaaatttacaaattcatcgtaaacttaatgagttgagctatgctcactgtgcacctcattgccaattctaaccaactaaattttggtctttttgaacacaccaactctctaagacataggaataggaaaaatgtatgaatagaatatatgtatattttaatccatagaaattttttaagaggtttgagtggatgaaaattttcctatgttttctctctacgaattgtaggaaaggaaattttttttctttgattttcctatacctacatttctatataccaaataacactcataggaactaattctaaggaatctaagtcctttagttttcctcccaaaacgaataggcccttaagaactttaccagaaaaaaggaagggtgcttgggatgaaagagtgcgcttgggactctctttattggattgattctggtttctttccatcaaccataaaactttagatccaatatctcgtgtgtatgagcaaagggtgtggccaagaagctggcagctgaccaagccccttcaaccctacctagctatattcactgtgcgaataaaacccaaaccaagcatatctcaacactaccaaattttagtcgatttgggttgagcaataaatcaaacaagtcttaagtgcattttgtacgcattttattatggttaattcgcttgtttctctgccaccaaagaaaggcacacctcaaaagagggcagggagttcccgctttatgttaagtataaaagcgtcgagtcaacttatgagaaaaactaggtaaaaaaaaaacttacatatgtatggttaattgagcaaagaaaaaacacggagagccaaaaccaaaaatatacatgtgacggcacaactgctaagacccgacacaagttatcgttgacgagcttatcacgagacaagcagatgtaacagggttgcattggcattaattacccaaggcttgattgggcattacccaattttggtagcaatcctaacataaacaaaacgcccatagctgtaccaacattttggatggtgataagatctttcacgtcccaaaatccacataatatgactccatccgatccatcgatattattctccaacataatggctgtcgtagctgatgaccctgtcgatctatgatcaatttgaggatagcatggtgccaaactgccaactatgtatgcatacacttgacatcaatcagatctggaacttaacttgtaggggctcgatccagggccctagctatagcttgctacattaagcaatcccgttgaaaattgcacgtagtacattacaaaaaatcggacatatatgggcgtatgttgctgtcaagccagggtttctctagctagatacttttcatctgacatttgatcttcctctgcaaccgcgactagccagccaccgataactaatctacgattaattagttttctaaatggaagaagtactaattgacgacatgaaagtatgaaacaatatatatgaaatcagtaagacatggcagcatgtagcagcgcatggctttgtcgatcgatcggtttcataattcatacgcttagcaaaatactaattaagtcgaaatgggccgcctctcaaacctctaactgaaacattttataatcaccgataaacgggtttaagatgaaattaactatgtattgtaaacacaacatgttttctttaatactgcatcctttctttttataattaggattttttaggacggatgttgaagcaccaaacttgtgtgtcgtctcccatgattgtgttgatgcgtgtcgaatcaaatcctactagttgacaagcatgggcataatagtattctcgtttgacgaaattgatcaagttatctttaaccactcctagtgtcggaacttattacaatattattagtggcagacctcaagcattttactattagaaggatgagcctgggaggttagagaagaatctaaaagtgcattgttagatgtgtctgtaacaaatcattagtaccaaaagatagatatgcagctaaatatagttaagctagctaggtgaagaagagaaggatacaatatatatacaattaaggccacaaagcaaggcaaatatgatgatgtccttttgttgcttcctctggccactcttgtggttggttcccttaattcttgcaatgggggattactgcatgattagctgattgccttttccattaattaatcaaactgcactggtgcatgcatgtaaggtggcacgttgtattttattttgtgctttggcctgccggctcactactgaattcaattgggtgtcccctctaaaataaaaggaggattgcattggggtgtctcgcactcgcaagtcatcaaagtagagcggttggtccttgaaaagaatacgaaatctatttggactttggactttagaagttaaggcaactaccattacattcagactgggacttttgggacagctgggatgctaaagcgatccctcatccatcgccgtacgtgcctgcaaattaaactccttttgccgtgtacaaaaatgtgtttagcataaactcgtacaatataattaaccagaggccaaaaagattatgtttttgtgtgcagagagcaggacagagtgttgattagcagctggaggacgtgcattactcaaatctgaaaacctcaatttgggttcagtttgttgcgtagctagctttgactgatgactctggacggcagctgatacgtggcatgcaattagctccatcattttggcgctaatttagcgaaatggacgcgtcagtgacagattatatcgtagcgcaacgcaatgacggcaccaaactaaagaaaaatttttcagagcaatttcggcgtgatattgatatgtggtgtgcaataaaggcaggaacagtatgagctcttgtaattgcctgcatacttgtttctgaattgtcactgttgcaatgtacaggtatcatggaaatgtcacgtcagtgcatgctggttgattgtttaaatcaagtcctaatccaatcaggataccaaacagttacactattcagtaccaaatctgcatagaaaacggaaattttcacaggatccatgcagatgcagggcggcgtcgcactcttgcatggaattcatgtgtttcagacatgacattatacctgtcaggattaaattggagagagcacattggttaatttcatgttgctcacttaatgcagtagtacctaattgatttagcacttgccaattggagtataattagcgaggaatcatcaaaatcataatgctaatactgtcgaacacaatcttgcgccacaagggcagatatctccgagcgattcccatgctatcctcgcttcgttctgcatcagctacagtacaagcgagaacgcatccggatcaaatctcctagctccggcggatcaaacagtgaacacttaccaacaaaaagaagcgatttgattaatggaaacctaagtagcagagcatcatatatctagatgaattaacaagagcaggggcggaattagccatggatggggaccctgtcccaacttccaggcacatgtctgtcactttcagcaatcttaatttcgtatttgctgatctatctatctatcagaaatggaatatagatttattatatatttttcttggaattttttggagacctggctgctctgtttgtgtgtctggtacgcacacgatgcaatatagaattgactaaagacgtcctgaatagttgatattcacgtttttcgctttggtagtttgatgtagacttttgtctgcatctgcagaagccacaattcaacttgaaagtgttgcgccgcatgcagctatattaagtttttcatatatattttttaattattgtcctcaatgtgtcgtcgatcagaaccactcgttagaaactacaaacactgtttatagattctttacggtttttatttttttcgtagagtgtagtttattgattggaactactattattatatactccattcagtattaaaaacatactactactgttttagatattcacaatattttaaaacaaatttaaacagtagtatatgcatattgcagcatatttataaaaggtgtacttctacaatgctctctactcgtggcataaacgatttaacacaactatctgtatataccaactgtggaaatgatctatgagaaaaggaaaatgagaagattgagaagatacgcaaaaaagataatggaaatgacaagattgagaagatacgtaaaaaaatgagccattagcgtatgattaattgactattaattatttaaaacttgataaatgaattgatatgattttttaaatgcaacttttctatataatatttttaaaggaaaaagtatgaattatccccccgaactatcacggtcgatcgaattacccccctgaaccacaaaaccagacatccttcacccgaactatgcaaactggacaaataacccatctagctcaatccacggtggttttggtactacatggtagtccagttagcaatttcttttttaaaaaaatcaacaggccccacatgttagtttcaccctctac

SEQ ID NO: 23191 - DNA, 4940 bp, Oryza sativa
gcgggctaattcgatcgactgtgatagttcagaggggtaaatcgtattttatcctttaaaaaataatgtttaacagttcaggaagcatgtactcataaaaacgagacaaatcttctccctttaattccatcctaaacaaacgttatcattgatttatgatttatgcgatgggtagaaaaactatttaaaaaagttctatggtttgcctttggcatgtgatccattacaagaatcgtcatctattaatgtggattcaacgaaatgccatcgaacacgtgcttctcttctctttcttttccatcattgtctagattcattaacatcaatatggatgtggaaaatgctaaaatgacttacattgtgaaacgaagggagtatattttacgagacaatcatggcttacataccctttccattctaaaatattttagcctaggacacgaattaatcctaggatatgtttcatttgatcttaagtaggactttcctgatcctctacatattcccaaaacagaggaatggaattacccctacttaagcttccaaacagggcattgactggtccagcaattccatgacgtttcattgtaccacccctccatttggatgtaggcacacagctaagctgcaagcctacatatagcatgtccaactcagtcataatttgttgcgttgctatgacgaccgcgacgaacttgcctcgatcagctgttctgctcatctgcatttctgcatacaggcacgcagccagttgtttatttgcagaaattcaggtttttggattatttccagtgcacgcatggaagtatagcaattaggccaagcaccagccaagatttgcatgagcctggccagtctgttgcacagttgcagactgcatgaggatatgcacaccagctgttccttgttttggtgcaccaattcttacagtcaaaactcaccaaaatttaagcagggagaagtcttcagaaagaaatactgtactacaacaaagctgtaagcacacaaattggaacagttagcaagtaccactccctctgtttttaaacacctggttatgctattactttattatcatgccgcacatttcagaaatttattaatttttcaacatttacaaatttattagcagctgaaataatgccaatggttgtcactgcgtgacttgtgagactaagggcatgttttgcacaactttagctccaattctagatttccttagctggagcctaactaaataattttagctccacataaaacatgaacagagttgggtggaacgctcctacaaaataaactagagagttcacagctccactctacccaactcctgaaactaaatttataaattggagctctacaaggacctaaaattaagggtgccaactattagagaatgttttcgcgaacgcaactagtattgaatgtaacaatctcgacgatgtttggatgaactagctgctctaaatttagaacttgaagctctaccaaggctcaaaattacaactgctgtagccgtgcgacaaccaggtcagccgaactccgccctcatttctcaagcagtacggatcatacctgaaatttaaatatataaaataaattcaaaaaacggagaattcgctacttgacagttcacccttcgctgtaacaccgtgagtttactgcaaccatattaccaggagccagccttgcaaacgcaagagaaaagagagagagaaaaaaaaaacaaattcagctctattcacctccgaacaaaacgctacagttgcctctccactgttgctcgctcagcgccaaactaatctccccggttataccgctcgccgacatgtgggccccacacccctcccccccttcttctcttctccctccccccatatatagcgagccagccttcctctccaccttcccaatcataatcatcatcgcctactccctctctctctctaaaacctcgctgtctttctctatctagcgggtcgcggtgagtcgtcgtcgtcgtcgccggcgatggggaagggaggcgggctgagcaagctgaggtgcatgatcaggaggtggcactcgtcgagccgcatcgcgcgggcgccgccgtcggcgggggagctggaggagggctcttttgcggcggcggggagggcggcgtcgttccacggcgcggacgaggtgcccaaggggctccacccggtgtacgtcggcaagtcgcggcggcggtacctcatcgccgaggagctcgtcggccacccgctgttccagaacctcgtcgaccgcaccggcggcggcggcggcggcggcgccgcgaccgtcgtcggctgcgaggtcgtgctgttcgagcacctgctctggatgctggagaacgccgacccgcagccggagtccctcgacgagctcgtcgagtactacgcctgctgagaaaggccgccgcgccgcgccgcgcggcttacctccccccaccaccaccggccgtgacggcggcggcgacgcgccggagttggaagcttccagaagctgcggtaaaatctttcgaaaaaaaaaatctgtgttttggtaggggtagaagtgaaatttcggacgccggggtcgaagtgaagagtacgaagcggcagctagcgttttttttttacttaaccccggcgtcggtgctaattggggaatttaccatttgttactgtgctgttaattctctgatcgttcatgtattagctattgggtttctcattatttctttattttgccccaaaataagatctatgggcaaacatgcccatcggtccaatgtacattccagtgtaaaaaattatcatgtaattgccgagttaatttgtcaccttctgctacattgtgcttaatagaaggctttcattatagggttgagattttttttagataatggaaacgggtaatatctccgtcctttgcccatatgcacatagccataggattgagaatgttctctttttgttcaatataatctgccctgtttcggtgctgatatgccatcacaaggtgataagagtttacgatttgtggcatgttgtcctatactaccttcatgtaatttctcactgagtaggaaatcttaaagtacttggatttcacgtggcaaatgattaatattaatttttttttgaccgtattgcttaacaaaagaatttcaaggatatcaatcaagggcctattcactttgatatcattttcaaccttaccaaattttgataaaattttcaaaaaaaaaagtggctatatttagtttgctaccaaattttaataactatataagaaatcctgctaaaattttgataagttatcaaaattttgacaatattttttttagcatcaaagtgaacatgtctcaagtattggtccatacatatcttgtaaagcaggcatgttatgtattctactctttccttatttcccttataaaatcatatatagaattccacttctacaggtgtagttgagaactgacctatacattgccgaggtgatttatcagatattaccttatttgtcgtcttttcacgtaacataactattcatcttatttaaaatattagtataaatatataaaaatataagttagtattgtaatttctttgatgataaaataactcataagaaagtaaataatatttatattttcaaataaaatgaatgattaaatattatttaaaaagtccatatggtcatacatgtttattggagggaccatttggatgacggccacctatacgagtgtatgccattctgtagattcatgatagtaatcttgtttattctaacttgatactactatcttatataccaggataaatctcctaaataaaaaaaagaggtccttgtatgctgcgtgctggtcatcgtaagattgggttgaattggaacaaaaatgcaagtgacctgatttaggacctctttaaatcaaagaatttatggagaaatttcctatttgtccctttgaatcaagggttaattggatcaatgccactacaaatatgtcaaattagaaaaatgtcactgctattcacgatattggttgggtaccactgcaattttaagaaattggagcgatgccactccgtcgcgttttctatccactccccgttaatgtagtcaattagtgttatattataatcctctgatttttccaattccttaatttttatcgttcttatgattcaaaggggcgttaaccaaagagagtgaagacactatacgcactatatatccaagtgagatctagcgcagttgttattgtgactgcacaataataactactattcgttccgcggttcaaggtcattgctacagtaacatctgaacatcactcaaggttacagtgtttttgctagctacagtagccaaacgcgtcttcacccttcgtgtcagatcctatgacgtgctactatacagtagccaaacgcatctgcgcccttcgttttagatcctatgatgcacgtttgtctgcttaatttgcagttacagatactaccaacgaatcaccaagttcacaggaactggatccggcactatcacgctcttggtttctccaatgaccacaatggtacttgtgcacgtaagaatctgattgactaaagataccatgaatcgctggtacatgacattttgatgttgacctgcgtctacgaagaaatttgtcattttttccctgcgtctacaaagaaatttaagtttacttttttgtgctgtgtaaatattagggatacgtccattttacaaccatcccataatataagacacgcacgcttttaagatttaacttttaaaatatttgatcaacaatttatacagtaggaattaaattttatttgatacaaataatatcattggattgaaatttaaatttactttcatatgattatttttttcaacaagctttatagtatatgtgaaattataagctaaatagtattatt

SEQ ID NO: 23192 - DNA, 14147 bp, Oryza sativa
  unsure (1)..(14147): unsure at all n locations
tgggtataaatacaagcccccctaggaggagaggggacaggaaacaatagatcaacatacaagccaacatacgccaagacaagctgccggatatcgacatcggagataagcctagttagtccccatacggttcctacgaccaccgtcaggagggatctagcgttgtctctgatctaaccggacacggattcgaggaggaagactactctgttgtcgactacgggatgggtttatgaccgccaagtcgacaacagatagataggttaccccaaatattgtactggtgtgattatgatgaataagagcaacaccggcttcggccaacaggatgtagggctattacctgtaataaggggcccgaacctgtataaaaatcctcatccccatctcttttacctcaatctcgcatatatcctagtaccaactgtcagggttatggataccacatacctaatagtagttgactaaatctcgacaggacccaccacttaccatgtcctatacgaaaacaaactgcagatataggaggagttccagataaggaaagacaacagagttctacatggaaacaacaagtactactcggattgtatccatattggtttccctagttctacttggacaaggggacacctatgagtataaatacaaggccttctacgagataggggagacagacaatcaatacccaccatagaagacacgaacaatagatcaagacagaagatcaacatacaagccaacatacgtcaagacaagatgccagatattgactttagagataggcacggctagtcccctacggtgtcccggatactatcaggagagacgaaagcgctatctctgatctcgccgggtacgaactcgaggaggaagactactctgttgtcgactacgagtcagacctttagaccgccatgtcgacaacagttagataggctaccccaaatattgtactggtgtgattatggtgaataagagcaataccggcttcggccaacaggatgtagggttattacctaacaattcaggggcccgaacctgtataaaaatcctcgtctctgtctcttttacctcagtctcgcgtatatcctagtaccaacgatccccatactatgcaaataccggaatcgcgacatcaaacgtcgacaccaacgatccccatactatgcaaataccgtagtcgtgacatcaaacgtcgacaaaaatgataaaaagatatgaaacaaaatggaaataattttgttatttttactgtccatttcctttggtttgccgagtttttaattattttggaaattactttttcacagtgtgataaattgtcgtatttataaatacccctagtaggctagtacatgcggctcatgtctccatttctgatactaatttttccatcttactacttttattatgtttcaaagaaaaagtatgatcaaggaaatggttcagcttgttgtacatgttccgaccgattcatccctaatacatttactcctatatgtgaaaacactctctttttttcaaatgttttggaagaccttttttttttttgcaaatttcaatgcgtttttttaaattatacagtacaacacaaacactcacaacgcacatacactcaccctctataaacgcacgtacgcaaaccctacccctatgagtactctttgaagattggaccggcaaatcatggggattaacgaagtcaccacagacgtctcgctgtcgatgggtacgttgtctaccaccgaaagaacaataccgctaaatcctaaaaaattaactttcatggagagtcgaacccagaaattaaggtgctactgaggctattataaccaccaaattacgtgtcctttcgtacgtactattttttaatatcgggcagcacggtgggacatgagattctctcctacctacgccaacttctcgccaaaataaaactgacgacacacaccagcgtagacagttgattagttgacccacattaattactgtgcgaagctggcgtccgcacaagagtcccacactcccatgcgcagccgacaagaggtactccctccgtctccgtttcaggttaacgttttaactttgatcaaagttaaattattttaaatttaattaaatttatagaagaaatagtaacatttaattattaacttgatgacactaatttagtaaatattactatatttatatataaactcagttaaatttaaaatagtttgactttgatcaaagtcaaaacgtcttataagctaaaaggaggaagtagtatatattggtattgctcttcgcttactgctatttatgaaattatcaggttttaacgttaccgaaatttggtagaggtaactaaccaaacataactttatcattgctatcgtatcaaatcaaacaaacattgataattccgaaagttctctaaaaaaaactctattaaattttagtaaggcttcaaaccaatcaaaaccaacgctaacaaattttggtaagattgattttaacagtaaagtgaacaagctctactagtactttcttctcaattcacccctccaacaaatgcctaattatatgggcacagtctgtttcttcctcaatctactcccctagccgattcctaattatataggtctggcctgtcgtaaaacagggatacaaatatcttactagcatgagtaataatgcagtgcccgtgcgttaaggatgttcgtgcatggccgccgacagacgctgaggcagaggagtggaaaaacacactggctgatggactcaaatgagtgctagagatgcaggtgctgcaacagggaagccgtagaacaagtgcagcagccaagaaagttctcagccagctctgcagttcatgatggggaaggagggaggcccatccatcgatctagcttgtactactaaggccctgtttatattttaactttttttcttcagatttttaacttttctatcacattaaacttttctaacacacacaaacttctcacttttctgtcacattattccaatttcttcaaacttctaattttggcgcggaactaaacatagcttaactctgtgtatgtatgttagctgaaactgcaaagtgtgtgcaagctcatttcgaagctgcctgcatgctatcttcttttctttatttttgttaactaaagacttatctgcttataatcatcacccattgcaatgataaatcaaccaaagcagcgagcatgcactccaactaattaacaattgcttgaccggtcctatactcctattctcatatggaccacggccaaccaatgactagctccattgatcctcatgttaggggacacaagattaatatatctatctaagctagctaagaacacatttcatttcagtgagttcaatattgacaacttggattgcctcttaaaggatggcacgcacgatcggagacggctttgctctggccatcatatcccggcgattaaacaaatcaagtttttttttatatgttcagaactttaaacaaatcaagtggtgctatctagctaagctaggacaaacgaaggctctcatggtctcatcctgtttcagtgtagtagcttgctaaccgaaatggaggttttgaatttggttaaattaggttcgaagtcggttgattaagtatgattttggagcataatttgacggtgatgtttgatcatcttcctggaggagaatattttgatgatcgattcggttttacattggctgccggctggccgatcgagttagctggccgctgcctggtgatagtaggtggactgtcttaagtacatgcatgatagctaacacatatccaaccaatccaaaattttggtttgagatctcttaagcttaggtgaacacaaacaatcgtccatgcaatcttatttggaatctactgtgcactgaagtccttttccatcaaaaatcaacgtctagatctcaaaggattttgtagtacagtgtatacaatactgacctgtacaattgtactactatccagtggctctggacatgaaccagctttaagattcgtgcgatgcagagtacgcttgtactagtacattcaaaggaggaaaacgatgtacattggcggctaataactggcactggcctagtcaatatcgtatctgtgcgtacgattaacacctgtaagcaattagagcaagctatagtgagtgcccctgttttgattctttcgtcttttcagcaagcacaatatatcctttgctggaatgcaacaggagcattaaatcgtaagtgatttaattaatttgatcgtgtacaaatcttggaattaatagggatccgtttggggccgtgacacactctagctgtacggttaattaccatgtgtagactcagcttatagcaaggtcgatcgatagtacacctagagtatagccaaaccattgaaccacactacagctataaaaattttcggcaaaatttaccacatgacacgcaaaaaacgtgtaattggctagaagacaccgcaaaaacgtgacacggctgatggacactataaaaaaacgtgttaattggccgtaggacaccggtcttgttattttattatttctgggtcaaaagtggtgataaaattttcaaaatagcgagattgcccctggcgccatcttcccccacctgaaatcacaaaagttttgttgttgacggcgaggtagctggcgtggaggtggcagacagcacggaggtggacgtggtcggggagggatgggaggtggagcagcacgatccctagcagttggaggagcatgagatcctggcacggtggcgaaggctgctgcgctgtcgccatcctcctcctcatcgttggcggcggtgtggagcggcagacggcgcggatgcggacgtggtcagggagggatgagaggtggaggagcacgagccctcgcagatccgccaagaaatcctgccacggcagtgaaggctgttgcgccgccgccatcctcctcattgtcgccagtgccggcggcggcggcatggagcggcagatggcgcggatacagacgtggtcggggagggacgggaggtggaggagcacaagccctcgcagatccgccgagagatcctgccacagcggcgaaggctactgcgccgccgccaccctcctcgtcgtcgtcggtgccgccggcggcggtgtggagtgcgaggaggaggtggctgccaatgtcgtcatcgtcggtgccggcggcggtggcgtggagtgcgaggaggaggtggccgccagtgtcgtcatcgtcggtgccggtggcggtggtgtggagtgcgaggaggaggtggccgccagtgtcgccccaccgtgcctccgaggccaccatgctgttcccggcgaagtcaatgggaaggagaaaagaaggaaagagaaggagaaaaagaaggaaagaaggggcaatccgggtatttagaaaaatatatcatctcttttgactcggaaataataaaataatacgactagtgtcctatggtcaattaaacgtttttttgtagtgtccattagccgtttcactttttgtggtatctcccagcaaattacacttttttgcgtaccctatggcaaatttaccaaaattttcatatcatctttagcccatttaattgctcacttatataatatttaactatagatacatgctatgttattaatactttaactatctcgttctcccacaaagttaattggttttgaggttatggttcaactgacccgtttctcttctctctcctcctcgcccaattctattttagcataaatttattgtggcaagtcctgtagcctacttacttgcttgtaggccactcccattgaagtgagagatacaacgaatttcatctaaacgaaagtatgtctacaccgtttctaatacagtttgtctcttgcatgtataatgtattcactgctaaatacaagttcttcttttggtttgcatttcagcaacgctgctggactgttgatcttcttcagaagcggggtatcgataaccactctgcttgcctcttttgcgcttaggagcttgagacggcgaaccacatccttcttgactatgtgttcactcatcaggtctatctccgtgtgctatcacctcctggctgagatgccctctcttccccgtgacagctggctatagaactggtggccatcctccaggtcctgtttacttgaacacttccgcatcggcttcgactccttggtactcctggtctcttggctgtggaaggaacgaaactccaggattttcgactccgcgcttgcttcgatctctgtggttatggagtccatccgctcagagggccagctttggtctttagctagcattgccgcttttagggattttctgggagtgtagcgtggttctgccccttcccacacttcggagttgcatttttagccgtcgtagtactttcctagctttggtttttgttttgttttttttcttcccttggtataggccggtctgtccgattacgttgtgtaatagaactcttttctttctactatattgacgtacgatcattttacgcgtttgaaaagaaaatattacctactatgaaataacaaaaatgaaactatgcattgcatgtgttatttcaatcattaattaattaattaaatgttttgttgcttatatggtaccgttgaaaacataaaaatgacatctactgggaatggtattacgctcttaatttggttcagatcttgaaccgaccagctaaaattaacctaattagttattagggcatcggacgcgcttttttttttttgtaataatatgctcactgttagcttgtacactgtaccagtactacaacaaacctatgattgtaataagtctatttaaagcaccacaagacaaaaaaaatattactattgctaagttttcgtacgacaaggggacggagaagacaagctaatatgccattagctatgtagcttgaagagctgttgcagtctgctaggacatgcttaatcggaacacaagaacttgatcggtacatcgtgtgctagttgtgtttgtaaaagcaatgaaaacaacacgggttaagcggttattgatgggtgcaaaccggtaaaatatgacagaatttgtgagataaacgcaataaccaggaggttgttggtgattagtcgaggattggtatatatttgaagcctgattggttttgctaatcctagctgctagtattatgcatagttgttctctctaaatattttaggaaaaattacgacttaccttgctaaactattacgacattatgaattatcccttaaccataaaaccggacatttaaatccctaaactatctataatggatgaataaccccctcgacctaatccggagctgttttgtcataagtgatgtacgcaaccaacaattttctttaaaaaaaattggtgagacccacttgtcagactctctctcctctctctctatcccctcttcccctctctctcaagggcgttgtcgggagtgtcaaccaagtcgccgacgatgggcagtcgtgaaggtgcgcagagcaaacggtggaggcggcggcctagaatggcggcgcagggagcagtgtggtggtggtggagattggtccatggcggcgaggtggagaggatccggtggctggtgacggaggcgggggtcgatggcaccattgacgaggagctcacgtgatcccaggtggagagcagaggatggtgtcggcagagggcaggcctgccctccacctgggcaccggaaggatggcgctgcnaatggcggcgacggcttgggcgagggaggccgacaacagaggacccggatgagggcacaacagtggtctcctggccaccacccgcctctctgccacgcccaccgctcgctgcaccaccgccacacccgtagtggcccagcagccaccgccctcgagaaaaaggggaagaggggaaatagagagaggagagaaagtctgacaggtgagccccatcatttttttaaaataaaaatgctggttggattgctacatgtatgtcacgtagaacaaaaccaaccggattgggttgaggcgggttattcatccggtatagacagtttagggtttaaaatatccagttttgtggtttagagggataattcgtactgttacaatagttcagctgggtaattcgtacttttttcaatattttactacttatgttcccaaaaaggataatatccaacctcaaaattttagatcattaagagattaaacggtattaggatttaataggtcaaaaatgcattaatagatttgtcatgaaacatggtttcagatggttatattgacgaaaacaacacgggttccgcggttattgatcggtgcaaacaggtaaaattgaacaaaatgtttgagataaacgcaataactaggaggttggtgatgattggacaaaattttatcttgatcgatcctttagtttgtatctaaaacagaggatgaaaattaataaaaggtgccctacaccaaggtcgaatgtttacgattccgatcaattttcatgaaaaccgctaggttctgatttacgaaagccgagcagttttacctggtttttgaaattaaccgaaaaagagaaatgctatagaacaatatctcgttgggacaggatgatacctcactcgtattatcttatacctagtaggtggctgatatatcccgttcggacgggatgatacctatcacttgatacctgatagttatcggttgataccgagatattatatgatacctcatacctagaaggtaccattccgtccgaacggaataccgtccaatagtattggagtaccgaaaaattatcatcggtttctactagtttccaccggttttggataaacaaccggcgggccggtttttggatcgaaaccggtgatgtgaaccctgccctacacgaaacaatgggctccttatccctggccataataatgctcgctgctgttcgacataaatagtgtgggtgatggcaaaatatccatcgacccgtccgtgcgagccgagctgccgaggtacgtacagttggcgtaatgatctcgttgcccactcacaacttggaaggagctcctgttctccatgatgatgatgtttaagttagttgctcgttcagttcactcctccatactcaattctcatgtactcctatcgcttcaagcataagctgcatgacaacggagggcctacagccgcgtaggccacaaaatgcaggccctcccgttcttagggcccgtttagttccaaaaagttttttctcaaaacatcacatcgaatttttagacacatgcatagagtattaaatataaataaataaaaagaaaaactaattacacagttatgggggaaatagcgagacgaatcttttaagcctaattagtccgtgattagccataagttctacagtaacccacatgtgctaatgacggcttaattagactcaaaagattcgtctcgcggtttcccggcgagttctgaaattagttttttcattcgtgtccgaaaactccttccgacatccggttaaacgtccgatgtgacacccaaaaattttcttttctccaactaaacacgcccttaattccttcccgaaagtagctgcagtgttcactcctcttacgggcccaaccatcctgacaaactgccggccttcggcgacacgctattgttagcttttttttttttaagaaacacagtaccaacgcacgcgcttataacgcgcgcatactcactcctatgaaggctcacacgcacaacttatctctatgagcacctttgaaagactgggtcgacatatttgaaattgacgaagtcaccgtaggtgcctcgttgtcgatggaccactgaaagaataattagttataaatacgagcaccggtaccaaatctagaatttaaacccgaacgagctggttccaccataataaatctaaccaattgaattgaattatgctcattttcgtgtgaacttgtttagtatcgaacccagtggcggatctgttattggacgacaggggcacatttaaagggctcagtttgagttagggtttacaatttcgaaattggatttttttgccgggtggaccgaaatttcggaaattccaaatttttttggacgaaattatttgaaattttgactgattttgaatgaatttaaataaaagctgaccaaattcacaaaaaattgcaaaaccctgaaaatttcgggtgagatgtgagcttgctggtgggggacgaaattaccgaaatttcagaaatttagaaacgaaaccctggtttgagtatgacacgaatcaactaggtaaaaaaatgagtaataatccagaacctttaatttgcatgttgaaagaaatgaaagaaatttgcgtggggccaacgtggaagcttatttaccctataattcaccaactgtgtcttatatcctcattcctcattgatcggtcaggatcacccaaatcaaatccaacggcccacgttactcccaccttccccatactctctctctctctccgcaaactctgccccatacagatcgcctcacgcacaatcgcgcaatctccgctcccgctctcgcatcgctccctctctgcgccatcgctagcgctagccgtcgcctcaactcgccgccgccgccaatcgatcatcgccatcgctccctctttcccatcgctagcgcagccgtcgcctcaactcgccgccgccgccaacgacgaccaacgacgtccacgtcgtcgatctcctccgcacctccgccggaactccctcaccgatctgctccccccgcaccgatttctcccgtccgcatcgccaccgacggtcgcctttgccgatctactccgcgcccctgcctggacacccacgcgaccatgcccaaggtgtcataggccgattccgaacaggtacaatatccattcaataaatttgtgctcacaagaatttgactacgttaagatctgaattcctgcttttttgagttctaaattttgtaatgcagataaaatagtgttacagagaatttggtaatgcagataaaataatgttacagagcccttcttttacaactggaccccctccatccctttgtgtcatcaaatgggttatttgtatactacaaattctgggaatcaattgagttccgttgtactattgcaactggtaataggattttattaccgtactccattttactacaagttgcaaaataggacggtgatacaggtaatcaaattgaagcgacaaatctatagttttccctcgtatatcctattttgtacaatgacaaagtatttgtccgaaaattctttttcacctttgtttatttgagattgacctcgggatataatttgtctcctatgtttcagcagtaattcactaggtttatcccttgatgaacacaatttctatatattatgaatatcgggaggggttttgattttggaccagacatttcgagttgcttgctcctttgaagaatcatgctacaaggcctggtaatcaggagttccaaaaaacatactcgaactggcttttttaaaaaacttgttttaagatcacttatgaacttagtataatactcactttcaagtttatgtgaggccttgtcaatacgtatatctaaagtctgaacatgctagaaaatataattattgcattcttttcttattatatgtttgtttttaagctacagtgaaagtattgactgttgtatacttgtgtgaactaatctatattaacagtttatattggccatgtagttacagagtgctaggctatggcagcggcatggcaaatacctggctgcatcttcactggcttttttcgctcggcaaatgtatttctgatttttccaagtcgtagttttttccatacatagaagtaaactgtgctcccaatgttttctgtctcatttattgctttcaaaacagaaatgaggccaattgtagaaaatgtattgtgctggaagttgtggctaggaaaaatggctgctgggctaattgtactgagttacctattaatgttagttggataaaccaattagtacttcttttatcaaaaaatgatgtttttaatttatgtatagtagtaactctgatcatgtttttttatgtcatcatgatcaatgaatattttcatttgttgaggttagccttgtaggtttatacccatttttcatgattacatatccatatgccatgtttggtgttgataattcaccagttccttatatagttttacatgaaaatctttaggaaggtcggaaacaacagtgcaagcatgacttcctatcgattgttgtgcaacgttgatgatgttttgtagctcatgatgtgatttatggctgattagtacttttgctgctacatattttgtcaaaatacatgccattagattggtgtccagtgaatttattaggttgtgtgaccagtgcagataaatttgaagtgtgtactcttttctaaagtgaacagcgcatgttgcagccttcagtgatccaaacatctaaatcagtgagtttcagctgtctcttttacttctgagcatgatgaagggctttaattatattaccctcttattatccagatatagtaatatgatatgtctaagccatctatcttccttctttgtatgaagggcatgcggtacattcatgtgttcttgaaaaagtgtaaacatatcaattctgaaatttcagggaaacctccatagatttgattttggtcagtttgtaaatagcggtaatgctcaatctctgatttagactttagaacaggaactatttcctaatcaataatgctcaactccctacgtacatctaatattttactttacaaggctcaactattttttctgttttatgggaagacgaaataccctggtacggttttaaattagacatgtaattttacactgaacatctctgctctaccaacatagttaaaattttgtcaaattactttcacctcactgcaaaagtggaggaaaaggctacaagacatgtgtggcctaccagtagaagcagtaccaaaaaggccattgagttgaaggtattataaatttttcagtcttcttcacatcaattatccgaatggcattatttcatagatcatgatatatggtatgagattaggagcagaagttgactctggtgatgcagcagctactgggtcccaacggggatgcttaacaattgaatatcttataatgaatcatgtaatttttaatgtctgcagttttacaagaacctctctaacaccttaaaggatgttgtttagaaatcagacaatcctcaaagtcaaccttcctagagtaacttgggagaatagggatgggtgaactaccatcttattcttttgaatcaatgttcctgtttttagaggctagaaaaggagaaaggatgtttattgcacttgtaactagatgtgaatggccctgtaaactatgtttggtctccactattgttgtatgtgctcttatttataagagaatccttatccttgtgacagctcaagcgaagttgatcatgcaatgggttttatgtatcatgaagttttgtattaaattagtatattgtgagcaacaagtatgatttgttggccactatgaaattgtttgattctcaacattaatctatttttctatctatcaccgttgtgttatgaaaaatcgccgtagcgttagcaggggaatattactagttagacaaggtcgtccccaacgtggagggctggaaagcgcaggcccatcacccatcaagcaggaagcagctgaacaaacttggagcataattgagggatgtcaggtgaacatattccacaaatctttggagaaaatagcaaattcaaagcccgttaggaaacagcctgtttgtagcccaatttaatactacaaattgctatacaatgtaggaataagttcaccagagttccctcaacttagctgcaagattttttgaggtcccttaaccacaaaaccagaaatgtgtacccctgaacttatacaaccgtacacataaggttgtatggcagtatatatgggtggtttcgctgatgtagcatcctagtcagcaaaataatttaaaaaggtacgtgaggcccacatatcatctgcacatactccctccgtttaaaattgtt

SEQ ID NO: 23193 - DNA, 27045 bp, Oryza sativa
  unsure (1)..(27045): unsure at all n locations
cccgcggccttagctagcaaaccagcgtgctcctcctctcctccacacacaatccgatcggtagccgcgggctcgttgttgcgatggccggcaagaacgggagcctctacgcggtgctcggcgtcgccagcgactgctccgacgccgacctgcgcaccgcctaccgcaagctcgccatggtacggtgctgattcctctgctttgctctgttttttttttttttgccgatttaaccgtctcccagtggctgtttgtctccgggcagaaatggcacccggacaagtgcggcgccgccgggagctcagccggcggcggtgcagaggcggccaaggtgaggttccagaagatccagggagcctacgccggtaattaaatctcagccaccttcttcgtcttcctctgcttctgaccagtgctcagagcacaagctgccattgatttcggacgctgagatttttttttagcttctcgttgatcggtcttcgctgctgttacggtctgtccgttcccgttgtttcaccattctgacagcgacgtggttttaactgaacagtgctctccgatcccaacaagaggatcctctatgacgtcggagcctacgacagcgacggcgatgatgatgtaacagcattttccggccttttttatctctttttttttgcaccaatcaatgataaagatattttgtggccggcttgtgtgctgacttggtcgtgccaattcacgtgcagggcgccggtgaaattctcggcgacattctcgaggccatgaacaaaaccggccctacggtaacaaacctatctgaattcgaatttcgacgtgaactttaaaaattcgatgtaaattcacaccctgttcatgcatgttggtgtggtgaacgcgtgcgcaggagaatggcaagaacgagagcttcgaagacctgcagaggcagttcgaggagctgttcctccggccgccggcgccggcgccgccgacgtcgtcgtcgttccggtcggcggtacgtgactgtcgtgtcgtacaccactgattcctctgactgatacgacgagacacagcagttacctagctgtatgtcctttctgattagtgactaaacaggccatctttttcttcagaaattaactttcccattttttttagagtgtgcgtcgctttctctgacaactgtttgcacacaagcatgtcgggagaagagcacgagctgtcgttttatacggcatgcaaattacagtaatggttaggtgcattgcatcctcttgcctgcccaagcttagagaagattatccataaacagtttggtcgcttaattaattataagcacagaataggttttcttgcgctacatggacactgattacgtacacaagatttaataacccttgactaactctgtatttctatctgtgcctgataatctgcagcaagaggacgctgggaagtcttcaaagagaagggccggaagaacgtagaagtacgtacttttggccgaagatttttgtactgcaacatttttgaatctatttcgtacgtgcagtgctcaagacgaccgtcatttgtgctaataattaagctgattgatcaagaagaaaacgattcagataatgatatgacgcactgatgatctagggcagtaacctgtaatctcaataacacctttggcagacgtcattcggtttgcatgtatgcgggtggctattaatttgcctagctagaaattggccaatttaaagtttggccacacgtcaattcttatatgaatatgtgcaatattgtcaaatctgggtacttctccctgatgaattaaatgaagaaaaatgagggctaatgatcaacagattatccagattcatacccaaaatttattatattttgggatcggtggaggcagtattattgattggaatgttcagttgtccatccatgtgcagtataagaaatattgaggtgggggcagtaaaagattattttaaatttccatgcaattttgcatagaacaaaaaaaaaagaattgagtttgatataatactctttagcttccatttccaaagatacactattttaaaaatagaattggatttatatgcaactcttaatttcaacctcaatagataaaatttcctcccaacgttttttagataataaaattggttcacatctctgatctctatcaataggcaagaaaccaatcagttctaaaacataaataaaataactcgagaatatgggacattcacatctccctcctaataagatccagttgaaaaatactaggccgtttctatgaatttgaggccacagtgtgaaatacaaaaggcaccgtatttatatataaagtcacatctccaaatttattctacatatggagcatcaaaaaagaaaacattatgaaatatttatacacttgatgctgtcagaaattttatctattttatggataaaatataatgaattgagtatatttcacaaaactatatgtattttggccgaattatcgcaaaactataaatttaagacgttgtaccacaaaactacagatttaagaccaaacataaaaaaacactatagatttaatacttaaatatcacaaaactactgtttaaatttctaccactactattttgtaagagtcataagtgttgtagttttgtatttcatttggtgcaaaacatgtagttttgagataattttgtttctaaacatgtagtttcatgaaacttcatcttaaatatgtagttcttcgataattttgattctaaacctgtagttttgtgatacatcaccttaaatatgtagttttgtgatagattgagaaaagtacatgtagttttatgaaatttactctagtgaatttgagggtaagattttacacataatgcttttgaaagtacatgacaattcttttctcgattttttttaaatatttattagttggtgtgtacggtgtttacacagaaaacttttgtgcacatgatacgatacgttctccagtaactgaactcaaaatataaacgatatttgaattaaggaaagatttgctacaggacatccaaaaaaacgtataattagctaagggacattgcaaaaacacgtatttgatgtgaggcaccgcaaaaaaaattggtaattagttgctagacacccgcaccactattttattatatctagagtaaatggagagagagaaacaaccacaaaagtatgattttgctccagccggccatgtagctcgcatatagctccgataccgcggtggccacgagatgtccggaaccgacgcagccctcatactgcagcgatgatgagtgcaggaatgacgctaagccacgggcccactcaagtgggccccctcgaaccccctagagagccgcctccctggtgacgacggcgcgtgtcgcggcgctgcggtgagaccaactgcgaccgcctgcactccatggtgtcctgctcgagatgaaccaggaggtggtcacacattgtgcttgcctgcaagggtagtatgtggcgaagcaccatcgtcggtgtggccctcgcactgcagcggcaacgagttcaggaacgacgcgaagctataggcccagggaggtcctctcaaacccccccaagagagccagcgacaacggcgggtgggacgacagcgtcgtagctgtatgcaaggtggacttggcatgcagggcaaaattgtacttttgtgactatttctctcactattttctttggatattataaaataataccgcaggcatctaacatataattatcagtttttttatgtcccatagcataacatgtttttcgatgtttcctaactaattatattccttttaatttcttatagtaaattttaccaaaaagaaattaaattcgcagataacgacgatagcaatcacgtcgcccttttcgctacaattaataataagggtcgcacgcatagacgtactacatctacgtctacgtgttagtacatgacagaaggcaaaggaagaccctcgaagaacatgggcatctcaactggacagggcagcttttggcattgatgataccggggacccattttatgtgtgtgtggatggatcagtgctgagaaacctgtgatggtcatcgatcagagaccagcagttgcaggaacacaacgccgcgcaccttctagctacctacacatgccaaaatttaacttggccggccgtccgcgagcttaatttctagccaatctcttatagctgattggttggcctgttgctggcacaagcactgaccacacatgtttttctgcatacaccagatcaaacctatcatgatagttcatcgctggatttttcacaatttgatctttttgaaaactttattttacaaatagactcttaaaatacttatcttagaaatgatccttttttggacgccagagtcgcgccgtggtccaattggatggcgccagcaactctggcacagttctcctaccaccgtgatgactggtcggcgccgacgtggcaggggaaacgcgccaatgaggttggcgccgccccctcccgcacccacgccatttttttcctcctccctagtgtagaggagagatgtgcaactttttttatttttcttttattttttgatattttttcatacttaggagcacacagaaaccaaccatagaaaagttaaactcaaatggatgaaatatgtgacctgtaaaattttccaaaactctaccaaaaagcttctcgcctcgaaaacacaatcttgcaaccgaaatttgaaggttctaatttttccaaacctagcagagcaagggaaaaacggatataacttcttttctgcagatatccgtggatatataatttacctgattccgagtccgtatgagaaagttatacctgttttaaggaaggacacacgaatataaaaggaaaaaactcaacaaaccctaattctttttataggatgtaaaaaaacaatgtactatttttttactaaggaaaaaacaaaaaaaaagaacaggaaagctcttactgatataatcttgagtgaatttgagaagagtggagagatagcaagagcaagcaagagtggcattcggactcaagcgctaggggggtggggggatgggggcagagatgctggcgtgctccccctaccatgtcagtttctggttgccatggtggcaagggggcagcgccagagaggttgacgccgtcccgttggacgacgacgccagcaactctagcgccccaaaatagactatttctggataagtttttttaggggtctatttgtgaaataagcttttcaaaagaatcaagttgtgaaaaatccagaattcatcaccgcttatttgaaaataacgcccgcacgcgcgcgctctctctctctctctcagtgtcttaatttatgaggtctcttaaattttatagggtagcaaccacaccaaacacacttaaaattttggtatgcctatgcaattgtcacaaaatttatctctaaacccatccaattctcttcaaactggtatgatagcaatttaaatatgcccaaaatctaaacttttttatcatagtactcgaggcatacaccatcgaccctccatgctagggcaataatgaatctggtcatctcaagcgtgtagcagctggatccgccacgccaaggaggggggagggagctgctttgctagggagaggtggagaaaccgttgcaccggtcggggaaaggtggcaattgctcggtcatgtgaggtggggaggagtcttgggacttaggccttgtttagttgggggaaaattttgggattggttttcacattggatatgcggacatacatttaaagtattaagcgtagtctaataacaaaaaaatacagattccggcaagaaactgtgagacgaatttattaagactaattaatccatcattagtaaatatttactgtagcaccacattgtcaaatcatggcgcaattaggcttaaaagattcgtctcgcaatttacacgtaatctgtgtaattggtttttttcttacatttaatactccatgcatgtgtgcaagcattcgatatgacagcgtgaaaatttttgttttggaaactaaacaggccttaaaataccagagtgcttgggcagctcggctcaactagttttttttttttaaggtcagcaggaagatgttggaacttaatgaatgggccttagcccactcgaagattaattctttggcaaaatcacaaaagcccacctcatgggatggcatgcatgtggagtttagtaccaccttgcttattctaggagagggggacctccttaaaagggaggatgccctcctagccacttgaagcatgtgtggtggagagaagaggggaaacacacgcgcgcgctcgctcgcctcgcctggcctggcagggcagggcagggcaggcggcgcgcgtgcacgacgtacgcgttgaatggtccgaaaaattggctcctcacccttgcgcagatgcagcctccttttgtaaccgacccgccgtcttcacgcaatatatgcgaaaatcagtctagggtttgcctcctactctgtactgcgccgtcgctcgtagactactccatcccgctcgccagcgtgcaccagcgatcgggagagcaggtctccggaacctctgcctttgacgtcctgcaccgggagaaggcggcaataaggtttttgggaagcgcttcgcgcgactgctccctgttcgttcgcgacggctcgccttcctcttcgctcgcgtgtttcgtgccttcgtagacacctgcgaaaagtttcgaccaagcagccggtcttttcgtcacctcggtacgtgttcaatatgctgcgcatatttgatctgttcatgttattctgcgtagtttacatgtgtagaactaatgatgcgttcatgctagttttcatctgtaatgtcatgatttatttatggaataaattaaatcattatatgctgcccataatctcaacaatccaaaaaccttattataggcattgtgattttactatggctggttttgccgatgcactgaggccggataaattcaccggtgtgcattttaagagatggcagatcagggtcactctgtggctgacagctatgaaatgcttctgggtgagtactggcaaacctgaaggagttcttactgctgaacagcagaagcaattcgaggaagccactactctctttgtgggatgcattcttagcgttcttggcgatcgtctggtcgaggtgtatatgcatatgaccgacgctaaggagttgtgggatgcactgaatactaaattcggtgctactgatgctagcaatgatctgtatatcatggagcagtttcatgactacaaaatggctgacaaccgttctgtagtcgaacaggctcatgagatacaaaccatggctaaggaactcgaactccttaagtgtgtcttacccgacaaatttgtggccgggtgcattattgcaaaactacctccatcttggtactgcactcaaacacaagagacaggaatactccgttgaggggttgattgcgtctcttgatgttgaggagaaagctcgggaaaaaagatgccgcgtctaagggcgatggtgggcagtccagtgccaatgttgtgcacaaggcccagaacaagagcaaggggaaatacaaagctcagcagaccaccaacttcaagaagcagaagaagaacaacaacaatcctaatcaggatgagaggacttgctttgtgtgtggccaagttggtcatctggctaggaagtgtccacagcgcaaggggatgaaggcacctgcagggcagacttctaagtctgctaatgtgaccattggcaacactggagatggaagcgggtatggtaatttacctactgttttttcagttaatcaatctactaattggtgggttgatactggggccaatctacatgtttgtgctgacatctcattgttttcttcttatcaggtcgcacggggttccaccgtcctaatggggaatgggtcacatgcttctgttcatggtgttggcacggtagatctgaagtttacttcgggaaagatcgtgcagctgaagaacgtgcagcatgtcccttctatcgacaggaatcttgttagtggctcccgtctgactagagacggatttaagttggtttttgagtctaataaagtagtcgtgtctaaacatggatattttattggtaaaggttatgagtgcggaggcctgttccgcttttccctttctgatttctgcaataagtctgtgaaccatatttgtggcagtgtggatgatgaggctaatgtttggcattcacgtttatgtcatattaattttggcttgatgtctcggctttccagcatgtgtttaattcctaagttttccattgtcaaaggttctaagtgccatagttgtgtgcaatcgaagcaacctcgcaagcctcacaaggctgccgaggagagaaacttggcaccactagaactcctacattcagatctttgtgaaatgaatggggtgttgacgaagggtggaaaacgatatttcatgacattgattgatgatgctactagattttgctatgtgtacttgttgaaaacgaaagacgaggctctagactattttaaaatttataaggcagaagttgaaaatcaacttgacagaaagataaaaaggcttaggtctgatcgtggtggagagtttttctcgaacgagtttgacttattctgtgaggaacatggcatcatacatgagaggacgcctccctattctcccgagtctaatgggattgctgaaaggaagaaccgcacactgactgacttggtgaatgccatgttggacaccgcgggactgcctaaggcatggtggggggaggcattgttgacctcaaatcatgtgttaaacagagttcctaacagaaataaggacaaaacaccatatgagatatggattggtagaaaaccatcactttcttatttgcgcacatgggggtgcttggcgaaagtcaatgtaccaataacgaagaagcgcaaacttggacctaagactgtggactgtgtttttctgggatatgctcatcatagcattgcctatagatttttaatagttaaatccgaggtaccggacatgcatgttggtacaattatggagtctcgtgatgctaccttctttgagagctttttcccaatgaaggatacacatagtggttcgaaccaaccctctgaaataattcccagttcaatcacaccaacagaacaaactgaacatacacatgaacttgtctctgaggaggatgtcagtgaagctcctcgaaggagtaagagacaaaggacggctaagtcttttggtgatgatttcactgtgtacctcgtggatgacactcctaagtcaatttcagaagcatatgcatctcctgatgcagactactggaaggaggctgtccgtagtgaaatggattccattatcgctaacgggacttgggaggtgacagagcgaccctatgggtgtaaacctgtggggtgcaagtgggtgttcaagaagaagcttaggcctgacggtactattgaaaagtacaaggctcggcttgttgctaagggctatactcagaaagaaggcgaagatttctttgacacttactcacctgttgctagattgaccacaattcgtgtgctactttccctagcagcctcacatggtcttctcgttcatcaaatggatgttaagacagcttttcttaatggagagctggatgaggagatctatatggatcaacctgatgggtttgtacttgaaggtcaagaaggcaaagtgtgcaaattgttgaagtctttgtatggtctgaaacaagctcctaagcaatggcatgagaaatttgacaaaacattgacatctgcaggctttgcagtcaatgaggcaaataaatgtgtatactatcgccatggtgggggtgagggagttattttgtgcttgtatgttgacgacatactgatatttgggacaaaccttgaggtgataaatgaggttaaatcattcttgtctcaaaattttgatatgaaagatttgggagtagctgatgttatcttaaacattaagctaattagaggtgagaatgggattacactcttgcagtcccattatgtggagaagatcttgaatcgctttggctacattgatagtaagccttctccaacaccttatgatcctagcttgttgcttcgcaagaacaagagaattgctaggaatcaactggaatactcccaaatcattggctcgttgatgtacctggctagtgcaactaggcctgagatctcctttgctgtgagcaagttgagccgatttacctctaatccgggagatgatcactggcgtgcgcttgagcgagtaatgcgctatctgaaaggtactgtggaattggggcttcactatactgggtatcctgcggtactggagggttatagtgattctaactggatctctgatgtggatgagatcaaagccactagtggatatgttttcacactgggtggtggtgctgtttcatggaggtcttgcaaacagacaattttgacgaggtcaaccatggaagcagagctaacggcactggatattgctactgttgaggcagaatggttgcgtgatctattaatggatctgcctgttgttgaaaaaccagtgccggctatccttatgaactgtgacaatcaaacggtaattgtcaaagtgaatagttctaaggataatatgaaatcgtctagacatgtgaaaagacgattgaagtctgtcaggaaattaagaaactccggagttataacgttggattacatccaaacagcgagaaacctggcagatcccttcacgaagggactatcacgaaatgtgatagacaatgcatcgaaggagatgggtttgagacccatgtgagttatactatggtggtaacccagtctatgtgatcggagatcctgtgaattagatcctgggaagaacaaaccattaataaactagaggagagtaccaatatatataccctctccaagtgaagatgcatatactctcgtgagctgcaaggcaggttggctatgccttaatgagttctgttggctttaattagcaaagatgttgtcctgcagagcattcttgaaggaactcacctttgtgagcttgactgttggtcgcagtccatgaagattttgggtgaatcttctaggaagcttactaaagacctaggagtatgacttatacgctccacccgaggggtagtctacaaacggtctagtaccagataagactttgagtgaaacttgcttgcacaagacttgcaattcaaggcgtagtccattgttcaagttgtgagtaagtgtagcttggagttctaggtggatgttcaaccttaattggtctccatcgaaccgctggtatataaacagtacattggaaaaggcaaatctcagtgggattttgagatttggtgggggattgttggaattaatgaatgggccttagcccactcgaagattaattctttggaaaatcacaaaagcccacctcatgggatggcatgcatgtggagtttagtaccaccttgcttattctaggagagggggacctccttaaaaggcaggatgccctcctagccacttgaagcatgtgtggtggagagaagaggggaaacacacgcgcgcgctcgctcgcctcgcctcgcctggcacggcagggcagggtaggcgcgcgtgcacgacgtacgcgtcgaatggtccgaaaaattggctcctcacccttgcgcagatgcagctccctttgcagtttgtttngctgcaaattcggattcgtttttgttttggaaacgttccgaaaaatccgatgcatgcaaacggcgtggagtccggataagttacgcgcgacttatccggttcggttacgcgcagtagagatcgtgcgggcgccctgatcaagcgacccttctctatataaaccgacccgccgtcttcacgcaatatatgcgaaaatcaatctagggtttgcctcctactctgtactgcgccgtcgctcgtagactactccatcccgatcgccagcgtgcaccagcgatcgggagagcaggtctccggaacctctgcctttgacgtcctgcaccgggagaaggcggcaataaggtttttgggaagtgcttcgcgcgactgctccctgttcgttcgcgacggctcgccttcctcttcgctcgcgtgtttcgtgccttcgtagacacctgcgaaaagtttcgaccaagcagccggtcttttcgtcacctcggtacgtgttcaatatgctgcgcatatttgatctgttcatgttattctgcgtagtttacatgtgtagatctaatgatgcgttcatgctagttttcatctgtaatgtcatgatttatttatggaataaattaaatcattatatgctgcccataatctcaacagaagacaagcacgagtaatagattttctaggccggttcattaaaaaaccaatactgataagatattattactggttttttttcagtctaaagcgtactcccagcaaaaagcatcaacgatgcagaaatcaatgtaccgattgtggtataatagagttgtaattcactaattattccggatgctcgccaaatctgaaaaaacctggcgaaaaacaacaatctagatatgtattttgaatgatttgcatggtttggttacacatagaagtacggttgattggtctgtcaagaaattttcatttttctaaataatgtgtgtttctttatataccttctctaatttttcctccattgtacttataatcagtagacttttcctcccaactaatagtggatataacgttaagataataccttttcaagcactcctggcaaaaatccaagcatatatgcatctttgtctgcgggcatctcccacgagtggagttgcacaagttgctgaacgcagtggatgtgatatgcggtgactcccagcaagcagtatctctatctctgaaatggacccagagatctctatctagatacacttgtaaaaccaaacaatcactcaagcagttgcctggtagcaacggccaaaagctattcttaacagtatcttctactactagcgataaataaaacctattcgtcattttagcaagtgtaattttaaccataatttcaacagtagtactgcataaatataacctctggtttaaagagaataaaaaattattcatcattttattaagtgtaattttaaccatttatttgatgtaacatatgccatattacatgtgaattttactataccattatatatcttaatcccatttttttattaatatctcttttctttgatatttttttactaacatttttttccacacactatgatatgcaatataatagaatgattcaaatccattgaatgcgaagtagtgcggctataataaatccgttgcattatgaaattacccgccatatcatttatttgtcctagagcttatatatgtcgtaaactgtttaccaataatattaaggtaaaacttttatatttattcttagtgattttaaaatgtatgtcgaaaaataaactatgaaatcccaaaattatttttagctgttgtcggcacatagaaaaaattatgcgcatgcatacatgcggcaacttttcgggagcaacttgggcgcaggaccagtttcagggcagatagtacaaacaaatacttctccatctgaccgtaccgaagtctctcgacctgaacaattttaattccgatcgcacgcaggtggtggtggtggtggtggtggtggtggtggcgccggcctgcgtcgccggcgacggcgacggcgacggatgaggcgcaacttgcagctcgccggcctaatccgaatcgacagcaacagtagaacaaaccggaaaaaggcacatactacttgcatttgcatgggcaacttggatgaaataatttttgttatctctgtagctgctgctgattctctcttagcttgatcgatcgatggaaaagtttggaaacgtctttggtcaaggggagaataactctttgcatttgcctttttggggcaagttggactgccagttgggaggagctatttcgggaaaggtgcgtggttttgggttggatcgaattgccgaccatatgcctgcgtgccagtggatcttgaaactactaatcaggttttctatgtgccagcaagctgaagtgactggcatgcatgcgtgtgcacagcaagcgcatccagcctgtacctaaaagtggatgtacgtcccctgtgagggtttaatcctgtccaccgcgagtgcaccctccatcccgaaaattgaatcatgtttatgaaacggagggagggagtacacacaagatattgaatcatgtttaggcagctataaccatgaggagtatattacaacaacgtaacatgtcatcgaaaaacattagtatctcaaatgataccttctcgtatactgttagatgtatgatatctccgtatatcgtgaacttattgtaggatactaaagtatatttcctaccctaaaagcttgcccttccacaaccaatgtgagactatttaataatttattattcacattccacaaccaatgtgagactatttaacaatctaccaattcacatacattggtgtccctcagccgttcatcgccccttcatcgtttcctcacggtcccttaccctttcacaaccaatatgagtctattcgacaatctctcccttcacatatatattggtgtccctcagctgttcatcgccccttcatcgtttccccacagtccctcaagtatacggccccgcaggcacccatggtccatcaggccttcacacactttgtctctcgggctagagatgatgaaatagccaggctctaataccaattataggatcgtaaagggtttttcccaccccaaaagctagtcattgaggtgaggggctcccccacttatatattaaatctcttacccttccacaaccaatgtgttactattcaacactcatatgtaggagatatgtcttattagtaacactgaaaattctcttcttttgtttttctctcgtagttttattggatttttttggaaaaaaaaacttaaaaatagattaatatgattttttaaagcaactttcctatagaaacttttttgcaaaacacgcaccgtttagtattttgaaaagcatgtacatgaaaaacaaagagatgagttgggaacttaagggaaagactcggccttagcagtttttatgggatgtgggataagatgagaataggaggaggactacggtgcttttataatctatactactttaaatgatcctattgatagtgtccgtgtctgtcttaacgttacaagctgacatgtggaaccataaagatccccacatatggacgttctttttttatatgacattatatgcctactcaattaactatactatatatataaacttgtaccttttacttttgtttttatcttttataatatccattgtaatgcatgggactttagagatgaccaaacatgccccaactacaactagagctgccttccctagcccagctgatttttactactaagcctatgggcttgttgggcccatctttatgggcttttggaccaaattgtcttgcaagattaggcctagcagaatggctgaccaaatcagatataacacgggcttcttgtaaattgtctcgattttgctagaaatttgctagaaaattgtctaaccacttgaaaaggcctgaacaaagatcatctaacagtgaaagctttctggagtacatacctacatcaatagaaacttttttaagcttcatgttcctacatgatcagtcactacaaagctcaattaattgctctggagcatgacctgtgaaggtcaattcactcggagaattaacaccgaagcaaatagagtaacatgcgtatactaactgttactactacggagtactcctaccatttagaacaagttaattggatttgcgaaaactccaaatgcaattaattaagcagctcaaacccattcaattaacctaattaattagcctctcccgctgtaattacccagcccctatataaaaccgagcgcttacatgcatccaccacacaaacgcagaaagccatcgttttcatagcgcaagaaaacttctcctacgaagcagactagctgagcaaaagctcaacaatggccgccaagaccaccacgctcgccgccgtctcctcctgcctcctcctagcccagcagcttctcctcctcgcgcccgccacgacggccacgtcgatccccgtcggcggcggcggcggtggctccacggcctcatcgaccgtcccggtgtcctcgcacagggacagcgacgacgccgacgccgacgtgccgcccttcttccccttccccggcggctcgggcgcggcggcggggtgctggaacgcggtgctccgcgctgaggtctgcgccggggacgtcctccgctcggtggcgtcgctcctgctgcacgacggcgagcgccacccgtggggcgtccacgtcggcgcgccctgctgcggcgtgctccaaaccgtcggcgaccggtgcttccgcgacctgctcaccgactcgccgttccgcccgctctacgctcccctcgtcaaccacgtgtgcagcgccctccccgtcggcggcggcgtcacccccatccaccgccactgagctagatcgccggccggccgccggccgtcgtcagagaagacgcatccaataagtgagaatataatagacgatatgatcagtaaaatcgatgctacagtgctactccgtactagagatgatcaattcattaaggttttatacgcactttgctagcgctaattttcttctctgacatgtaataacacgacaggaatttgttcctcctatttacacattttctttttggaaataatgaatacaaatggtttttttttttggataatataagttctctgtgaaaattaatgggctgcatggtgggcataattcgggacttcgggtaggcctaaatctcggcctattcgcatgggcgagccaggatttgctacgtaggttcgagcgaatacctacgttcttttgatatcctttaacatcgagttcgattttcgtacttgaacagttgaactggtgcaattggtctcttaattataaaaactggtgcaatataggttttaaggcggtttggatagggtttcagctaacgtctacatggctaatttgactcaatattcatttgacgtgacacatgatggagaattaaaaactaaaacaaaatgtatgggcccatatatcagtcaaactataaaaatttaagaatagtgggacccacgagtctcttctctatcttctacccttcacttttgctttgttcccatttcctctctcgtcggatccctccccaattcaccatcacgccagagtgccacccacagcctcgactactcggaaggtatcctctctagactctacccttgccaccacctcctcctttatcgccgcagcagtcggattgctcatctgtggtggctcagatttgttttcttttgttcttttattgttgtgatttggctccaactttcttggaccgtgtcgagagctttgcttagtatgatcttttgagttggtttgggcaatctaccgcagattgttctccatatccatccgcggattcatttgcttcgtgccagcatcgtggctaattgtttccacgaaatttggttcgtgccgccactgctcagaatgagatcgattgatcgatccacgccgccaccgtgcagaatgagctcggccaccaccgatgccgcccgagaggagctctcgatccacgcccgcagacgtcgtgatagataataccacgttagatgaagatcgaatcaaattagtcacgtatgtgccacgttagctgaaatcactatctaaaccgtcttggtacctatattgcaccgattttagggacctattgtatctggtattgcggtttaagaatagaatcgaactcgctgtcaagttaaggaatctaaattaaacttgttcctaggttcgaataaaggtccattggaaagaggaattcaaggtgggttagttatgggccttccctctgcaggctaaatccaagctgacaatagcagcccacactgcaaatctcacctcatggcaaacaaaaaacgggagagaaaaaaaaaggcttgtttcgcatggatatagataagttccaactctcctgaagttagtgactaaccaaaccgttttagttttaactaaaaagaaagttgagcgaatagactagagtggtctagaaaatttgaactacatgagtggaacgggatttgggcgactccacagcaccgcttcatactctgtttatgaattaaatttagaagttggaatcttacgaaacagaaaaaaaaacagttatttccattgaacggtgtgcccgcgttcatgtatggagcattgctatacgcacgatcagagtacgatatgtcgtagtctctggtgtatgctgtaaatatgggtccaacatgtttccacctaatcaataatcatgcatggtaggatcgtcccaaaatcgtacaaatttcatcataataagaaaaggaatttcggccaagtttagttccaaaatttttcttcgaacttccaacttttccattacatcaaagctttcctacacacacaaactttcaacttttttgtcacattgtttcaatttcaaccaaacttttaattttaacgtgaactaaacccacccgaatccttcgtgtatgtgcacggaaagattccacgcacggaccacgattccatctctcatgtcagagcgagcggctactgttccttcgccatcctctcccagagccacagtgccagtgctcctgctacacgtgtactccctccgtctaaaaaaagacaaactgtgggttcccgtgccaacatttaactgtctgtcttatatgattttttttataattattattttcgttgttgttagatgataaaacatgattaatactttatgcgtggcttatatttttaatttttttttataatttttttaaataagacggacgattaaatgttagacacggaaaccagggttttttttttttttttgaccgagggagtagatgctgtcactgctgccgtgaaccgatcgtatattcgtctcctgggctcctggcgggccaggcaaacactgcaaagagctactactagaacttggaagacacagcgagcactgtgcagtggtgcagaaataggcgtctcaatctcccaattttggccaggcatgtggttgtggtagccatcctgcaataataattgccaaaagagaaaccaaattgcttgccaaccatcacctgcctactatcacggagacgggaaacgtccataagagcaagtttaatagtatagccaactactagctccaatttatctatagccaatttaatagcttattcatataacagttacatactacctccgctttttaatagatgaagccgttgatttttctcacatatttgaccattcgtcttatttaaaaattttatgcaaatgtataagatataaatcactcttaaagtactatgagtaataaaacaactcataacaaaataaattataattacgtaaattttttgaataagacgaatggtcaaacatgtgagaaaaagtcaacggcgtcatctattagaaaacggaggtaatactacactattaatacctagtctcacttatcatacacatgctgtcttagatccgtgctacagctggctataaatctgtagcccgctgctcttctctctcctcatttatcttcttaaaatatgtttgcagctgacttatagcctgctattgtacttgctctcagtggtggctgcaacgcagacagacgggctaattttcgccgcgaaattgtactgctactactgctatctttgtggtggttgatctatgcagatcttgattttgatggagttaatttctagtgtttttgtcaaatcgcgtattagaaggggaggcagaaacacactgagtatctgtagttaattttgatggggatggtagttgtaatctgtggccgtgccggcgtcgatcggtggcagcggcgacacgcaaatgcgagagccggccgcacgtacgcagcgcgcgtgtggcgtttgcgtcttctacgtgccgggcccgcgctcacaccaggcaccggctctgcctatctaccggcgaatctgtgtgatctcccaactctttcaagctagcactaacgagttgatcttaacgcgaccgcgtaaaaggattatgcgtcaatatgttaatagagttttagttacgagttgatcctggtgaaccgtttgaaaatatataatattttgtagctctatatctgaataagggtatatgtttatatatatagctaaaaattattatatttttaaatgaaggtaatatatatacttaagtagagtaaaagtttagaggaactcgcgtcagcacgagcgttttagataaatgcaccattgtattcaccggccgatacctttaattcaaccaatatgcaaaattgcaaatacggcttaccgtgtgccatcagcgtagagccgtggacataatagatggcaccaatgagaaaatgacactaggggctgtttggtttatatactaacattgcctagggttgccatagttttcttgctaagcttgtctaaggttaggcgaacaaatttggcataacattttggctagcaatctataacattgccacacttttacgagacaatgacacgtgagaccaaagtgctagaaaaaaaatcttgccacaagtgtgacaatgaaccaaacgcatggctaacttagtcaaatctacctaacttgaggtgtggcaaagtgtggcaacatgcggtcacgaaccaaacaacccctacgtcaccgccttgttatgagtgccgaccgtaatctcacctactcccacgaaaggcacagtcaattgctgtgccattagtcataattaaccacagccacaggatcttcatcttaacctcatctagcctattgttgtagcgtcctgtccacaaaaacacacacacacagctcgatggaatcatacaaatgtttctaaaaaaaacaaacgcagtaaacaattacaagcaacagatcgatcagtcgatatcgcttttggcatggtgtaaacatgcattgcatcgattttgcgcgtacataatttgtcttccctactgtcttcttcaatcttctcatatctctcctattataaaaccatgatcgatcgagcaagcgaatccttactctcgctctgaataaatataacattacgtacagtagcgaaattttaattgtgttgccgagataccgacgcgataaataaaacgaattaacaatgcactcttacccacggtcggtgacgtcattgtaattaagtaaagctcctcgcatgcatgatatcacgctggctaatcaacagccgagcttgccctcattgacccacaaatatcccaatcatcgacgcctttaccaaattttccaaccgctactgtttcagctgcttgtctccacgcacacaccagttagtacatcacttaattataatattacttatcggaaacagatggagagacaaatgtaaatagttagaattaattatagcataattaagcatgcatatatataaggcattgttctttcagattatccatcggatcattgaaataggttatttgttccattgtttaaaaaactaagctttctaaaaacccttttcttctactgcatgaattagaccatttattttaaacaatttgttaagtttattgttttaaaatatttaatataccatatattccagtagataatcctaacagtaatattcttgataataatctaatggttaataatattcaattattttaaaaaaaaccattattactgctccacaatgagtagtactctctccatcccattttaagtgcaaccatgaattttcgcgtccaactttgatcgtcggttttatttaaaaactttttataattaatatttttgttgttatgagatcataaaacatgaatagtactttactcatgacttatgtttttaaatttttttaaaaaaattaaataagacagacgatcaaagttggatgtggaaaaccatgctgtatttaaaatgagacagagggagtatatttttgttcttgagaactgaatgagtagtattttgaaaagctatagctgatcgatctggtccagaattccagatgttgactggacactgcccggacactgacgcttatgtggtgtgtggaggatgctgtggatagatgctgctgcttgctttgctatgcccggcaagccctcagcctcaataattgccgcttacgggtggctggggccctcacatgacagagatctccatacaacgcctctggagattgcatgattccttacgcatgtcaggctatatagaagtaaacgacacgatgtagtagtagtctactaactattttacattctctggagattcatgctttgctcatcaccacttttcttttacagcactctttgttagtgttgagatcagataggagttgagaaaggaggaagagggtaattctagttttgagtgagattactaagattgataagcggcgctactagaggtaggggtgggcattcggtctacccgagaaattcggttcgattctttggtcttttggaaaattcggtcttcaaaatcacgagaccgatcgatcttcaagaaaacacaagaccgagcgcttcggtcttcggttagttcggttcggtctcagtcattgaccgaactaaccgtaacaatggtttcaacaacagaaaaaataatcgcaactcagatgaaagactataagtctacaatatgaggatgcccctagcaagtactagcaagtagagcactgattcaggaaaaaaaaagcaaatcaagcagccaagcagcaagtagagcacgatttaggaaaaaaaagagaagcaaatcaagcaaatcgatcatgccatgtattggatctcgtcaatcttcactccaccagaagctccagatcccatcaatctcatctcccatcgtcattgttcccccgctccatcgctttcatcaagggctggccgacctcttccgccatcgatgcctctttcgccacggggtgcggctggccggcaggcggcaggggcgctacagggcgcacggccttcttccgccatgagaggcaaacgagcagctcggcgcaggttgccgctagcaacgcctccgcgcagtggggactggggagttgccaattcttttttttttctgaaactcgatcgtggcctcgtgggtaggaggataaagtcgtgacgtagttgttttgtagctggatggggcgatgattttgctcaggtgatgaggtattgggcctagtgggctgagatttcacatatgttattgggccactgatatattttggtttttttggtcaattctgttaactgagtcctaagaccttttgaccgaactaatttagttaaaagtgctgaccgaatttcttggtcactttggttcggtttttcggttcggtctttttctgcccaccccctaactggaggaagggcgcaacaacattaaggctatttacagtgtgtcgacctggagttccgccctaaggtgccagcaacgaatttgtctaccacgttcagcgcgactacgtcctccttgaagattgataaaccctgagctccactcaagacactcaaggctgttgttggcccgatctttcggtgaattgatgagaactacaatttggaagaaatgttgacgacccaactacaaccgtatgagacgttgttatgttgcgccttagcgatcgatacaccactccgtaggttgttgatcttgccggtgcagatcaaccttattcctgcaagcaaaccgaagaaataagtaagaacaagataaaagcaatgtgaattgcaaataagaattgcatacaaatgataagttggggttccgtaacgagcaaaccgacaatctaaccgatcacgggattacacggcaaagcaacaaagctaaactttaatctaacgaaaacccaagaaaccctgaacgggtacctagctatttaaagaggtgggaggacgacctaggggtccctagggtcgtgctacacctgtttggggcgcaccccacatgggccccacttgggctggggtcccaaacgaagttacaaggcccattggcccaatataggtgacgtagcaccttgtttctgcgattgccgttgactgatatggaatttgggaacaaggctggattctttggaaagtggactctgagaatttttcatcaagtactcatggagccaaaacggagttcgtatgcaaatttagcggctgtttgaagtcagcaatgtagtgggtggccgaatcagattccagcacttggacatcttgatcttgatgtgagcgacggttgtatcaatggtatccttggacacatcaaagattgtcgtctcccggcgaagccgcgtgagcctgatgtatcaggatgagtctacgtgactagcatagcaatgggttgatgctatattggggagatcgtgccctcacgacatggtgtagcccccgtaccccctctccccctcacacgcacaccctagcgtcttcccaagctacggtgggtagagaaccagcgtggagagacgaaaagaggggcctacctttccagtgccactcctggcgctttgacctcaccgatgccgccaaggtgggtggagaacacggtagtgatgacctcaaggaaaactccaaatctagcccctaagaggtcctcctaatcgtcatcgatcactatccggctcacccgagcctactgttgctgctcaccgccatcaacctcgttcttgatccgccgcccattgctcctactgctaccaaatccattgngagagaggcgccccgctgtcacagagcttgtcgttgggggagagaagtcactggagaggagggaggcggatagaagcggtgacacgagagaggagataggaagaagaaattttagggcatcttcgccgaggtggagcaaccgaggggggggggggagggggagggtcgggaattagagaggggggaggaagaaaaaggataggaaagggactgacatatggttctagcaaatggataagggttatttgtggtcaattttattgtcacagggtataaaatataaatagttttaattgatttgaaaaaataaaatatcattaggaataactagggatctgagtgcaaaaaggtactagtactcaatatttagatatttaattagatgatattttgtaagagaacttatactagtaggagatttgctatacatgtataaaaatgaactagttgtctctcttttttttggaagaaatggtagtatcaaaatattgtgctgttacaatccagatttcacagggatatgctatcagggatagcttgtccagatgtcttgagaccatgtcaacatccaaaattgacactttgtttgtcctggagcacaagtagaagtactaattttgttaggaggagctaaggaatacagagtatctaacaaacgatacgttttgttttgtcaggtcagatgcttctttcactgatgatgcaacaatgcttccactgtgcttagccatactttgaatgagaaagccacaataaattcattagctaagggcatgtacaatggttgtcaatagtggtttcttagcgttgctaattaggaatacttgttgacatgaaagaaagagaaagaggagagacaaaacatcgttatcatgcataacaacggcttaacaacgactcttaatcactacaatatggaaatatggttgcatgagggtaaaaaaatagaaagaatattaataaaaggaatattttttagttaatgattagagtctttatcgtctcaactattgtaaagatatggtctctaaataatcttatattgtttaagaaaccatacttgtctctaccattgaacataccctaattctttgtgtttggacgtccttaatttcagaaacaaatctttgattggtaattggttctaaatctttgattggtaattggttctccaacgagcaagcaataacattaattttatatgattattttttttattttttttattaatagtcaaagttaaaaatatttgacttgtcactatgctaaaaatgttcatatttagagacggagtgagtacaattcacgaatctgccccactagaccaaaagagaacgaaagctgtctgcttcagcacttcgatctctactacagcaaaatagagcttttgactaattaattgctgactcgaaagcagtttttcaggggagaaaaaactgtttttggctaggttcgcttttggaaaatgctaagctgttctgtgtatactttaatttggagtactagctgatctagatatttttgttccttttccccattctgctagccccacctcctttggcagataactttgagtggtgtgagtatgacttatctctactattataaaaattgaaaatattttcgctaatattttgatatgtcatccgtgtatgactcggtttttaaatttgtttgattttgaaaatagatatctgtatttgagttggtttctaagatcgttcacttttggtaatacataaggaatcatataagaaatttgtttaaaaaaactcgcatgctaacttgatatgattggactcctaactacagctcatgattttctaaaaatatatatatccaagtgaactcctacagtgaatttcatcttaactaaaccatataacaataataagattaaaatagacttcacccgttgcaacacacggatattttttctagtgtatatctagtgtgtatgttttttatagctccaactcttagggcctgttcggcacagctccagctctagctccacctctcatagagctggagttctgccaaacagtttcagctccacctaaaatgggagtgaagctgagtggag

SEQ ID NO: 23194 - DNA, 2248 bp, Oryza sativa
gaaacggaggaagtaacacctaggtttaatatttatttgttaattagagatacaaatatatatatatatattttttttctgaatttgattcaaagggggaaaatataggatatgatacatgataagtaataagttatcaaatactatctccgtcgtaaaataactttatttttcacccattccgcacgtaccaatgtaaaagcaaaatgataagaacaccctccactattaaatcccaatacaattgtttttcacttaattcagttctagtatttgttccattctttcacaaacttcaatacaatgattgctcaaagataaatttagtatgggataaagattaccttattttgagatgggggagtactatatattctctattccaactccgagcaagtgagcaacaaatatgggagaggatacataataagtaattatttcacgggtactattcgtttatgagaaatgacagagtcagtgttacagaaaagtatacttcttatacctatatttatgactaccgggaataacgtatacctggtcctttatggaagagtatgttcaaaaatagatgtcagactctgatccgtatgctacaaagtcttatctgttcatagcctatttgaatcacgagttctatttagacaagaggttgtttgtccgtataaatacaaagcccctagggaggagagtgcattggatcataaaccgtaaccacaagccatatcccatatcgaatatcaatcgggaggaaaccctaaatctagtctttgattacaagttgctagtttagtcctcaccgaaggtaagctggtaggccaaattagctagcttgctcttcctttataatcggtgtaacacatctcatagcagctgtacatataaactagattatggctattaccccatttcggatgcttgaccgcttgaaccaaccagtataaaattcattatcttccgttttcttttttccaatattagatataccctcatacgccttttaaaatatcgtcattgagcttaacctttcttaatttttaggggcaattgtaaattcaccactattttgaatcgttattgtaagactgctactaaaaaattgcaaaaatgctattagaactgccattaaaatggcatccttgcaaaatttttatggataaaaaaaaatgacgtacgtgatccgacagtatccatcctgtaccgctcgaaaaaaattattgagcttgccgagccgagccgagccgagccgtggagccaggaaagaggtgaaaatccacacaaccacctgttattatctcccctatttctaaattacaccaagccccctaatatctcggcggaatcctctccaactcccctcccctcacctctctcctctataaaaaccctcccctccccatccacccatcctcctccaactccaacggatcactcaccttgcctcgccctcgccctggccaccatccaacgacgtcgactcgtcgccggcgacgactccgggccgcgcacatacgcctggtaatacgtactacgcgggaaccaaatcttacgcacgcgcgcacgaacgcccatggggctccttgaccagctctgggacgagacggtggccggcccgcgcccggactccggcctcggcaagctccgcaagtactcctccttctcgccctcctcctcctccgccgccgccgccgcccccgggacggcgccgccggatgcgccggccgcgacggtgacgcgcagcatcaccatcgtccggccgccgtcgctgtccgtcccgtcgccgcgcggcggcggcggcgagtacagctcgtccgtgccgtcctccccagccagcgcgccggactccccgttcgcgtcaggtgggggtctcctctgttttttttttctttctctctcttggattctggattggcgtgtagtagagccgccctcgcatcgatgcactgtagaactctagatctgcgttcgtggttggttggttgggggattggatcccgatgcgacgagagaccatggttgcgtgtcaatctggtgagctttttccatggaaatgggagagagacaaaaaaatcatcaaaattgtttgttgctttttatgctttatgccttgagtgcggctgatgcagtcaacagaatacagatctacggagttcattcatctgttcttgattgatgctatctgtggagttcatctaatcaagaaatggtggatcgtagtagtctgatagtacagggggggtgcaggaat

SEQ ID NO: 23195 - DNA, 20679 bp, Oryza sativa
aattcctgcagcctagtagtgatagtgttagtggagtcataggcgatctagctagagagatgtctgaaatggtatgaggatgtaatgagagtgttcgctctgtatcctcctctgtaattaagcactatggaagtaagaaaaaaaatggaaagccatgcctttgctgctttctttcagctcgtgtataaatcttgcttcaacatgcaaggcgactgtatgtaaattttcctgaactgaattgctcaagaaacatgataactggtgatactagctggaggaacaagattcttcaatctagagaggggttccattttgtcttcatcagtctgaactctgaacaatctctggtcattttttttgctttctctgtagacctgaatctagtgattcccagcaggaaatagctctcgctcggttctatatggctgcaaactctttatgcttgtcaacttgcaagtatatggatttgcttttctagagaaaacaaatataccaagatcccaattggatggatccctttgtgtggacaaataaatgatgctctacgatcttattctatattcctatctgtcccgtcagaaccctgaacccatcggtctaaaaaaatataggaaaggaaatagagatagctttattcattaatcatattcatgaggtcaaaatcaaatcgataggttcttaggaaaaagaaaaaaaatactgaagacgacatctgatctgaaaggctctagcttattatgttactcgttcttgagaagtagccatggtaggatcagaggaaacagattagccactggaccaaccaggtcaaaaaacgagaagtgatggtaccctccatccaatcatccatggcaaaccggatgagtttaaccaaagcaagacactgaggaattgaaaacagaacaaaagttggtgctgcaacctgatgaacctctcgatgagctggaaacatgatcttccaactagtttggtattatctgctcgagagaggcagagagtactgaatccactctcgaatctcgattagttccatgtgggcgctagttttctctgcatcaaattggctcttggaacattccatgtgagaggtagtaggttcttgcctgggaaaggttggtgccggatacctgtaggcaaacctggtgtaccttcctgtctcaccctctcgcctctcgtgccgtctctgtccgtgtcgccaagaacctgtttcttgacctacgtactctcatctagtcatctgtacctaccggcagatcatttgtttcaggccaaggtcgcttcaattcttgatcaatcgaaatgtttgcagtaacaacagcatgcgtgttgcttgcagattgttccattcagattttcagacttgcagagggaaaaaggaggcagtgctatactgtcattaagcctgctaatggactgagatccagaccaaaaccgccccagttcacttgtctctatagtacacttctaaaccaatccaattcaattcatagtttgcagaaaccaaaccaatccaatccactcacagagcaagcccaaacaaatccaaaccaagtgcagacaaatggattcaacccattctcaacccatttccaacccaaaggaaatgcacaatattactctgaacaccaacaggcatcgtcatcttcttcctcctccctcctttggtcagctccgggaggatgagcagcttgcagagggcatcaatggaggatgagcagcttgcagagctcgtacagggtcgtgggagcatctggcgctcccgtgcgccacgtcgtcgccgccgccgcagcgaaggagcctcaccagcgctgggatgccgcgaccaccgcgagcgcgttcaccgactcaccgtcgcgaggctcgtgagcactacagccgtgaccaccgcggctgcaccgccgtaggacttctcccccaagtccgcaccaccgcaccaccattgtccgccacaagccccacgttgccccgcccttctcccccatgatggcggccgcggccacggccttcgatgccgtcgctgttgccgcgggcagccagaagatccggagccatggttgattttttggggactttgtgaagggagaaggtttgccggaggagggagaggaaggtagcaagccaccggcgacgaagtcgagctagcgatggcggcgatgtggttgtcgacttctcagggagacgatgggattggggccaatccagtggatacccatgggttgaatccaatctgggaccaaacttttgcagccaaaactaaaccaatccaaaccatttcccatctccatccaaaccagtccagtccatcaggtgcagcaacccatttccacccgcccaaagctaacccacactgaaatccaacccactatatccacttaaacccagtccattagcaggcttaactgtcatagtgaggtcgtcagtgatgggggcaaggcaatgatcaaggtgaagggtggttaggatcgatggagatgcatggcgtgaggtttgttcgtttgcttgctagctggagcctctatctggctaccgttgccgagctgtgaggctggggatggtgtcagattggtcgatcttgtgcagactgaaatcgttgggcattttgctttcagggaactgaacatgcgttttcagggtaaactgacactgactgtcgtttattgaaaatgatcaatataatcaatacaggggataccgtttgcatcaatggggacgtagctcatatggtagagcgctcgcttcgcatgcgagaggcacggggttcgattccccgcgtctccattttgtcattctttttgctgtcctagaaatctagaatctctggagaatttgttgcttgcagttgcagttctttcctgcaggaaatgcaaccgacgacccaaaagacagcaggtaaaacgccttcgatccacctcctgttgatacacaggtcaccaggtgagtgcgaatttgactgccattgatatcagatgatgtgtgtacatattgactatgtatctgaacagtatatgttttgtggactcaccaatggttggtactgtgcttgtcgcatgctcctgctctcgtgacttagtcagccgccaagccgcagtgttcaccagctgatcgcgctctagctctacccaggagggggctaggtcaattggcaatacgaaagcagggggacaccacaagcacgagttttctcttggaaccatagcgtggttgacgtgtttgaatagacacaaaatgtgttcttccatttatttggagtttgggcaaatggacaggccgctgacggtggcggcccatcgaaacaaagccttcccagttagtaggaataagttcactttgactcccttaaaagtgacccgaatctaatccatgaccctcaactaaaaccagttcaatttgactccctcggcagttttgaagagcggtttcgctgacatggcgcctacgtggcagtgctgaccaggtcttcgtactacttggcgttaacatgacgcttaagtggcattagaattaaaaatatatatgcggggcccattggtcattcaaaaaaaaagttgtaggccccactgatataatgatatgtggggccaacataaatcacttcttcctcctccctctttccctcccttttctctctctttctctccctttctcatcggttcttcctcttcggttggcggcgggcggccatggtgtctcttcccctgctgtcgggccctcgccgctggggcggaatgggccgagaaccccgtccccactgttggatactgacgccgccgctccccgttgttgtggcgatttgcgttgttgtggcgggctccagatcgctagagagcgaggccgtggccatggcggccgccgcggcatctttggccatggaggagggaagggatggatcggatgagggtgcgggggcgggtgcgggtggtggcgagctctaggtcatcggagagagaggccgcaaccgctgaccgccgctgccaacgaagaaagagggaatataggaggggagtcacataggcgccacgtcagcgaaatcatcaagagagttaaattgaaccggttttaaaagtttggggtagagatatttggttttatggtttaggataacggattagatttcgattgatcacaaattgaacttattcccagttagtactgcgccgatgccgcgggcgcccaccggcaagatcggcagcccgagaatccgttccaggaagtgacagctgacagctgacaagcacccccccgcgacgaggcccaacccgcgcccggcgtggcatcgactcgattgccccatgcccaagcaggctacggcccatctgacgacgcatcgcgcggcggaacaggcgacccgcgagcctaacgacgaaatcctcgggagccggggagccccggaccgggcaacaccggcctttactagagatttgccagctttgcagagaactggtttcttcccttattggtccaactagtgcacaataatcacttttccgattaaaacaagacttcgcgcgtacctttcaagcgttacactacacacacgaatacgagtgtaccatttaacacacgattaaaaagacgcgaatattagagaataatctagtattaaataattagaaagagtgaggcttcgaatttaggtcatctagcccaccatcttatggagttagccggaagacctctggacgtttctcatttaacacacgattaaaatgtgtaaagccaaaagtaaaatcatgtgttgattagtcccggttataaacaattatcaaaggtaataaaaaaagaaaaatgtatgaattatcgtcctgaaacgaattaccccctaagcttgaataccaaatattactccctccgtctctaaatattactccctccgtccctagacatgttccacatctagattcgtagtaataggatacgtcacattcaactaaaatcccttatatttagagacgaatggagtacctgacaagcgtgtaatagttgagttgtaaaatgtcaagtattcgagtttaagggtgtaattcaatcgtctgctatagtttagggggtaattcaaactttttccataaaaaaaaggttgtgttggcgtgttaatttcattgaatatggtaggaataaaacactatacaaatatcagattgtgacacactgtgttcatatttatgaagtgatgataaattaatttggggaagtgtcggagccgcaagattggaccagctaggtaaagctagtcagacgggcgggtaactatagtatgactgatagtatgtgaacggtcagaccggtagactctatgttggagtcagtttcgggttgattttttggaatatgttgattacttcatattcatgacttctagatggtttctatatgtaagatatactgttgtgtgctaatataaatcaagttggaaaaaaaacttttactcggataatgtttctttggttgtttatgtgacggtgttgcttgaaacctcgagagtttttttggtgatagatcggaactagacttgggagaagttgaagtccagacaatcaaagatatcatgcggtatactaagtctatagagaacaacacacgtggatgtgaagtttttatgtggcatacaaaagaaattgtgtgcatatgtaaggagtgaaatttggattagagcataagtttggaaagattgaagttcgaagttataaggggatgtgtgtatcactggtttgaaaggttttctatgtgattatgatttcttattctggttggattcgtcgctataggtagtcatgtttaagggtataaatcacttgtatgattctggggcaaaatcacttttgcgatggtattttatggaacttacactcgttgatagcatttcttggattttggtgtttgtcaattgcattttttggattttcaatattcatgatagcccttattttcctcaggatgttacatcagttatattagtgatatcagtgtatatatcagtttcccactgaatccctgaaagtatcacaggaccatttgagtgagatacctgaacgtactaaagccgaccgacacaaacgcgcgcacatgcacaatttctaacagcgaacttgctttgatccaaagaaaaatccttttcacgggtattagctaaacaagttctttcgttaatactggctgtgccatcgttgagccaaaaatcacatctgggttaacaactctgatgtgcaagttttcgttttccaggcagccgggagtcatggtggccacgcatggtggtcttgggcaccatggcgccggtctctgtcccattccgttccattgatttttttttttaaaaaaacatttgatccggttgtctcttccgtgcatacagtttgtgcttttttcttggtgctgataggcaagtcctcacctaccaagctcgatcgatcaaagtcttttctagcttccaggttgacagcttcttggtgtcacaatttgcatggcttcttcttgccattgcaatttccctgattatatatcctccttagctttgatttctttttctcttgcaagacctccttgtcatgcatgtaaaggttcgtttttatctgagtttttttggggtcttaacatagtggtagcaggtgagttgcagggggcattagttagtgcattactattgctgacagcgttccaccggtgtacttacatgagtttgcctatttacatcagtatagatatagaagtagaacggctcacctttctcttgttagatcatgactcttgatgactgttgacttgacccgttgctgtcgttgcactgtttccagcttcatctaaagctcagttttgctgcaggctagttttcttgcttgaaatcgagaaatttggactgatgttgatcgtggagtgtgatcacaggcgctcctttcttcgatgaatgtaacaaaaatctgtaaaatttccataattacgttggtttatagtatgcttgagctagctgaactcaactggaagtgcactggccacagttccagaatccagcagaaattagagggccattaatttgtcactcgtcaggcagaatctttgcaacttgttctatcaaatatcctggagagtacagttcatgcttacagccaaacagacatctgtttaggacagtagcggcggcagcaatcacgggcacggcccaaaattgtactacacccgtttgtttccccttgagccgatcgcatgtttgtccttctgtttggcatctaaattttggtcatttaaactcaccagaggtgacaattttttgtgtaatctgttcatgtcaacgttgtggtcacggcctatacatggagtacctaagctaggcacaaacttttgctgcaatttttttttatttctgtccaattgatcgtgaactatcttgtatctttcaggttgtatgtttgtaagactatactgcagtaaaaaaaaccaattcttgcattgactgaatggacttcaaagttcaaccaaattggtcgttttcgaaggacagagattaacacgtctttcaggatcaaggtggactgcttgtgcgagctagattagagcaagttgggacgactacttgactagtattctaatcgaaatgcaccactgttttgcactgagagctggtggtaaatgtccaattcatcgtagcatactatcagcccaacatggtgtttggttgctctctctgataggtccatttttacttctttgaattgctgaatctgacatttttctctatcagtggagctttactatggcatcagttaacctttattatatataagacagtagtttttaccatgagtgtgatttcatgtcatactttccatccaatttctttccaacttttttggtctagtctgctccaagctaagtaaagctacaaaattcgcatcaaacgagcacaaaattagatacaacagttgtgtgattctcgcagacggtattgtttattctcaacaagaaaagatggatttgtttcggtttggtgacaaaacgatgaaatgccaaacaacaactgcacttgtctatttcactcgggggtggactgatgacatgttacagctggttggttctgactggtgtcatctcatcttctagaggcataacaagaacaaactacctaacaaggcgtacaaaacaagcttttatctttagttccttctctgaatctactgctaaccactcttctcatcaccaagtccccgataaagtttggttaccagtaagaaagaaaaatatgagatcctctcatggaaagtgaaatgcaggagcaaaaaaatggaagaaaagattgactactttcacctttgagagctgtgtgtgactgttcttttcccccagataatggaaatggttctcatggctggttgtaatgcatttttcatcagtcatcagcaatggcagttcccagctttctacaaccaccgcgatttgacttgatgattctgcaatggatatggatatcggcttgattcagttttaggtgagaattagatgctaacaagcaattagcaggtgatcgaaattcaggtctagctagtgctagatacgtcccctcgatatgctagattgttattctccctggtgcgccggaagtccttgttgttttctgaaaatttcaagacatgtttgacgtgcagagatgcatcattgcatccacggacagtcttggtcgaatcaatcaccggcgagattaatgtcgtgcaaacttggatatgatattggttttgtcctgatagaatcatggaatctatatatatgtatctggtcattcaaaagtagaagcaaaatgcagaagctgaaatcatgcgacatatattgatatatacctataacattggtcatcactcgttgatcaaaagtacatgacagtaatataatgccacagagataagtgaataaaatgagagggaaaataaaaacatatcacgacgataaggaggagtactttgctcctctgccggccggcgagacaaacgctaaggcacctaaacgatagggaatattttgcagtggtctgatcgatgctatcagtgatgttgccattaacaaatctgcactaacaatggtcttccggattgctagcttaatgcttaatcaaacgcaggtcatgtgtgatagctagtttgacgtcttccctgatctagctcaagggagtagaggcggtttgtccggttatatgctttattttttcttggggtttagttccacgtcgcatgttaatgatttagagtgcgacgtaaaagatggataaattcttacatactatactattgtttttggtggttggtttttttgggtccatgctcaacgagacatgatctaagatgctattctaatttcgtgcagtagaggaggccactcgtggtttagccaagttataaatgcgaagatttacaagtggacgaacacttgacccaacaggtaaacatgtcatatctggctttatacgttcaagtgtgaacccaagtcatcttacagaactcctttctcatttcaatcctagcctgcttcctatataagaggaggccacttcttgtgtattgagttggactcttgaactcaattgctacatgcatccttgatgcatgcagagatatactccagcaattttgaggggctttaattaagttcaattgttacttttctagaccgaactcaattatcactggcgaaaagaaagcaaagaaccctatatagggagcttacaaataacgcttggatcttttctttcaaacagatagatatggtggaggccatccatgagctcgtgcagctaggaaacctcatatccactacccaactcaacgcaaacacaaaagatgatatagtttgggtagcacatccctccggactatattagacaaaaagtgtgtacctcttgcgattccaaggagcgattctagaaccaaactacaactacaattagctttggaaagcacaggccgaaccgaaacataggttctttggatggttgatcatgcaccacaaagccctaattgccaaaaactcctcgtccgatattggatttgtgattggatatgttctctctgtacataagcttttgaagacacggatcacgtattcagggattgtgcatacacaaggagagtttgggagatggcatctgtaaaaaagggctttgcatatgccaagatagacgcctctataaagagttggatatcaacaataacatcatcgggacggccacaagaagcaggtcaagcctcggtgctttcacttcctagtggaacatgtggttagaaagaaatagaatgactttccaagaaaaacaatgtgtaaaatcaaaggtgtttttgattattattctgtgatgaacaattgggcattggagattattggttttgttatttggaatttattcacgaagtggttttggagatgattggaatttacgggtgaatttacaggatactgttgttatttcatgtgaccggtcaaaccgggtagtgtgtgccggtcagaccaggggtgatcgagcggtcggaccggccagctcgcggtctgaacggccgatgctatctcggtttctgtttcgggttggttatttggatatctgtgattatttcatgattatggcttctagatggatattatatgtatgtaatactgttgtttgctactaatgagtcaagttggagatagcttggttttagaatatggtttctttgtttatttcatgtgtaggtgacttgatgcctcgggagagtatttgcggtgatggaccaggagttggcttggggataagacgacatccgtagtggtcagagatcatgcgggatacttaggttagagttaatgcacgtggttgatggagattccgtatggcatacgatggaggtattgtgtgcgtatgggatgcggagtcgaatttggaaggagtccaaatttggtacgattggttatgtaaagtttctttcttgtactagaggattcctaaggtgtttaggactcaagtatgagtttggttcgtggctttaggctgcttacctcgggtataaatagagggggagcgtgaggcttcccggtatcgcttttgagagcaattgagttgagctttgagttagggtttcgagtttagtcaaaatttttgtaaggagtgctgttggtgcactttgtaaacacagagagaatcaataaagtcgtcatccactttaagagttcttcgatttgtgtttaccgggtttcggcggtctaaccggcgatctaccggcggtcagaccagcggcatcgcggcggtctgaccggcgggcacacggcggtcagaccggcggcgacaggagtcggcggcaggcaatctcggtggttcgactgatcgatctacatcggtcagaccgacattcatcaggcggtccgaccgatgcaactacttcggtcagaccgcgatccgtcgaattcgagggtaacttttatttccgctaaaatttttcggtttttgggtataccaaacattcaccccccctctggttggcttagttcttgtgattcgatcctacacaatgtgatgagattgcggtagtgggtctcatcttggaagacctagaccaacaagccctagcttttaaactgccctagaggcggggctttcaatttattgtaacctcgccaggttgtaatctcctcttaatcccatctccctctgaaatttattttgtattctttgaattttatttcttctcaatatatccagcagagctctttgatatagatactagttacatgcatccttgatatatatgtactctgacaatcttccatgtctctccacaactatgttttagggtcaacttcgattgctagatgtaccattgatggagagagcgaaggtgtactcactcttctgttatcttaaaaaaaaaaagagaagcaaacactactgtcatttacaaacaacatagatgaacacatttgacaacaaaatggatcatagtacttttttttcctagaaagaacacatattctattttcttaattttgtctattaagatagataaaaataaccctccacatttactctggaggctggaaattttcacattactctgagaaaaagaaaaaagaagttagaccattagcttgttctgttggcagggataaaacccaatcgaattcagatggatagtaatcataccatattctaaaacatacttttaaagtggattcggagcaggtgcgtatagtgtgcatatgttataaagatagataaaaaagaagacaccacctttgttctagaggctagaaattcttatattaatcaaagaaaaggagaaagataagaatcattcaattgtgaagatctaaattataatggtatagatcggttgatatagtttatagaaaatatgattttatctatggaaaatgaagttaagagttgtatatgaaatccaatacgacttttaaaatccatcgatataaatcctatatatctataaagttcatccccactaagtgtagttaatgctaattctcatttctctcgtgaagccacatcacctcaattgtttttagcttatggatgattcatcaagggtgtaaattccatctcttctccccaaaaggcacactatacaacccaatcatttataacctatggataattgataaaggtaaaaaaaaatatataaacacatgaaaaaattgtatagtaggtaagaaagaaaattttagaactcatacatactatattattacacaattctcccacaaaaatgcgcggggtacccatctagtatacatttacatctatgtaatcaaaagttaaatgttgtagactaaatccaattattattatgtacctaggccccttgaatgttacataggaaaatcagctagttttacggtccttaaaaaataattattattatgtacccatctagtatacatttacatctatgtaatcaaaagttaaatgttgtagactaaatccaattattattatgtacctaggccccttgaatgttacataggaaaatcagctagtggtttacattatatgactagagagtttacggtccttaaaaaataatacttatataactatagatatcaaaatttttcactaaaaattttggtacctagtggctagacataccaatttttacatgaaaaaatatggtaactcccgatattatcttaagaataatacatttaccattacatagccattacagatggcttataaattgggataccattcaagaccccaagcctccaactactcatttgcttgcaagcttaaacttggcagttgttcaaagctttgtccatagtttaatctgtctatcctttaggatatgcatggtcacaccacatgcagtgtttcacatcagttacgttgatcttctattcaattttctcttactccatataatatgatcattcagtcaccagttggtattcagattttaaaatgtttgtcgattaagacatgaatcatatttctcaacttatacgtacgcaatgaattgaacaataaaacccaattaagttactaatcttttaaagacaaaatgacggatatctctgccattttttagagacacaaattaagctactaatccaatctgtgcaattagcgctgaagaaacagtagtgaatcttgggctgtgtccaggagtggcgcctgacctttggaggtccatattacacgtcccaatccaaagttgttaatgacgtcttgcctctctagagcctcaccttgttgcatcctgcacgcattgtgcgtatcaaattggacatctataatctcggtgtttggtagcctatcctgtacatgggtttgtacaattggatcgattacctcatacataaccactgcgtgttgggctatcggcaccggcacaccgccgtcctacagctagagtatatatgatactgacacatcacacaagcaaccgctcaatattgcatctaattataaacattttgttagaatgatgataaaataattctctctgaaaagagagaaacacctgtcaaaattagggtggaaaacaatcagataattgtcattgattaatatttgataatagtgtagaaagatgactttttatataggatcagagcctccaaaataataaccttatatcctattaggattgatatgtatgaatagtatatgtatacaaggatgtataaagataaatctagtcgactagaaaaaaaaaagaggaaattctgatgacagagtttgctagatgtaatcggcgaattggtcttcaagtaccgatctccttgattggataattcagatatggttttggtgtcattagtttgattatgggttcgattactcgatgtcctaactccctcttgggtgggggcggattcagaaatgatggggaggagggattcatctttttcttatgctttcggcccccctacttttctttccccttccttccctctctctctctatgaggatccaacggggtagggggcttgagcccctggtactcacgttgaatctgctcatgcatgggctatatatttacacctttagtctcttacttctcagggattaataaatacaatcttggtattgtcctgaacagtcctgctcgagtccggggcaattttaatgaagctattttgtattttcttatttgctcggagagatatatctgatttggggaacctttcccaacacattggtatattttagcctgatcttaggccctaattcactctccatggacgaatcttgtggaggaaatctaaagggctttgggttctcgcttctctctaaggtggaacatggatcactcccctactgcatagctttggcagatcgcttagccccattcattttcaacgcacaaataaaagaaggatgtatatatgagatattgtggaacatgatttgattatgcaagtggttcagtataaacgaagaaatttcgaacaaaaggatcagaactcactgataggaaaaggaggataaaaacaatgcttctctttttcatttcatgccggatgtaacaaaatatcattaagttttcctcaaaccacaggagcacctagcgcccagaagggcaaagcttttggttcggtgtacttgtcatttttttaacctcatatgttcggtgtacttgtcattttttaatcccatatttagtacaccctctgtttaaaaagaattatcttctgaagattttcagaagttagttttctttggtacgaagagagtacacggtaataatctctaaaatatcaccgcggcataatctctaaaatatcaccgcggcataagactaaacaaaataaaccaccaataaataaattgttagaatttatcgatcaaagctcttatggctgagtttagttttaaattttttttcttcaaacttttaacttttccatcacatcaaaactgttctacacacataaactttcaacttttccgtcacatggttctaatttcaaccaaacttttaattttagcgtgaactaaacacaccctatatctaggtaggcaaggggaagcacgtaacaatacgatttacttgcacttttgctaaaaataatattacgccgctggacacgtactactatatgatcaagccacgagagacaatattccatccaagtttcatttatgaggatctatgtcgctacaaaactcaacttcttgtcttgtccgaggaagcaaaacagttcatgagcagcaggaatttttttttttgatagagcataacttcggatatgcacatgcatggacattggatatacacgcacgaatttccaggccctcgtcagctcaccgataggccatctcttcagcaactgtgtgaacctttttatgggattagagaatttcgttcaaatgtttatatgagtaaattaatggtcgtcttaattaatttctttatattctaaacgtacagaatatgttcatattaattccgtctcaaaattgcaactcaaaaaatcagaaggggtctaaattttttaccccatatttaaaaaccaaactttaaatttagaatgaattttaattaaattgatgaatttttaatgggtgatttagggtttagggtgctgataccgcctcatcggaacccatcgcaagtcctctcaccttcccccaccctctccatactccttcactgaccactctagtggtcgccaaaattcacagcgtaattcacaagaagccaccaaaaataaagctagaggttattggcacaataatcgtggaataaattggaaggttagaaattcacatggttttattaattcgtaaatttctatcgaatgtaatgtgaagatgaaaatgaaattgtcatttgttaaatcatgcacacatactctgcttccaggaggctcatgcagatactccttctaagaagtagtactgtctgtactgatgaggatttgtgtgacccaactaatccattgttcatgtggttggcaacaggccaggtgctacaagttccacgaaaaagaccagctttaggcaccacagatcatcaaaatatggtaaaaaaaagaaaggcattttcaagaaagaaatagatgaaaatgagagggacataaccccatgatagccgtgatttgcacggtgcctatggcacctcgttactcagttagcgtcagtccgttaaacggtggttttcacaacagagacgttaatcgtcggctccaaaagcgaaatctttgctggcttttaggtagaaaaacgaagcctctgcaataatcagactaattaacgtcccaattgcatctttttctttgattgattgttggctacttaacacacgttgaaaacggaacgtacgtgtattaaaatctcaactcctccctaaaaaaaaataatctatgtttcacttttcaaattcaaagctacgtatgacactcaaccactaaatttataatcatacattatgaaaacttacaagcgtgtgatattatgaaattttttagccatgccatatctgaatatagtttggcagactatatatatttttaatcaatacaacttgactacatgtagtggcaagcttaaccatcatgaggaaaaaagttagataccacgaagaagccaaatatcaatactattgagagaaatatgaacttacttacaaatttaacgcagatagataggggattcgatggcggccctgacaactgggttagcccaactctataactaagttaagaattgagcttttaactgggtgtactaagtggttggagatgtatttttcatctttcatcatccttgaagataatcttgagctgaacaactataaagataaaaaaaatgactattaacatttaaaacaacagatgttacttgctagggtgataaaaactactaacctctgaactactatatttataaataaattaatggcaagacagaaggagccgccactcatctgtacttatacctacttcagaacggcatttttctttttgattttgccgcccctttacgggaagtaatactattgcaaatccgacatactatatagaagagattgattgaggtcagggatataagacatttctatcatcaaatatatatacaagagagattaactactcgtgtgcttgtccttggcctgctttggtaatggtacataatacattcctgttccaaatagataggcaccatgtcaatgccgttcagctagctgcttctgcaggcaaagccaaagacacaagatagccctgtgtagttggatacagccaacatgtttcagtgcggatcagctgcagaagaagttggatttggccggagcccttggagcaccgatctagctaacgaacgaacaacaccggtttgctcacctccatagccgctcgcagacaagcaaagcatccgcccaatgtgttcgtgtgatccaacgtactacgcccctgtccctccttttcctagtaccacacacacgttttcaggtttcagtacgagctagctagccaacacccgtttgcagcagtggcgttttgccagaaaccaaaatggaaggtgattttgttatttgtgtaataacggtggagtttaatttccttagatatatattcagagactggctaatgactgggtaattataactgcaaaacacttgggctgattattatctcccacttggccctagtcgatttcagtgtttgttagcttgcaggctaccatgactgaatgattgattattccgtaatctgtagctaatcagatcggatacgctaatacggcgcagtaggtatagggaggacaaagtccacaggcccagtagcactctttctgtcactcactcactcactcactcactcactagagttatagagcagacgactctctcactgtcagtcctcatgaaactgaaagctatgaaaatcccatcaaaagaacttgaccgtgaaaaataccccaattaaattacataaccatctaattttatgatgatagtttggttcgttaaaaacctaaaccaattaggccccgttctttcacgattaagatataagtagattttagcacggtttttaaactgttgaacgatatgttttatctgaaaactttctatatttatatatttccttcgtttcatactataaattgtttgatttttttcccagtcaaactctattaaatttgactaagttttttgcaacatataaaatattaaattggttttactaaatctaatattgaatataatttgataatatgtatgttttgtgttgaaaataatactatatattttttatatatttggtcaaacttaaaaatatttgattgaaaaataggtaaacaatttataatatgaaacggacggagcatcagcatattttaagtttgcaataatcaaggctcaattatgcactaatgttttttttcttgttttgtgtaagtaatctgagccgttcgatcacgcctcttctctcccggatcacacgacacccaccgtttgcctactttttatctccgtcctcttggattggatgcgtccgacactcgagccacaccgaatcccaaccaccattgccgcgccgagctcttcttcttcaccatcagcgaagcagagcagagcagaagcagagcgcggagatatgctcggaggtcgacggcgaggtcagcagcaagaagcgaggtagcgggcggcggccgcagagagacatgtggacgccgtcgcgggggtcggcgagcgggcggcgggcgacgggtcaccgccgcatcgcggactacctcgccgacgaccggacggaggcgtcgacggagaacgggtcgttcaacacggcctacagcgacgagctgttcgcgccgacgtcgtcgtccgccggcggcgatggcgtcggtggaatgctgccggcgttcctcgccgaccagagcgacctcgtggaggtcatgctggagctcgacgaggagtccatggtggtgcggagcgtgacgcccaccacgggcgcgctgtacgggcccacgtcgttggccgggggcggcgccgcgcacacgccgccggggagcgggcggagcctgagccggtgctcgtcgacgtcgtcgcggatacgcaagaagttcgcgtggctacggtcgccgtcgcccgcgccggcgcctagcgcccccacgcagtcggagccgccgccgccgcgggaggcggcgatggccgcacgcgagcggcggcgcatccaggcgcggctgaaccggtcccgctccggcgccaggcgcgccctcaagggcctccgcttcatcagccgcaccaccggctccgccgaggccgccgagctctggacccgcgtcgagcaccgcttcaacgccctctcccgcgacggcctcctctcccgcgacaacttcggcgactgcatcggtaagcaagcaaagccatcctccatgtccatggcgcgccgcgcgcgggcgcgatcacgcgatgacacggcgtacggcgccggcattggtgcagggatggaggactcgaaggagttcgccgtgggcatcttcgacgcgctggcgcggcggcggcggcaggagctcgagcggatcagcaaggaggagctctacgacttctgggtccaaatctccgaccagagcttcgacgcgcgcctccaaatcttcttcgacatgtacctaagccagccataaatccaaccaaatttccttcgaattttgagttcgtgcgtgtttcgatgaatttgtaaaaaaataaacgagtttctttcagggtggataccaacgtggacgggaggatcactagggaggaagtgcaggaggcaagtagacttaattacacttacttattactccatgattaacttgtaaaatcactggacagtaacattttagaagcttccgttgttgcatggctaacgacattactactaccgtaactgtcactctcactctcacagcatttccagtgtcaaactaggctacacgaatgattaacttcactgttagttaaggtaattaaataatttttactgcatgtggttatttttttttttacagctgatcgtgctgagcgcgtcggcgaacaagctgtcgaagctgaaggagcaggcggaggagtacgcgtcgctgatcatggaggagctcgacccggaggacctcggctacatcgaggtgaggatttcgctttcgccatttctgtgctctgtgtccgttgctgcttgagcttgactcgtcttctccggcgacggcgtggtgcagctgtggcagctgga

SEQ ID NO: 23196 - DNA, 1724 bp, Oryza sativa
tcgtgcagtaccgccgcacgccggcgttccgggtgatggggtactgcctcccgacggcgaagggcgccgccgagacgctcaagctcaacatggcgctcgtcctcctccccgtctgccgcaacacgctgacgtggctccgctcctcctgggcccgcttcttcgtccccttcgacgacagcatcaccttccacaaggtaggtactcctcctcctctcgagctcaccgccggtggttgggaggtcgccgtcgccggagttcggggagacgactcgtcgcccaatgattggcggccggtgcgtctctgccttgtgggcccgggtgggccggctcgggatcttctgcggctcggcccatgtggggcggtgcgacttttgggccgtgtaggtggagagtagctcgggctttaagtgggccccaccggggcggtccaatcagtgtagcgtggccggggaacccgcgggtacagaagatccccggcccggtcggctcagggtcaaagcgccggtcattcaaaagtctccccgaccgacagggctcccactgtcatgtggggccactgtaagctactccaaccggcagggccacgtgttcattaagctaagctccaggcataaaacgtttgtaaatgtacttataggatcaaggtggtcaagatcgcaataatcgtttcttctgacattagcaattataaatttaccaccctcttaactcgttatcataaaactagaatatgaatagtgtaaagcattttattgtaacatataaaaaccattgataaatttacaaatacccctgcttatacctatgtaggatcagtcgtcatacgtcaaatttaaattttaaaagttaatttttatttttttaatattttgtttttaacattttctttggaatttaaaacacgtatataaaaattttacttacgctccgttcgttttttctcttaaatggcaagaaaaccggagcaaagaaattaacaaataattaattaattattactccattacaaacttaaaaaatagattcatttgaatttttaaataaaattttatataaaaacattttataaaaaatacaccgtttaatagtttgggaaacgtataaaaaacaacaaagttgaagtttagactttttttaggtaacttttttttagggaacgaagtttagagttggagtttagaacgggcctttataaattaattttgattgtttcatctactttttcacaactaattagttgtagagcaaagagagcgaggctaaaattagcacattgttgaggttgctagtaattgcaaaagctaaaaaactttggctacacctgcagatcatcgcgacggcaatcgcgctgggcatctgcacgcacgcggggacgcacctggcgtgcgacttcccgcggctgatcgggtcgagccgggaggagtacgagctgctgctgtccggcttcttcggcgcgtcgcggccgacgtaccggggcctcctcgccggcgtcgagggggtcaccgggatcgtcatggtggtgctcatggtggtctccttcacgctggcgacgcggccgctgcggaagcgggaggcgccgcgcctcccgttcccgctcggccacctcgccggcttcaacgccttctggtactcgcaccacctcctcatcgtcgtctacctccttctgctcgttcatggctggttcatgttcctcgtcaccaagtggcaccagaggacggtaagta

SEQ ID NO: 23197 - DNA, 688 bp, Oryza sativa
tgatacgaaaacgtcctataaccgtaaaaccagatatgtggggtctcttaactatacaaaaccggtcacccgaggtcctttggtggttttgactccggtttggtctacgtggcggctgagtcagcgtgggacccacgtgagccccacatgtcaggtctccacgtcaccctctctttcccctcttctctcccttcctcctctctctctctctcccttcctcctcctctctctctctctctttcccctctctcgcacgcacgtggaacgccgggaaccttctgccgcgccacccacaggaacaacgggagggcgagcggcggcgggcgagtgctgaggacctcggcgacgagctcgggagccacgcggtggagcttggagaggtccgcgacgatgggcgggccccaacgctggtggcggcggaacgcgtcgaggaggaaccgcgcgagcagggaaaggcggcgggcggccgcggtggcggaaggcgaaggcggggaggaggaggagggggaaaggccgcaacggcctcggttgggaggagtcggcgaagacgccgcctcggttgggaggaggcggcggtggcgcggtggccgtcacccccaacgggtctctcattgcctcgctctcccacccgtcttgcctccatccactcctgctccacctctccgcgccgcctccacacgcgctccgc

SEQ ID NO: 23198 - DNA, 19185 bp, Oryza sativa
gactaatatttcaacttggacaatatgtgtcagggttttggtgggacgtcatgatttgtgcttggaataaattagtgcagctaatccatcatgctgttaatttatatatatatatatatatatatggaccagtagggtcaagtaagatacagaagagatttgcagccatgttgttaattaattattattcatttatatcgtgtgcaaagggtgtatcctgcaagccaatgaccttgtactaatatatactatatatgttcacattagtgcctacgtgccctttaaaaaattgtacacatttgtagtatgttttcttggagttgttcatatactttcaatatatataaaaatgaggtacaaatagcaaataataaatttccatggtactatatatctattccgaggtagcggtagtacgtagtactactaattaattaatttgatagtacatgttctattgttttctatttaagaattgcaataagcaaattgtcatatattccttgatcgattgcagggtgcccaggaataatatgttgtcctatctatatgtaaatattgctaccgattcatattgaaatgaacaaagtgtacttttggcacgaggccggcactaatttaatcggtttccctcgacattttatgctggtccatcatatagaaaatatccccaatttattcctgttctcaacaattatgacaacacccaatagatcaggacattcagctcccaaaacaattttacgaataatgacttagatggttgttgcttatataatcttttacatatatatcatgtttggaacatatccgtgcacataagtttcccgtgaatattttgtatacacaactagcaaatgtcacagaaaattctagaaaagtttagacacatactcaggttaattaaatagttgctctaattaacagacattgtgtgagagaaaactaataaaacatacgtgtgctacaaacgcggaatcagtaatattggagtaataatcttctaaaaaatatacaaaagactagtgtagatgatgtacctgttttctgacggggcattgcgaagccattgtgcatcggtagtaggctctagggcaagggttacccttggccatcttctgcccgtacttcctccattggcatccatcactgatctacatatataaacatgtatatatgcttaaagttaatttaattactgattataaagcatatatataactttcagttttttcatcagctatatggtgcatgtgtaatagccggtttaatttgcaatgaagttcacaagtactccatccgtttcaggttaattataagactttctaacattgttcatatttatataaatgctaataaatctaagtacacatatatatttagattcattaatatatataaatatgggcaatactagaaagtcttatagtatgaaacggaggaagtataatacactacgaataaaattaattacttaccattggagcctcggatcgtgctcgcaccgacaccctggccttccggcacggcgccatctccgccgccggcgcctgctcgccgccgccattattctccccgccgctgccgctctccggcgtcagccgcgttaacgtcgctgccgccgccggcctcttgctaccaagagaaggcgacacgttctcgtcgccctcgccaccatcagagtcagctgttctatcgccgtccaccgccgccgccgctcgtcgccggtggctcgccggagacgccgccgcgagcgcgtccagcaactgcacgccggcgatcggagcctacaccaatcgatcgaacagtagcacgtacgtcaattgctattactgataaagactaaagtgatcgaaaaaatcaaggattagcatgtgccaactactactaagtaaatgcagcttagcttcagtttcaagttcttttgtgtttggtctcttgcagcatggattctctcttgtttgattctgtggctagaaacacactgcacacttgtgcatttgtatctcgatcgacacacgtcgatctcttgcaattaatttgttataaaagaatgatggatttgatcaccggcctaaataaatcatggtgttgaatttatgctgacacgtacggtatgcatgcacggtctcccttcgacgatcacaaaattcaaagggtgatgcttgaggcacacaccttaattaattaattggaaaatggatgcacagaagatgagaagagatcgatatatacatgcaaaaaaatgtgccaaataatgtatttctcttgactacagatctaggtaagtatactatcgaatttatcatgcaaaaatatgtgccaattatgagccaaaaacgtattgggcaatatacatgtaatgttggagttattagatatataaaggaatatatgcatcaaaaatagcaaatttatcgaattatatatgtgtacatatataattctatgttttagttacaatatgcatgggcatgtccatgatgcacctagaaaataaacatatgtataaatataatttttgaataattgacaaattagtgcagaggtttgacaaactagctaatcatgaatatttagcaagaaatcttgcacaaactaaaccgcacgtcactgtgataatcgagagtgccaatcaatattggttaggttcatccatataggtctatatccaaatgttttaggaaaaaatatatacatcattgacatcacggtctacattctgaattgaatagtagttggtaacagacttaatttacttgattagtttgattatgatctgaactaacgacatatttgaaccgcggcaatgcgtgcttgcacgatttgtgttaattagtggcgtctagcatctgcatgaccgtgtactgttcgtcgaaaaaaatcaattttttcccttaatcctcatcgatgagttaattgtgcatatgtatatatagaacaagaaatcaggagcagaataagccgtcgatcgttaatttgaaacacaaaatgggaagccaggttgcaatcagctatgcggatttataggagcagtttcatgtgagacataatttaattactagttgctgcgtaacatatcatcggtttcttctattgaaagaaaaacaaatagtaccatgtagtatataatttgctgcacatgaaagtacagcgttgactagagatcactataagttagtgtgagagaatcaaataagtcgtacgtgtatcaattttttggttgatcgatcaattagcagcagcaggccggaaaacatatttgatttgatcgggttaattgagattattgtcacgaattgcaaaaattagtattaattacatacctgctgctgatgcttggtgtgcagctgctgcgcctggacgagctggtggtagagggcgccatagctgctggtgagctcctccagcctccgccgcagccgccggttctcttcgccggcttgccggagctccccctccaccgtcgtcgccgccgcatccatctgctgcatatatatatataatgttatgaattaattccgacgtacgtactcccttaaggtcatgaaaagtatatatatatatgtgtgtgaattgatcccccataatagatcaagatgagtaaagtaagtaagatgcttaattaccttgctttggtgaatatttgactgccctttcttctcctcatgatgatcaccgtcgttgaccgctgtcagcaagtccagcgcagtctgctcgatcgatcgatcaaacacaatcagaaatactaatcaagatccatcgatcaagccatcgatcgagatcacatgcatcttgcaacctaaatcccataattcatgaaacatatatatgcaagcatggatgtatcgtcaagcaagctattagctagatcttgacgacgacgacgacgacttacgctgaccataaatccggcgtggctgctgctgatcccatccgcacggaggacgtcgtcgtcgtctctccggccggcaccggcaccggcggcggagaagaagtcgagctccttgatctcgcgggcgcacaagcctcctcgctcctcttccccctcctcgtgtcgttgcttctgcaccatcatctccatggatagagctcgatcgatcgatcagtagagtgagaaggagagaaatcaattaaagtaggggagagctagctaggtcgtagctagctagctttatatggctcttgctcctactactactcctagctagttagctaggttccaagagagagagagagagagagtgagaaattagtaaagtagtttaacctatagctagctaacgacgagaagctagcatatgtaacgtgaaacggaaagacttggacttggaccaaattatgcaagagaatggggatcggaatcgatggggatggtgggccagccatgtcagacggcggcgtacgtcagcgtgacaggtggatgaggcactcgcgtccacgtgtactgcatgggccgggtcaacggagtcaacgcgatgtagactccctttcgatcaccaagttgatcgatcgagataagctatagcctaggagtgatggtgcgtgcatgagaggatatgccacgctctgcagcaaacaattaactccattcagtacgatctctctctctctcaaacgtccatgattttttcggctagcatctataaagttgtgtgctagatgatctaagtttaaagtctcgcttcttctaattatctgatattaggttcttccctaatattcgcttcttctaatcatctctcttttacttgacttgatatcattaattacacaagaattaatcatattgattagatttatcttgcaaaatacattttttaaatataggctgtgtttagttcctcctccaaatttttttttgaagaatacggacacacatttgaagtattaaatatatactaataataaaacaaattacagattccgcctgtaaactgtgagacgaatttattaagtctaattaatttgccattagcaaatgtttactgtagcaccacattgtcaaatcacggcgtaattaggctcaaaagattcgtctcgtaatttacatgcaaactgtgtaattggtttttttcgtccacatttaatgctctatgcatgtatccaaacatttgatgtgacggaatttttggaagcttaaagggaactaaacacaaccatagtttcattatttttttttttgctatgtaaagaaagtaataaaccagtgtcaaccacttgcggattaatgcgcatgcacttgtagccaatcgaaatcaatatgcatgaaattcaaaaagataaacatgtggtaaactctctttcttcataagcgtagtttcatgagaaaggtttgatggcattttcacggccggatctatatatatctctacgactctacctagcgtgttggatccgttcttgcacattcacacaccatatggactgatgcctaagtgtacattatccagccgcaatatgggtggagaaatcatgaagaaattgacacatgaggcttagtatttagctagagtcaaggccttcatcagctagtagttgacaatatctgcatatatatcaagaactgaagaccttttcagtttagacttcagagtgcaaaaaccagctagggtaggttgtttctgcaagttaattagttgttgccatgatttgtatgtgaacactaagattattaactaatgaaacattgaaacactacttgtttttgtggacgttctccactgacacatgcattgacaatcttagcctgccggcgactagactgtacttgtcgatctacgccactacactgtttataatttttgagtctccattgacggctagctagaaattaaactgcaaaagatattaaggacaaacagtgctaggatattattgttcccttccatgatgatggagtactagctagtagacatcatctgtcaggaatcaattgaactgaagcaataacaatcacaaacatatcttttgttgtagactcatgaaatattaatttatttacagtgaaattgaataatcatgtaactacaacacatgaagcacaatatgagcagtatatttagttaatttcctatttgaattatatacgtggttctgagcttgcgtggtgatccgaattatttcaagttatatatattcacactctagtcatcttctatatgtatatatatttctcaagccaattattggttgctaaccaacaaaagataaaaagtagagtgcatacatatgaaattaaatatatttaattaattgcagccaacatggtccgattaaatatgtttacaagtagccaatgaaacttttagagactaatgaccatctggtccagctttaatgttagagaaagaaaacagggaaaacactagccaataaagtacaagcataaatcaatgtgatcaaatgtgtactactacgtcgtacagttagatatatcataaatatatcaccgtgacatacaaatatatttatatatgatggacaaccttaatcaggcatccaatcatatatcaagttgataagaggcaacgtgtgtttgttcaacctgcaggtcttaacaaaataaagaaatgaaataaaagctcctacaagacaaatatgcgtaggttagctaggcatacttgctccatcccaaaatatattagtttacttttgtaggctaaggctgtgtttgttcggataagaaaaagagaagaaatctctcatttttcgctatttttctttgcaaaaattatctataggaaagttactataaaaaaatatactacctccgtcccagaataattgtatttctataagattagagacagattagcaacacacaaaaatgaccataattactctataataagcacactgcatgcacacattacatacttaaacttgattaaaaggaaggttgggagatgaggatgaaaagatgggaggctaggagacaatatatcttcatctaattaatttattggattctacacataattagaaatacattttttttacaaaatttgtatggtaaaaatacaattatttaaggacggaggtagtattaattaatttttcaagttcagaataattaatactcaatcaatcatatgctaatgactcacatcgttttacgtatactctcaatcttctttttttctcctctcaaacacaccctactaaacttatttttaggtaggagggagtagcgtgcattcggtgcgtgcatgtgtgcagtggcggatttaggccatttctgtggggtcggctgaccccacagttttttgaaaaacaccctttaaatctcgattttcatgtataatccaaaaataattagagaaatgactctacttaaatataaatcactagtaattgatcctacaggtataaaatcctggctccgccactgcatgtgtggacttcattacttgataaagatcaagtagatagtatgatgtctagtgtgtatatgtatgtagcaaaggtgctgatgaaaacaaaacaagatcaatgctgagttactgtcttacatactgaccattatattacacacgtctctctccaaagaccatggccaagtctagtgtgtatatgtatgaccatttgcaaggaggagaatgtatgcaaagttgcttgcatttgtatcgatccttgatctgcatgcacttaatttctacatatgcatctcgtgtgcatgcatgggccggcctcattattgttttggtttaatttaataagtaagttaaagttccttcaaaaatatggctggtacgttatgtgtctatcaatggcaccacaagaatataattaacttatatatgaacatgcacatgcaagatcatgagaggccctagttataaatataattaacgatcactaattaatctagtcttcacaaggtgacatatgcgacattgttgaggtcaatcaccgacggccgtggaaagagaaaggcataataaagatcacaactcacaagtaaaatctgtaatttgcattgtgaggtaaacttgaaagcaaaaggcaaggaaaattaggagagagatcgatggatgagaacgacacgttgacgtgtatatgcagagacaaattaaggagctgagattgtattggcagagctactagctgcaagagaagatcgaccagaaacaaataaacagatcaatccatcgaattcttgttgatagcttttagctggtaaaagaaagcggcgcccagcttagagtcaatagcttaattagcttgcattgatctggagtcttctctggaccagactaagctactagtactacagcagtagttgttgatgatagtaaaaggtaatactagttctatgtattggtccagccaatagtccaacgagacaatccaattaaccatgcaactggaccaatttgcagaggaaattaagcagattaatatgcatatggaatatataatgtattttgtgtacattctagtttatatgatacagacatcagaggcgcctataccttctagctagctagttgatgcaaagttgatatgcatatcagagtagtccattaatttgtataccttgaaacttaagaatttaattaatttagcttagagaaagacattattgattcatcagaaatagatatatcttaatttcgagtaattaaggttgctaggttgatgcccatgaccgttttcttacctttcatgcagttaattataattctggcatatattgattgcaaccagaggccaaaattttccagttagctagaaggcgacatcgatcgtgaaggcgtcggaataagccgtcaggttcagagaggttaattcttcgtcaattcgcgtcgtttggagatcgcatggatagatggtatagtagctagcggccttgcatgtctgcttaattgatctatcaatcgacctgtatgtcttgaattcgtcagttcctttgaagattttgagactagaatgatcaacagatagctagctagctaggagctagacggccggaaaattcatcttagaattgaattgggcaaaaaaaaaaagaaggaaatgctctcttttaattcttcccatggatccttcgctttcagtatatattccttagctacaagtccaataaacgacggcgatctttttcacagctagctgagtttaggaaagacggataattcgcttatacttcaacacacatcttcacaagaaagctaactcataatttaattgtgaggatctttcgtagtcctaactacaagtctaacgaacaataacctcttctttctctttagagttacatgcaccaaccaataattcatgtgaaaaattgaaagaactggcgatgagtagtacttcacatgtataaacatgtatatgttcaatcccacacacaatgagagaaaataactacatgcatgcatgatgggttctctcacatccttaaggatgtgttcgctcgattgagttgggaaccttctcttgtgaaaacaagctagctctatagcgtatgattaattaaatattagaaaaactttaaaaattaattaatattatttttttcaataacttttcaatagctttttttaaaaaagcatacctttagcaatttggaagcgtgcatgcggaaaacagaaggggtatgagctgagaaattagactcctgaacacataccaccatttcaaagctaggaaggttgaactggtttagaagcaagtttacgtttagcaacataattgtgaattttcaatcctattctaacatgtaagttcagttttgattcctctctttaattatcacctcatataattgtgaacaacacgtacgggttaaataattaaaaatatgggtatgtacttgttaatttaataggattatctagtttttcacttacttgaaaatacccacaaatttcaattacttttggatgttttttacttacttgaaaatacccataaatttcaattacttttggacggctcatatcgtaccaagatttatacagtcatcctaacttattttctccttcccactctctgtcccccacaaggctgcaacatacaaagagattacaagcatgcaccaccgccactcatcaccttccccacaccctcctccccctttgttgcaagtgaaaggattacccggccaatctctctaacactctgtcccacgctctcctcctcctccccctcccctcccaccaaccgctccttctatgagtgatagcaagatatccccgcctcgccttcttcactactaaagatgccactgccgcctccaccttgtacttactcaggatattgcgtcctcacctgtcatcttcctccaaccctacggctcttgttccgcgtcattgttgcctcaccgtatgtaagcctttgtcaagcttcctcccctcttcctcctcaacccccgtcccgttccgacccccaccccaaagtcctaaactctgattcgctggcgctgaagaagagagaggttagccaccgtaccatcattgtcatgggtgagtactcaccatctccctccctctcatctcttggtgcctcctcttttgcacaggttgagggtgactaaaatttctcatcacaacaacgatcagtcacccctaattcaatcgctagctatgtacgtacctaaaagtcctccatcgatggaatcatggaaagatgtatctgaccttgtgaaaagcaacgtaacagctccaaatcaagtcgtaattaacatctacaaagaattgcgtaacacagtactgttcctttgattagatgtgcataattaatgcatatatgatatttccaggtcggcgctgccattgtcagttgctggtacctgcatctctgctggcctaatgtgtatgggtcctagctagcttaattctgcatggacggcaaagccatggaaaaaaacgatgaagctaagatccggttcagttcactccaaacttccccctaactcctaactttccatcacatcacatcatatccaaaactttcctacacacataaactctcaactttttttctaaactaccaactttcctcaaacttctccccaatttcagaaactaaacacagcctaactactccctctgtttcaggttataagatgttttaactttgatcaaagttaaactacttaaagttttaccaagtttataaaaaaatagtaatattttcaacccaagataaatttattatatatatataattactatatttgtttataaacttagttaaacttgaagccagtttgactttgactaaagccaaaacatgttaatctgaaacggagggagtacttaattagctagagtatctctcactcgaagtcaatttattgatgaatgcttgcatgaaatatatttgaccgatggatggatggatcgatcgtacgtagtgcatgttgatatctagtccaaagtcgtgcaagctcaaacatcacggcatttgactgacggtgacaaaacttaccaaagccatagtcaaatgaaagccatcttttttttattattattttcttagctaggtatcgagtgctgctggtaatgttgatcaccatgattaataatgtgtggcacggaggatggaatgtactaatgtttgaaaagaaatttccttttcaaaaggatgtgacaaaataaactaagtactgtgtgaaggagaaacaaaaaaaaaattccatcccaaaatttattttagaattcataattagattttgaggcgtgaatagatttctctctcaaagatatatactaattgactttcaataataaaaagtgtatccaaaccccaaataaataggatcagaattcactctgagcaaataaaagcccagggatctttaggcttaccagtctgtattcaaagcctcactcctatttgttagatattaggccattccctaatgttcgcgtttttttttactccgagcgagggattaggagccagagcactacatgatcgacttgtggagagcggaagattagggtccccaaagttttgggatctagctttgaggtctgctggagccactttttctttaaaaacacatccaattttttgtgataggaaatagcattagtcatctattgcgcatgctctaataataaccatgtgttatatatggtattcatgaatataactgtatgtatctttagttggtgtatagaggacatactctgtttggacatgtacaaaggtaatattcgatataatctcttaattaatacatattgtaaaatcaaaggtgtttttgattattattctgtgatgaacaattggcgtcggagattattggttttgctatttggaatttattcacgaagtggttttggagatgattggatttcacaggtgatctacaggtactgctgtttattggaccggtcagaccgggcatgtgctgccggtcagaccggcgcagcctgcggtctgaccggccgacgctgtgtcggtttcagtttcgagttgtttgtttggatatccgtgattgtttcatgattatggcttctagatgtatactatacgtatgtaatactgttgtttgctactaatgaatcaagttggagatagcttggtctcggaatatgggtttctttgtttatttcatgtgtaggtaacttgatgcctcaggagagtatttgcggtgatggaccgggagtcggcttggggacaagacgacgtccgtggtggtcagagatcatgcgggatacttaggctagagttgatgcacgtggttgatggagattccatatggcatacgatggaggtattgtgtgcgtatgggatacggagtcgaatttggaaggagtccgaatttgatatgattggttatgtaaagtttgtttcttgtactagagggtttcctaaggtgtttaggactcttagtatgagtttggtttgtggctttaggctgcctacctcgggtataaatagagggggagcgtgaggcttccctgtatcgcatttgagagcaattgagttgcgttttgagttagggtttcgagtttagtcgaaatttttgtaaggagtgctattggtgcactttgtaaacacagagagaatcaataaagtcgtcattcactttaagagttcttcaatttgtgtttcaccgggtttcggcggtctaaccggcgacataccggcggtcagactggcgacaagcgacggtcagaccggcgggagagagacggtcagaccggtggcggtgacagcaagcggcagctgatctcggtggtcagaccggagatctaatctcggtcagaccgacggcaaccaggcggtcagaccggcagagcaacttgcggtcacgatccgcgatccagtcgaattcgagaggtaacttttatttccgctaaaagttttcggtttttaggtataccaaccattcaccccctctggttggcttagttattgtgattcgatcctacacatagtatcacttagagatcatcctttctacaatagttaagataacaaaacctcttataaccattaatgcaccaaaataaacttttactacccttatttccttttattctctcccatgcaacaaaatttcttttaataaatgctaagaattgattctgagccattatcatgcatagcaacgatgttttccttaatcgtatacatgagggttgtcttatcctctgctcccctctcatttttctacgtcaccaaatttacttacgtatcaatatacgtgcccttatatcccaattttttaaccaaacaaatttgttagaaaacttccgcaagtttttttgcctctgaccattgaatcgccttgagatttttacatgaaggaaaaaaaattgctagaaaaaatttcacacatgtcacacgtaagattctggtgctaactaaccaaaccatagttgaatgaaaattttatatgttatatcatagttacatctaaaagtttttgactagaaaaacttgcggtagttttttaatactccctaaccaaattgtcagacttctggttccttcgtctctatcatgttgggcttcagatgatgggcctgggtggcccaagcccatgtttctcggcctttcttgaacacactctcactatcaggtacccactccacgatgatgggcctcgcgagctctcgcccgccgctcgtctccgcgccggcgacggcgacggcgaggctgcctcctcaccgccaccgccgccgccgcctctatctcagtgccacctcatgcgcttcgaccaattcctactcctccagcgtcctgtcccatggaggaacctgtgctccgcgctccctagtggcggcggagttgcagtcgcagtcgcggccgcctccgctcgccgccggcgtgtccgtacggggagacgccgcgacggggctcgcgttcctcctcttcgttctcgctgtggtatgccccccgcggattcgtctccccacttcgtcctgtcggttaattttcagtggttcgtcgagcagtgcgcgaggtgttcgatgcgagttctttgtttgcttttagtttcccttttcacaatgcgttgttgaagaggttcaatttcggataagtgttacatcattcgaatgcatcggtgtacatcaggatttcttgttctagggatatacatcaagatttgggtataggtgacaagtccaaagagcatgtcattcttgggctacagattcatcagtgctcttcacttgcaaatggcacttttgacttaggaattagtagaatggagagagaaatgtgtaaattcttctctctcatttttcttttttttttcatattagctgctgtcgaaggttgccttcagattcaatccaccacaaattttcaatgaatatatactatgacttcttagctactgtgagaggttacattcgttgtttcttatggtcaaagttagttagattatcctgataaatggatggagttttaactttatggatcctaaattcaggtgatgagttcctttctgtcactggccatcttctcatttccaacatggagagtgagtaaaatcatctaaacaaacactactttttccacagaacttcctctaacttaccctttttgtgtatgcgtgtgtgaattaggctctgaagcgattggaaattgctgtgcataaattgtcgaaagtagttgcagaagaggtaccaggaacactatcttcactaaagctatcatgcctggagatcaatgatttaactagccaactaaagaacttcaggtaatactcttttgtttttggtgagaaggtagcacattttatagcagtcaaaatgtaactgaaggaaaatgatagtatctattttttgttttattttgacattatgcagacaaaggctcatgataaatatatttggaaacaacagtagtgttgatgcaagatcacagactggatggccaaaacggggaaaaatatgacttatttaacctgtaagttttatggtaactcttagcttatcactcttgctgaaatgcattatcaagtcgatacatgtgtgtcacagtagcccttgacgacttgcagccacatcaaacatgttgtgatgcaagtaccaaactgtgccttgagccaagaccttccataaaagactggcattattgataatgagatgctttcttgtacaattacattttaagctatacttttttatttgcactgtctgtaatacatcgtgctccctacagctttgcatgtttcttgataaaaccttgttcatagtgcttcaaatcctctggtgttggtaggttgcatagtagggtaacccttgctgttgacactagatgtttgcactctgatgtggaaggatctatccgccatatctggacctcccaaacctgtcagaattagtaaaacagaaatgcttgagatgtcttgaaatcagaaggttgtgcaaaatataattgagacacttgatgagaacagaagaacaaagaagagataaaccatgtatcaccacttatgattctgatttctgaagacaacatactttacacaaactgaaagtttaagtgtatactactgctactaagcacctgcctcatacatatattctgctaattgagagttctgtctgtagaactgaaggtttacaggcaactagaagcaggtaacaggaaaccaaaagtgccttttgcaagatttttgcaactttgaggaaggctagaatgattgatgtaacttatatgaactttaggtaatacaattggacaaacttcctgactgatgctaatcttgtactagcattatgacttcaatataaatagtcagcatgatgtgttgacactatgagttatgggctgcaagagatgaccttgtttggcactttctgaacaattttcttcttagtgccttagtcagagaagactgctcggcagaaagtccaacttttttctgttgtaagtctcatctttcactctcctaacccccaactaacatggaatcttgatcttcctttcccaaatgatgaacttgccaataattactttgtttgatctaattgtaatctagtgttccagattctggtcagctggagtactgtactggtcctactaggcatattcaattaacaactacaatgacaagtaggttgtgtgatgaattatttatctgtttggatctttgaagaaaatagtacagtactctagaaagcaagtaagagaattttgattagtgggtaattaattaagctgttaataatttttacctggatggtacggccgagctgcatgggcttggccttcgcctggacggtctcgccgaggtgggccggcctgatgtggttgatggacagctgcacgccggcgaccctccggtagccggacgcgatgtagccgccgatgctcgccgccgcctccgccatcagcgccgacacgccgccgccgagcaccttgaacggctgcacgcaagcacgaacgtcgagacattttttttggaagccaagaaggacgggacggccggccggcggcggcgatcgtacctggcagcaggtggcggtgacgaggaggcggccgacgacctcgccggcggtgatggtggtgaactccattcccagggagtgcagagcattgtccggcgggccgtactccggcggccatggccagctactctctctctttccgtcctcgccggcgccggccattgctctgctcactccggtgaggtgagagagggcagaagaggaggccttgccggatatggttgggccggagtgcatatatattaatcagcccacttaatggcctgttcttttctaatcaaaggatggacgaatgcgcatgcttctttggtttttagttttaaaagtaatttttaactttatgatcgttaatttattcatttgtatcatctatactaattatcacaatcatgtaactattcagtcattcagatattcaacacaaaataattattctgtactccaccagtcctggaatgtaagaacatgtagacattttgtaagagattaaggttgaggtaagagttggttgtgattctttaagacgaataaggttgggttcttaagtctaccttcttaactttgcattcctggttgttcacatgcacgttttccaaactgctaaacggtagttttttaaaaaaattataggaaagttacttaaaaaatcatattaatatatttttttaatggtttagttaatacttaattaatcgtgtgttaaggcatgtatcgttttgcgtacgaaagaggagggttccgaacccctccttccctcctgaacacaacttcagtaggtagaaaaactataatggatggtttgtgattgattgatatgagaagtgtgtgatttatgtttttggataatttagatgtatatttctgaacagaggtagtaagtaaccaactaagctaaaccacttcaacttagtcattggttttaacgtatgtctagaatactatgttgtctaacttcggtactaaccaagttcttattaattactaatttggccatagaaaacctcaattgcttttgaccgcacactacattacattactacaaccaaggacatatctttgtcctccacacatcaatagaaaaccaacaactttataactttactttgttgtacataagcagagcttcaacctacagctttatctcttctctagtctagccaaattatttcagcttcaattaaaaatgagagtcgagctagctgatcaatgggtttagtttgtgttacaacttcattccagatccagctcttgaaaataaatttaaaagttagagccccggcaaacaaacatgcatatatatatcgatcaaaagaaaatttggtcctgaaagaggtgagttacgcaataagattagtactagcatcgtactctttccgtccaaaaaaagctcaacctagtaggagatttgaccgataactctctattcagatttgttgtactagtttttttttttttggaacggagggagtatgtttttaacaggcaatgtcgcaacaggtcgcgatcctatttacagctagctaattgcaagtcgtcaaaaattaatttcgattaattttgtatacttgcagttgtgcatatatatgcagtcgatcatatctaatccatcatgttcttacattccaggactggtggagtacagaattaatcagtacgatcaaaacgtgtgccacccatcgtgcagtattccactacttcgcgtacggcgcaatactcccatttttgttggttggattgtgggctttgtcccacttttgttgagcccaaaaagggccacagcccgtcctaaaagaaaagagcccagttatagttttctacataaaagaaaggaaaaagtacaccgaagttccctcaacttgtcatcgagttacaaaatcgtctcccaaccataaaaccaggtatccagcatcccttaactaaccaaaaccggtcacaataggtcctttagtggttttgaccccggttttatcctacgtggcggctgagtcagcacgggacccacgtgggccccacatgtcaggcggccacatcagcctcctctctctcccttttctcctcatctctcccttcctcatctccctctctcccttctgtaagtcaaccggcaggaggaggatggcgtcggcggccggcgacgggcgacgcggcagcggtgggggaggaactgcaggcgtgcggcggggggatgtagcgcccgttccgtcgtggcgcctagcgggaaaattatctcttaaaaaccctaatcgcgaaa

SEQ ID NO: 23199 - DNA, 5359 bp, Oryza sativa
gcgcgcgcccgcgtggtcctcgcccgcaccgcgtggtcgccgcccggccccgctgccctgccgcgcctgcagccgctcggccccgcagccagcgcgcgtgctcgagccgcgcctctccatccgccgcgccctcccattgcaagccgcgcgcgcgtgccgagtggccgaccatctggtcgccgccgccgtcaccctctgccgcgccagcccgcgtctgtcgcccgtgtcgtcgcgccgctccaaacctctccgccgtcatcgccgtcgtcatcgcctcggccccgccactccgcgcgcaagccgccaagggacggaggccgagccctcctccctctgcctcgacgcccccgctcccctcccccttttcccaaagaagaaaggggcgagcccccttttctctccctcctttttccccttttcctcccgccggcgtcatcctccctccctcctgtcgccgttttggccgctagccggagcgacagctcgcgccttgaccgccaaagtcggtttccaaaccgacattgccgccccctataaacccaagcgccctcccttcccttttctcccattcttccctgtttctcgcccgcgccattgccgtccctctcgccgaccgcagccgtcgcgtgtgtgccggaggagctggtgcgcactaggacgcggaaggggactccgggcgctcgtcttcctcctcttccacggcccgaggccggagagatccctcccgcgccgtcggcctctcgtcacagcgcccctcctcacctcggtgatgcctccctccgttcttcctcctcgctccatctcctccccctagctttcggtagtagctcgagtagactccccgtagttagccggcgccgccccgaccgttgccgtcgctcgccgtgtgctcgccgccgtcgccgctcgagctccgtagcacccacacgtcgccagcctcgctcggcgtagctccgtccaatccgacgctagcatcgagttcccgaaaccgcgtagatgctctcaccgccgggaatcggtccctcgtgacctcgtcggcgtttccctcttccctccccgccggttgtcgccgccgcgattcgccgccgtcgaactccctctggcgaatccgagccgttggctcgtctcccctcatcacgaacaaccgcccggtgtgctagcttttgcccgtgtcgccgtggttcgctccgccgctcgccgccgccgcccgccgtccattcgcggccgggtcgtcgtctacctcccgccggcccgcgtggcagccacgtaggcgccacgtcggcgccagctcagcctagaccgggtcgagccgaccccggtcagtccctccccgtgcgcgcgttccaccgcgagccgtgaggctgcgcgtgggcccgctgcatccgcgtccaccgcgaaccgcgcgcgtgcaccgcgtccctccgccgcccgcgcgcatgagccgcgtactccctccgcacggtgagccgagccgctgacaagcgggtcccacccgggaccgcgcatggtgagcccggtccaccggctctctctctcctccctcccgcgcgcgcgcgtcttgggccgctctgggccaccttcttgggccggccggcccgttaagctcggccgagccgccctttctctcgggccgcgccctagccgcccgagggaagtctatattccctccctctccccttttcttttcttttcttttccaaaaaaaggggatttaattaaatccttttcctttagaccaaaaatccaataatcttagaagttcaatatctttccaaccgtaaatccgtttgactccgttcaaattccaaaatttctcaaatgtcgagatctatccaatggcacgcttagaggtcattaatagggctttattttcgccgtttgttgagttgccccattttgcgtgtagtttcggagcccgaagacccgcagtgcgaggatttcgaggatcaagctccagatctcgagcaaggcaagccacctttgaacatcttgagcctatatttgaaatctaattatattgcttgcaaaatattatgcattgataggattacacttaatctgttgttccgtctgcaaggcagattggcagacctacctaacttgttgcatttgatccttccattgttaattgctataccatgtccccttgtaaccatccagttgcgcctcgatattcgtgcaccctatgccagtatcgacggtcgccttcaaacttaaaatctgagtaacaacttgggtaaaactggagttttacaaaagacttggaaaacccgacacctgggtcggtgcttgtgaactaaatgaatttccaaaaccgcggaccggggaacgtaccgggtgtacggtttcccgctctcgcacttaaggaccgattccttggaatttcatccaaacataagacaagtacgaccacatgggtggaatgggacacccctggctgagtaactagcttatcaggggagccttgatgccgagagacatgtggattcgccggggtggtgtcggggaggacccctgggcttcctggcacagtatggtctgggacctaacctcttgttggtctgggacccctctcgtcggcatatggtaaacctgtgttggctttggaaatgccttgtcatgaaagcttggaggtctcccgacgtggctgatccccacgggctgggtgatctgggttagtaatgtcgtgtgggtaaagtgtaccccctctgcagaggttaacaaactgttcgaacagccgtgcccacggtcatgggcggatgtgaggtgattcctagcgtagtttggtttgactactgcttgtgaaattgctgtgtgaaaaggggttcggtgtttgaaaaatctgcagctgatgggattagctaggcccgggtggccgtttgaaaagttgttggcccgggtggccgttgaaaaagctgttggccgggtgccaaccttgtttaaattctaaagactgatacattgcacatactccgaccggacgagacgcactgtctcatccgtgtcgtttgagaagcactcacttagttgtttcagaaaagagttcaaataaaattaattgcaaaaacaccagcctttccttgaagcctgcattaaacacttacttcccatggcttgctgagtactcccgtactcacccttgctctatataaataatccccccagttgctgaagaagatgaagcggatccagctgatgaggagttcttccaggagcaagccggctacgatgagttttagggtttcggcctagttcccaagtcgcgcctgtgttgattggtccaagtcctggcttccgctttccttttgtaatgcagttgtgagctcgggatctgtccgcagcccaacatgactgtacatctactctataataaagagacctctgttgctgtgatattatgtctccctgtgataccagcactgtttcctgggactggtatcgattaacaggttaatttagagcgtcacgggctagttccggtcgggactagttcggggcgcgacaggggaggagcggcgggcgggctcctccaccagccgccgcccacgaggcaaaggagcaacgcgcgggcggacagcgggggcgggcggcgcgcgggcgggcggcggggggaggagcgacgcgcaggctcccccgccgggtgccgcccacccggcagaggaacggcgacgacgacacagcatcggcctcgtcggaggcaagcgcggcggccccaccctcctcgaccgcgaggcgggaaaagtgcatagcctccacgggaaaagagcccaggacattttcctctgaaaattaaaagcctagagcctggggggcacaggttcttggcactatttagcaaagatttgaactataatctatacagacctttcaaaaagtatctggtcaagggaaatgccaaaatcaaatgcaaccagtatatacattacaaccaactttatgaggacataaaacttttatccctacttcctcctcatttctgtatattaacacctgcatcaacaaaaaggcataggagaaaagcatgaaaatcacaaaattggaaacctctctttactaatgaacaatgaccactgggtcgtgctgagatttgcatttgacacataatgagatttgcatgttcgaatcagatttgaacacaaagtacgatttagtagaaaagatagacttgtctgaaggaacaagtactgtgtatcagggtagaacacttgaagaactgcacctcaaaggtgcaaagtaatcctgagagctgggagcaaaggaaagaaatactttactgccgaagttaagctcacaagacactctgcagtcggcaaaatgaagggtttaaaagtacaagagggagttctctgcctctgcatcctaaaatatcaaactcccaaaatctctgctttacaagaccatatagtagataaacttcaatcctttcttaattgcagtactctttttatgttgtactcctgaaaacccttttagttttatgtccagtaaaagtccaacgaataagcacaaaagtctgctcatgttcaattagatgactgaaatttgctactagagaatttgttgcccacgcacattttgctaacaaaactcttcattactggttgggggatgagttgaatcagctggtgtagcttagaacttgaacacgttgcggcactgcatatatgcatctaacacaactactccgtactcactgcacctaaaaatatgctaagaaaattatagaccgggcaaagctttagtaaaatatggaacacaatagaaatatgtaacaaaattttaaaaattggcaaaacatatggctcttgaggtttttttgctatcgtagcagatcacaaaacaaagctatgttaggtataagttaggtttaatctgaactagaaaacaaaaataacaaaactgtatacagctagtagaactgtactaactaaaaatgtgctgccattttttctggagatatatgaatggtatgcagtgtttgctacaatcttgagtcaatttgttgaacgctaattacagcagaaccggaagtgtgtagaactctagattctactagaaatggtcaggcatatcggaaactgaaagatacagtctgaacagaaacatttgaacagaaacagtttgaacaatagtcttgcctctgtagtttgcacaatgtgaagtagcacataggaattgctcactttggcacatttggaattgcttgggtctctagaaaggcatcgtcggccatggcccctaggctcctcttgctctgaactcctacagagaaaaacaatagaactatgtagctaaattttataaaagttgacaaagacaaagacaaagacaaaaacaaatacaaagacaaagatgcagc

SEQ ID NO: 23200 - DNA, 7573 bp, Oryza sativa
tttgcagagtgaaaattaaatgagattaaaaaattcagagccaggagagctaacccacatgcaaatcatgattggattggatgtgccgcgcgtctcctccaactcatggctgtctattcctttcatccctatgatgatcatttcagaatagtttcatcctattaggtgtttgtttgttctaccatccaagcatgcaactaactaaactaacacaatctgtactttttttctcctacagaaaatgtagaggctggcaagagtggaagaactagtttttgtttgttaaaaaaatgtcaaacctaccaaattcagtctgaagaaagaaagacaatgatatactccgccaaagtataactaaagttcagaagccaactataactactgaagatgaggctataatactattgaaagtatatgtataatttttttctaaaactttaataacattcataagtacacccaaaacttatatacgcagaatatcttcccttaaataaaaaccataatcttaaagaggctgaatataatgtatttttgtgttatcacatctatggactaaaattaaagaattggaggaacttttcgttttgattgtgttccaaacaaaagaaaagaaaaaggaggagaagaattggaggggcagggacagcagggcagtggcatgtgatgtgaaccaaccaatgcaatgcaaagccgacccgacccgacggcgcgtttggtcagtcaaattaaaaccgggtgccagcgccggtgtggttacctcctccctcaccaacggctcagcctgccacctcaccctcacacaccaacccattacatctccctctctgtcctacgatttcacaggaattttggtacacagccatcaagaccatatattctttcttctattaattcccctgtctcccctctcactctattttattgcatcgttatatcgaaacaccagaaatattttaggttattattacaaccatatgttgtatagtatttgtaatacgctacaggtatatatatgttagagttacatgtgtacatattaaattggtattaaaataaaaggcgtcgtctaaatgttacccatatcatcttaccttcaactcttttgtaggttctattacagtaaatctccgtaatttctaagcatataacaaatatcatatcatgaaaatgttaaaatggcatttagaggatatgatcaatgtgtaacagtaatctccataaccatttaattatatatatcggttaccgcaatttaattaaaatgagcattttggacatcatgagtccatttcaactttgaatctgtatgacccgtttttgtgaaacttttttccttcacattctatcatatggtggtgcacaccctaataccattatcatctaaatgtttgacattgacctatccatacaagaaaggctctagaaatgcataaatgatctttaattaccaatatgttctcttgaggtatcggtctaagccttgtcagtcaacgtggatccttgatggcccaatctcctataatttgaccaattcaatattgttgttttgatagaagctaagtcaaaagtcggatgaatcaatcaaatgcattgaatctatccatgccacgtgtgtaaatcatgccataagaactgatataatttaattttatacctccctgatgtcaaattataccctagaaattttgaaccttctaaaccttcatattgttagattaatttttaccttaacataagccacgttagagtggaaccaacttttcagactcacgcaacgagctgcaatgatatttataaatattttaaatgatgacgcccataaactacatcagacaaaatgtaaaataccaaaaatattagtattgagaaagaagcaacataattcagtccagaatttaattttgaagctgttgagcaacccgggtaggaacccagcccactagcttatcctgcgttattttcatcaacttcaaaccatctccgttagcacataaatttttttatgtaaaagttcttttttaaaaaaatcaaaaaaatctaatttttaaatttgcaataattaatactaattaatcatatgcggtttcttgtatttcacgtgtcgccgaaaatctacctataactttaaaaaaacacacccttactcctagcaacaccttgacttctcgcatttacaaactatatacatagttttgagttccgctacttataatatggttataatacgaatgtaataaatataatacttttataaataaaaaaaattatagaaacaaccctctacatcctcctgataaacaaacacacatacattggcacatggcatttgctcctctgtcaatcaatcaattaacttaattaaaaaaggaaaagctaaaaccaggagagaaaagcacacgccttttccccccctcttcttctaacacgcgcgttctgacgacgaacacacggagatagagaaagagagagtagaggagagaggaagctgccgcaacgacgaccagttggctggctctcttctgtagcagtagcaactagcaaagctgctgtatttaagttcaccgcgggtcaccacaccagctcacacacgctgtgctgctgctgctgccgctgctcctcctcctcctcttacatcccatcctcgccgcgatttccttcgccgccgccgccggcttcgtcttcttccccggcgccggggcacgcgaaaaggtgcgatcttgacgccggattcggcgccctctcgccctccctccccgaaagttcgctgctttttgctccgatctgtgcccggaatctctcgtgggtggatggatggattggactcggtgtgatctcttcttctttcgctggtggttgctccgccctcggggggcggttcagggttggggatttgggtgggtttggtggctggttctttggtgggttgccggctctgaatctggagggagcttgggttgggttccctttcttggttggtcaactttgatagtagcgtttactgtgaggtgagggggaagaagaactagctcctctcgtttttagctgtgattgctgcgcctgattcgtttgattcggttgttcgtctgattttttttttctcgctgaattctgcggcttcttgagctttgccaaagaccacggtgtgttactctttccgttagttggaggagaacatgttagttgattaacagcttgttgcgattagctaactgcgtgtattcgaggttgcggtagcatatcaattaggaataatgtccaattttgtagcgtcatgattgcaattgaagttttactgtgttcaatcattggcgtagtacttgtaggtataggcaagattgatgtttcagtgctgtaggagttgtgtggatttaggacagtgctagggataaagatgcgattgatgattggtcgagcttctttggcatgcatcctgaattggagtggtgcgaggacatgaccgcgtgagctaccggcatgagtgaagcagtgtgcccatgcaaataatttttgcatgctgttcttccatgctattctgtttagtctagtgcagactttgaagtggttatgaacttgtcacatttaatcagttgcctcacattctgcccttgtgttcataggatacatgtttgatttacaaatatggcatccaattaataatgcaatgttctaaccactggaagggtggctgaatgaataatttaataaaatttccatctgatgtgtattattggtgtctagggctaatgtggtatgtaaccctgtaggaaattggtaattattaacgatgccactgcagaatgagctgtcttctcatcagctctaataggaaaaggtggttattagttctggccttaggcagatttcaatcctacctgggcatcctttgcttagtttgtttccagcatatcagtatatttggttccagtgaacttgccgtgctgatcaagaattgtagtggttaagtttgtctggtgaaagaagcagtgttacctgaaaaatgtggccaattgttttttgccgaattgagcaccccaaatctaaaacgtactcggattcagcaaccttgtcgtcttctgagtagtatcttgcatgccgtttctctttccgaaatcacacacatgagccaactcgcttgtccgtttccgataatactgggaagaagagacaaatgagataactcatatgtggttttagtagctcagcactaccattataccattcaccatgcattgatacgtggtaccttcaagtagttcatcgggcatttgtggacataattcatttgattgtcctggttgggttgagaaaatgcacaaaaagttacataaaaagaataaggaaatgatgggaacaaaatggcttgtggagaaattactgatagatcttttagcacctcctttatttattccacatatgtcatgttctatgcattccactctctgcaaggtaagtgtgaaccctgagttttcgaagttaatttatttcattcactttcctattatctccacactttcatcaggttatttgtccatctacatagtattaactagttcaatcatgtgtctgtttgaatgtcttatggtggtgtatttgtgtttgcacttctgcttgtgtttttcaatttgtgctcattcaatttctctctctttgaccgtctgtctgatgctacttttctgtaaactaaatgcatgttgctggtttctaataaaaatctgcatgattctgttccagggtttgtttctagtagaatatgtcgtgctttgcatgctgtggtgatgaagatactcaaggagtaccagacaacaggaatccatacccagggaaccatccagcaagtaatggcactgggccttttgttataatcatctgcattgtcccattacatactgtggtttacagatggtgctcaagttttactgaactgcaatttgtctgcagggagcgatgcatatcgcacagctgatccaactccaagaggtcctcaacctgtgaaagtgcaaccaattgcagtccccatcattcctgttgatgaaattagggaagtgactaagaattttggtgatgaagctttgattggtgaaggttcctttggcagagtgtattttggtgttctaagaaatggtagaagtgcagcggtcaaaaagctagactctagtaagcagccagaccaagaatttttggcacaggtttttttttatctctgttaggaattctgcaacaagttttctttttcttgcaactcatttcaaaatgcatccacaggtatctatggtgtcgaggcttaagcatgaacatgttgttgagctgcttggttattgtgttgatggaaatctccgtgtccttgcttatgagtttgcgactatgggttctcttcatgatatgcttcatggtatggtctttgcacatctgtgcttttgtttcctttattcatatcttgaactcttgatagaattatggtgttattttaaactttgaataccattaaatgtggaaattgtatgtttacaggaaggaagggtgttaaaggagctcaacctggtccagtcttatcatgggcacaacgtgtgaagatagctgttggggcagcaaaaggcctggagtatcttcatgagaaagcacagcctcatatcatacacagggacatcaagtccagcaatgttctccttttcatgatgatgttgctaaaatagctgactttgatttgtcaaaccaagctcctgacatggcagctcggcttcactctactagggttcttggaacctttggatatcatgcacctgagtatgttctggttttcttcaattctctataaaccttcagaattatatcaactactaatgttggtctaaattctgtggccaggtatgcaatgactggacagcttagctccaagagtgatgtgtacagttttggagttgttcttcttgagctattgaccggaaggaaacctgttgaccatacattaccaaggggacagcagagtcttgtgacttgggtaagtttcaatcgcatatgctattcgcggttattggaatattctggcttgcattctatttggtgggctgaattaatggtttattcaacattggcaggccaccccaaggcttagtgaagacaaggttaggcaatgtgttgactcaagacttggaggggactatcctcctaaagctgtcgcaaaggtatccgatattcagagacaacctcttttctgttttatcaccataggttattgaactagcagtctccagaaactatcttgacaacgtgcaaaaggaagctgatggctaaagattaattaaacagctaaccctaggattatatgtctgaaattcacatcgttcatgaagcatgtctggattcaacattaaatttgtcgtagatctattgtttgcagcacttgtacttgagattatgtttccttgtaagcccagtttttaaacatttgttcttctgtatgtttcaaacagtttgcagctgttgcggcgttatgcgttcagtatgaagcggactttcgaccaaacatgagcattgtcgtgaaagcgctgcaacccctgctgaatgctcgggcaactaaccctggagaaaatgccgggtcataaaactttggtctaccttttgtatgatagatattaagttaagaagtatgagacatcgatattgttcttgcggatgtgtggctggctggaagtgtgtacatttgtgattattcgtcccttgttgtaatcaccaaggttctacgcaaccgaaaatatttgattcttcgcatcgggtgagacataacttgtctgaaggtgacatgcatatctatctaccttactcaagagggaaaacaaaattctgcatcttgaactgaactgaactgaactgaacttgccttctcttgttctgcatttgattgatctttgtgcagaagaaatgcccccaaatttgtccatattttcttcccattacctcagcattgcagatttgggccttggcacggttgttcagaacaagtgcgtcctgtttgcatactgaacctctgaaattttcagagttcagaatcaggaactagctcaatcaactgaaaatgctaaagattagaacaagcgaaccatgccagcattaacataaccgcaacgcggccagacataaattaaggtagatctgtaactacaatattgcttaattatgagcttacataagctagcagcaactgcactacagtactacaatactacagactaatcttggatgtcggcaaattcagttggggcatcatctgacgactgatcatgcagcaatgacctacttgactacatctctggcttcctgaactatagactatgagcaaggtgctcacctaacactggaatatactactaagtagcattctttacacaggatgctgtttcatcgctttgtgagcatcactagtgcgagcattgacatggaggcgatgaacttgaagctctggttctcccagaagttgtgcttgtcatcacggtatgggacactgggttgcttcatgcccacctgatccttcagctccttcagttgcttgtctcttttctcaccagcctgaagaagc

SEQ ID NO: 23201 - DNA, 1165 bp, Oryza sativa
tttggctggcagtgaaaatgggtgatactaaaaaaatggggctttgctgaacgcgtgtttctgttagtatcagtttgacctgtacattttccacagataattattgcacaactgccgtagcagggatgcttcattcacatggtctagatttgttaattttaactgtcagagatcttgttagatgctcagggataaggcgtcatattcaatctcaagtgcctcgtccccagttgagataaccataaatgagcatggacagcaatgctagaagagaacatcatgtttgatgtgtcaagggacaaggataaatatgaacatactctctgaagttttcttatctgggaccgtgattcctgaaggcagaattcaagctttagaattctctttttcagttcctggtcggttctcttttgtttctccaactgttcaacaaacaagagatttcaagtaaatacaacattttagcacaaataacaagtttctttgtaatagtattcagcatttctatggatgaaagaaagagaaccgtatacctgtgactctagttcctttgttttgttcgtccagtgagcagataatatcctaatttcatctctcaatctggcaatctctgcatccttagcgttcagaagtttattgagattatcaatgttccttggtgatacatcagataagatctttagaagctcattatctttgttagacccaactttggcaactgcatccatgatatctgtttcgatcctcaaaacttcatctttgagttgcctctgtgagtattcccttgattcaagatccttctggagatgatccagctgctcacctagcttgttgactcgacgctcgtgttcttttagcgagctgtccttctcattcagctcttttaataatgacaagcattgtgactgagctgatttggctgatgcagcacttgcttctgctgtagcttgggtgactgacagtttcgatctaagatcgtccaactcgtggaagtactgcacataattagaatagttattgaggaagtgcatctgaattgcaaaagggactcattagagcgtcaaaaccagcatcaacattggtaattggtttgcggagacaatataaagtggagtctgaaagatgtaaaatagagagtaaaatttctcatcgccatgaatccaca

SEQ ID NO: 23202 - DNA, 6456 bp, Oryza sativa
acgcagttgctcatctttatcattcaagcatttctgcagcttactgatttcttcctccatgctcctcgcctttgtctcagcaaactgtgataagttttcccttgtcaaaaacaaaactcaacaacaatccggcagggaccaactacaaaaacaagaaacaaacctttctggtttgggattcccgaacaaacaactgctcctgtgaagcaagtttgttcctcacatccttgagctcagccgccaaagacaccacgtttctcctaaagcttaacttcttctctgtaagatccttcaacagcggatccaaatccgacgaagacacagaagatggtggtaccaccttctctgaaactgacatagccaagccccaaaatactgtttctcttccaatattagcaccaaaaacactgcttctggaatactgttatattctatccaagaacaacaaacaggacggctcaggcctcacagcaagtcatcaagcacccccatgaagaaagacaaaaacaagggagatgagctcttctttgaccaagccaaacacctctgtggttgcctcacaagaagcctcctatctcaggtcagtatgggccagcaggtagctttcgctgcagaaaacaataccaattttgagaggagatgaaaacatacaatgatgcttgctacatgcaacgtgttccgcttaaactactgatatgaaaacatccgctttcttcggatcaagggtacgagattgagtggagcctagacatttggcaactaagtgacagaagtgtagctttcagtactcatcataatattattgtattggcaatgaggaaaaaacaagcaaagtatacaaaatattattcacactacaagtgactgcctcatgccgatcaaatcacgcatctaattagtcaactgcacgcaccaggcagcaaattttgcatgttcttggtgcttgaagtcaacttgtttaacagtagagattaagtatggtgcaacaattaaaaataaaatgtgcggtagaacaatatagctatttttttggtgtctgttcttgtgttggaataaaaaagaacttttctggaatgccaaaaacttctcttgcgggacgctacgactaaaaatttactgaaaagaaggattgagacaaaaccagatgaaaaggaatctttcactgagctcacaaagagatgaggacaaaaaggaggctgtccagtgtccatccgaaaattttcaaacaaattcaaatttttggggaagaaaccgagagaagaaaaaaaatgcagcacaaaagtcgagaatttcccagtatgaaatctggagcgtaagtcctcataaatctcttacccttcttacttgaggattaattaattagagtgtgtgaacactctaattttcgttaagaatagtttggaaggcaaaaaaaaaattgaaaatttcgtacaagtacgaacaaatttaaaatacttcaaacagtggggaacagcataactcaaaaacactccagattccttagatttgagtgtaaaaaaaagcagagaaacagcagagagagcactgtaaaatcaccacccagaaactccgagctcttgatcttctcccataaattagccaaaaaaaatagcatgaatcgaatcatagtaagcatatttggaaccaaagataaactcaagtgccaaagaatcccctacctccatccgacgatgcaactcagctccaagaaacgagcacgcagatcacgagcgaaccaaaaataaaaataaataaaatcctcgtttccccctccacctcagatatcttactgactcactccactctctccttctcgcaagcagcagcaaactagcaccaactagggcttacgcgtcttcttcgggaagcgacagcagcggcgccggaatccgctcggggcggggaagggaaggccaggcagaagcaggcggcgacttaacttggcaccgcgcacggaaggagccacggcggcggggcgcggctgacgcggcggcggcggaggcggaggaggagattgggagtgaagacgacgacgagaatggaaggaaaggaggaggagatggttggggtggtgggatttcaaaaccgggggctgacaggtggggcccacgcggccagcgcgcggcaattccaaaaattttcgtcggggtgtgcgccacgtcggcgtacgcgtacgtacgcgtgtatttaatttgtattgtaccgtcagccgtagaggtcatgtgataggtacaggtaatcatcgtcacgagcctcgcctgtgttttctgtaccagctagctggatttttaattgtctgcatttcacacggtaataaagtttcagataaatcattgtaacaactttgtactcatgtcaagattagtaatattaggatgcatcatatgttattttaggttattatactttaaaatgaatatggcaactttctcgaacatcgaagatatcaacattaatacttccctgcttttaccaaatcatttgttatataataccactacattttccattagtaaaatccgataaaccggccccaaaatcacatcggaaaccgaacacggaagaaacatcatataagatccaaacataaaattgacaccgatacatgatatttgataacggagtttagccgaggtctacatctacgaggcactgattgcaggcgctcctacccgatccagcatattacaacgtatcagagttataacgaccatcggcgaacgccgccggtagccactacgttacgctatgctaagtcgctatacggttataacacgtatgtctttctatctaagagagattttaagatagaccctgacttttactctattcctatacctaatataactctaagttctaaactgtaactgactttgtatccatattcgacgtaatatatatcaaattgagtgatggagtcacaagtagctgattccgttgaccaagttttgatcctgatgtccgctaataacgttacacaaatggagattttcttagtaggaatataattgggttggggattttttttattggggatgtgtccccgtccctcagcgtacattaagaaggaatattcatagggttttttttttatgtttaattgacacatgcggcaagtgcatctcttatataattgaaaaaaatcgtgtggtggtatctcatatagtgtagagttggactaatgcgaggatgaaaatgtaatcagaatgccgcctgcatcggtatgtgcaattgtggactatgaaccagatagtaggaattgttttttatttgctcacagtcacaactcacaagctcctggagcgtgcgcggatggcctgcgagctcctcccccatacgccgtcactgccgccgccgccccgcctccagtgatggaaagtgagaggagagaaaagatgaaaaagagagagagagggggagaggtgaggatgaccatgtggggctcacatgtcggtgggtcccacttttgtgtgtgtgtgaatgacatgtcgatcccacaatttttttttactctaatgccacataagcaacacgtgggacgaagactgggtcaacaccgccatgtagacgccacgtcagacaaaacctcttctaaaaccatccagggatatagtttgcatcggttttgatagttggagaagttgatatacacgatttagtggttagaggtcatgaatcatactcaggttatagttgagagagcgaaagtataccttttcccacgctttaatcatgcgatttgggctgcctgatccatgatgagttttgatcggcctatgctggataaataccaatggcccatgaagagcagggagggacagaggagaatagtggaagcaggctttgcaactataacagcaggctccctttatttccaaggaattttttctttagatgacctgcacagttacaacaactagtgcgtatcttctataaatactgttggaattcaaatctgagcctaaaattaaacataaccgaattgttggtggctcaaagctaagcaaccagttgcgtgtcttcagataaggagtacaaaagagcttttcagaatgaacatcggtctgaagagaagtatcctaattagaacagaaaactggttcagactaaaatgccaaacagtaaaaaaacctcattagacatccttggtgaaataaattgttgcagagtagcaaaccatgcttgttttaacggcgacaaagtcaggtttggagagtaccagggtagctctgggagcccccccccccccccccccccccaaaaaaaaaaaacaaaaactaaaaactaaacaagaactacaattcctgtaactctccacaaacatggtcttctctaaaatggacatggcatgcagctgaacaaaaacataagaattctgctagccatcgctagcaattaaattgatgaggtgcaggctctgcactggtttaggttaacaattgatcaacagggaagaaaaggatcaggcagtgagtgaacacagatagcagctgaagtgttaaaaaggaaaattaggagcctcggttcgttcaatgattaccagcgatagggaagctattgctgcagatgaatacaggtaaatacaattgcataccactcacctgagcaaaattcttgaaaaaaaattacaaacgatgaaggggaaaaaaaaaggagatatctgtcagacaacctctgggccaccctgcaccggagtgaaccaggcaggaacgatcctctgcagccgtcggatggctcaaacatgcatcctagccgttaaaatcacgctctggcccggaggttatgtcggcatcaaccagacttgagagcttgcctccttattggtaaaggatgcaacggtacgagcctgtagaacagatcctgttcaagtaaggtcgtgccgcaagattccaggctgcagcttataagcagctcccgcttcttcaaaactggcgaggtggtactaaccggcagcgtcttgctttgccttccgtcaattgcgtaatgggtccggcccatctaaactctctccaagctaccgtctgcactctattatcctgagaacaagtataatagtgagctataagcttactataagcttataagcttatgtggaggagagaggtaaacaaaagagaatggtgctggctctcgtgcaagagctagcttaacacaagcttcaagacaaatacattaaatatataagtgagagatagagatagaagaaaaaaattatagctaacattatagctaatctattatatgtgttgactttagtataggctaatagtaggaagtgggctatattattatccttgctttgagacagattagcacaagcaatggatagattaatttataacagttgagctggaaaaataatcatatgacaactgacaaaattgctgcagtgtatcaaactgtcacaactaataagtcataggcgaacggtttcgtgaaccctgctaataagttgctccaattgcatatttgcattcagtaactaaacaaatacaatcattaccaactgtaatcttggtcattttatatccagctgaccaccttggaccaaatgtgtttagccactgtattattttaggaaacaaagcgctgatttatttgtttctggcttagtaaaaagaaacacaggaaacaaacttatcaatgcctccgctaaacaagttatctgaattccatctctcaagcaagaatatcagcttagctatagacaacgggagattattccctcggtggattggatttgcaacctggtaagtgctcgattgatcatgttctgtgtgcttctttgatcgagttatgcatccagtgatcgggatagtggcaagtgatggggcaaacagagaaaactgggggtcggagttcagttatccgactccctttgcttcagagaatttgagcagaatatgcctaaacagatatctggaaaatttgatggcagcattcttcttgttactcctcagaggaaactcaatcaaaaaagaatgcaatgtctcttctctgaagaggatgatgaagaagaaacaagcaaacaccagttgccagctgaagtcttctttgattcgcagatatatcatgtatttcaccttcgattcttctgacagaaaaataatgcacgtccgtcttctctgaagaatcgagccagctgcacccattcttcagataataaaggcatttcttcagaacaacagcaatggtaattaagtaatgacatagatcttgtctgaaaaaataatataaatagcatcgtagcatggtcaggatttatttagacagagagagtatttttttacatttcatatatatatatatatatatatatatatatatatatatatatatatatatatatatatatgagtatatatatatatatatgagtatatacctagttataagtattcgattcattacctacacctctcaacaaaacaactcaaaatttaactttatttcaca

SEQ ID NO: 23203 - DNA, 3323 bp, Oryza sativa
tatcatatactactatgatcctaccctctcaagtcttatctcttctccaaatgcctgaccaaatatgttcctacacatcctcttgcctaagatcatcctacaacattgcagttttgcagaacacagcattcgttacaaagcgaacagcggcgtccctgcattgctgttctgaagatcatcctcaagcgatgccgttgcgaagatctgctccgtgttgcgcgcccccatgtcactggagatcctctcacagagctgcaaaaacatttcaagaagaaattggtaatcttgctccagtttcagtcatagtcagtggcaactgcaaatctgcaattgtttagctgctgttacctgtctatacagtgcagggtctccgttggacttcctaagttctacaacatttacagaagggccaagctcaaaaacctgacataaaaaaaatggcaccccgcttcttttagctgaccagcagttgcatcgtgtttttgcattaaattttttttcgttctttgtgttttacctcggcggacaccataaatgactcagggttctttgatcccttgcaattgcgcattaatttgagctgaaaaataatgttcaaaccatttttagtttcttgaaacgtttaaggtagtgttagtatgtcctgtaaggctgtaatatgacgaagacgatgaaaggcttgtacagaccttgctgtgccccctctgaacttggaatcccaactccgtcgctgagctttcaatcttgtcgaaggcatccttgggtggatgcgttgatgtgaatctaatcctcctttgggacacttcctgcaacaagtcaggcaatgaattattcattccattttcccgtgaaaatgtaatcacaagtggcttaagacaagttcatccagggtgattatcaacagtttcctgggaaataagttatttcacttcaactgcatatgatattttgagaagatagaaacattctattttcaggttatttcatccttggtaaggagatggaagtgctggaaggaaatttctgaaaaggcactgtacaaacctcatcctcgaaaaaccctgaaagatcaagggatgatgccattccaatcaactggaaagcgttgatctgatgagaattcttatctccaggctcatcattgatttgcttcagaaaagaaaagaaaccaaaacttaccagtcagtagttgcaaacaccaaaattaaatttactgttcaggacatagataatccccaatggagtcatgaagtctactaatctctccctacctctttggcaggaagacgtgccccaaactgtacatcttcatcgtcatcatcatatggaagaacaggaatatagtccttctgaaaccattcgtgtgatttgatccctgccatgtcgatcctcttcatcggattgggttcaagaatcctccgaagaagattttgtgcactgtgtgaaagccactttgggatctgagtgtcacccttgaaaatctaatcaaaccgaataaacatagtaactaaaaatgatcagagaatacaataacagaataatattacttcggtttgatataaatcagtaccttctgatacagaacaacaatatttcggtcatcgaacggaagatatcctataagcattacataaaggattactccgcaagaccagatatctgacaaggatccatcatatcctttattctgcagaacctgcaagcatttagcacaaggttgagcaagctttacaagataataattcagttgaactgaaaggaactttcacttacctcaggagcaatatagttggggctaccacaggtagtatgcagcaatccatcattctgaaaagtaccaaactttacaattcagtgaaaaaaaatatttaagaaaaacattttgtacagctgaagtcgacaaatcataccccgaggtgttgaggtaaagcactaagaccaaaatcagagatcttgatgttgcctttttggtccacaagaacgttctcaggctgtaccaatggaataattttaacaagaattatgttacagattcatgaagccacaccgaccgatattgctaactaagtgcatcacagatgataattcataaaatttttagcagtttgccctaaaacaaatcttccattaccttgaggtctctgtggtagactcccctatcatggcaatagctaacaccatcaattaactgctgaaaaagcctccttccttctttctctgatagttttccctttactgcctatattatttttaatcgcaaagaattaacagcttcaaatgttagaacacaccatagtagctggcatgaaaatttttgcagcgaggaaatagcgtaaaagatcattgaaacaagggcttacaattctctcaaacagttcacctccattgacaaactcaagcaccatgtaaatcttagttttgctagcagcaacctgaatcaagagtcgaagaacaagattaagacgtgatcatgtgatgtgacattactctcttaagttagttgcttacatgaaactgaaccatagaattttctctcgttttcgtagtgaaagaaaaaaaaaacgtgacataaattcgacaacgacggtgctacccactagtcggcaatggccatgcgtgggcacatttgggatcacgagcacccgccggagatggagaagacggtgacgttgacggcgaacaattccggcgagaggcatccggttctcaccagacaaagtctccgtggtccagcaaaaataattgggggacccaccagacgacggtgcgccgcgtgggcccacactgccaggtggaccaacgccacgtggcacgagcctagtctacgtgcggctgcgggatcggctgctccacgtggcatttcacacggcggcgccgtcgacggcgagaaaccggcggccgcggcggcggaggcgaaccacgcaatttgcaagctaaataaatcactaataaataaataaaaaaaaagaaaactcgtgttttcgatcgaatctccggtgcgaactcaaactaatttcgacgaatccattatctaaataaactaatttggacgaattaggcggtttattaaggaagcgaagcgagagaaggatgaaatggaattttgacctcgtggaggcggacgacgtgggggtgcctgagcagcttgagcgtggcgatctcgcggcgaatctggtcgccggcgcggagggagacgacgcggccgcggtcgaggatcttgacggcgaagtggccgccggtggcgaggtggcgcgcgtacttcaccttgccgaagttgccctccccgagcgtcctccccatctcgtacccgcccagcagcgcct

SEQ ID NO: 23204 - DNA, 9043 bp, Oryza sativa
tttaactcatgagttaatctgcgagttaaatttaactgatgatgacatggacgaatctcggacgtccatttctcgatccaacggtagttttcaagtttccactatatatgtggtttgcactacatatttttccgtacaaacatatgtaaaatgtcacaccaataacgatgtgtgaggttggacagccaggcaaccgtgtatacgtgccccacaactaatccacacatctgtttttgtttgtcactaaatattgctcctactgattgaaatcattagccaactatatatatatatatatatatatatatgtggttaatatttgtggccactaatatatacttatgtctcaatattatgattataaacctaatgaataacgacataataaaactatttttcaagacttttttttgcattcatttttgtttaaggaaaaaaaaaaggccagcaggaggaatatatgcaagaagaggagtacatcatactcaaaggaaaaaaatatgagataacaccgataaccctgagaagagattgacactatatccatgcaacccacgttaatggtaccatatatagggatgtaaacatacaatttaactacctggataaaaactcgcttgcttagtttttacttactagtataaaatttaaaagagacaattaataggatctgggaagcaaagaaaaaccgattgctggtcacactttacatatttagtactgcttacactcgaaggattttagctttagacaacctaaaataatactcactttattttgaaacatctagtattccgtcctagaaaaaagcaaatcctatgaatctggacacgcaaatgtctagattcgtagttagaatttgattttctttttttatggaaagatactacatatctatatgacattggttagtttatttttaactaaccaacgtcataaataaaatacgtagcaaagggagtatgataattcagaatttgaaagaaaaggttatattcaaaacggtaagtatatgtaaccgaggaaagttgttaattttcatatgcatcatgctgcacgtggatcagaagcacacctaccggtccaatttacctcttcatgtaaacgtctactaataaatattgggtcaatcagaccagaacaatctaaagtcttccaaccagctgggaaatgctgcgccctcagcgttttgcgctgtcgtggaccttgccgcgtcgcgacacgtcagcccgagctggaaaacggtaggatttcgcgagctctcgcatcggcccttctatttttgcaaaaaggcccttcattttattgataatttgttttaggtatatgctctttagtttgtactgtgttctgcgttcttatgtacagggcctctacaaactgcaatattctatgcaaagaagagaaaaatcgaaaaagaggagcacggtctgaataacagaaagtgagggccttttatgaaaaaaatacaacccaaaaccccccaccccacccaaaccctagccgccacttcccaccacctcctctccttccctcgctctgctctctccatgcccaggcgagggagtccgccgcctcgcctcctcacgcgagccactgctgtcgccgcaccatcgtactgtcgtcgccatcctcctctcgctccggtcgatgcatccgccaacgaggaggccgggaccgtcggatccggtgaccccggcctcctcgtcggcggaggggagaccgactgtcaccctctctactcttctccttctacgtccggcaccgctacaacgacggccgcgcggatcgcgtgaggcaacgggtggctgctccctactcttctccctctccctctccattctcttcctttgcagatcggcggaggcttgcaacaacaacaacggctgcgtgggtgagcaatcgaggaggccaggaatcaccagatccggaaggacggcggcccggttcggagagggagcatcccgatctgtggcattgaggcccattgtaagtgtcgatggcggtcgttccttcacagtggtgagttccagggggaaggccctgctcccctgccctttctttcttcactctccccctctctcggatccaaatccaaagatgatggggaggttccatgttacagatccagggccgctgggtctattgagctcggtatcgacggcagcagcagctcgggcaagatggaagaaatgtgtcagacactgcctcctccgagagcatacaccagcgacgaggccaaagtcgatcttccgcaaccccgtctggcattataacttgtaagtttttgttctttttggtgttcttggtagaccgatgaaaatggtgatggtctgacgtgcaaattgatgaaggtagggatgatatgatgtgtaggttgatgtttgaatggatatgcactttttgcgtgtgtagatgtaatacatgttcttgagcactttacaggttttgtggtggggtttattaccgactgacaaaaaactgagatacatgttcagttatttacagtggcacacatgaatgcggatagatagaatgctactccctccatctacttttgatagtcatatttccaaatctgaaaattttatttttgataggcatatttcaatctaacaacctatcatcttaatgactttctcggatttaatgcataactcttcattcttccacacataattggctacatgggcattgagaaatgtaaatattaatgaatcgcttgtttacgaggaatgactagtagcatgtttaaatggatgataagtacaattacttatccttggtctgtgtgccaagatgaaatatgactatcaaaagtagatggagggagtattgtttttctcttctatgagacctcttaagtactaacctattaactgcttgatatatcatattgcatatgtattcatctgttttgattcaaagatataagattcagaaatcagaatcacttcagcttcagcttgcttggagcacgccggcgcagggtttcctcgacgggtcttggctctgccgtgccctcctcgcgccgccctttcatactgacagttgttcgaggttgcctcccccgctcatggcgacctccacctcagttggagttgggaagctcctttcccgacgtccccacaacacggtgaccttggcctcaacccggtgctgctacgctcagctcaacggtgagccccttgatgtggtaaatccattgatgttgtagctaatatgtcatatgtttgcaacttcttacttcctctttccttctttgatgtaacaaagaaagtataacctcggtctttttagtaaaacaatatttctctaattagtatttgcgagaactatatatttccacacttcagttaatagaagaacatgcctcaattgacgatatatgcttatgagatctcacactatttttatccttggcaacaactggcttcaaaacttatatgattttttatttccataacagcaagttcagatgcatttcatcttttcttgcgtagttccagtggagcttaattattttgaatagaattcaaatgtcacttaatatttgcataaattcggtctccattgaagcaatgtttaatatttatgaaatacatttcaaatgcttgggcatgatgcgctataaatttagatcggttagaccatgttatcaaaacgaaatgtctatatcagcagcagggaacaacatccaacaaatttttggattcaagtactcgagctgtatggactttttcctaatctgaacatattgtcgagtgtttttgactgttgccaactaaaatggaaaacttttatttcagttgaatttctctgttccaaatttgaatacttaatcattgttttctcttttctaatatgtcttgtacttccttttctcttatacctgtatcttaaatgacaccatttagtatctaattcatgtgcctcattcttggtttcagattgctcaaactacaatgggcaataacaatattgcatttgagggcctcatttttggttgccctcacctgagcatatgtaggatacagcctgtggtgagtccgatgaatttgcaccgggagtggactgctgctggctactcataaattcttcctaagcttgattttataccttatatccctccttaataaagtgatagtaaatagaaataggattgaccgttctttgcttttcattttctattggcaatccttaatgtcatttgtaatgtccctgcttgggtggttgccttttattttatatcagtaaatgattacagaaaaaagatatgttgataaagtatgtcatttgctaattccattttattgtacagcttgggaacaaggtggccgaactgaccttctgcttgcttcctgcagatgatgccgttagtacagagttgttccctctctcagcctcccaccatcttctcctgtctctctctgagcatcacctccattgctgtcaaggtgatgtttgagctcaatcggtaggaggtcaatctggttgcactccatctcatttgagagttggttcttccctttcttctctaccttacatcaagatttgttcacttaaatttcttttgttttgcttcaggtcaaagaaggttgaatatgtaaataatttgccaacatgattttctcatattgggtggtttagtaagttaacacttaataccaatcacttcatttcagcttctcactaacaagcagccaaggtctcttcacggattattgtccatggatggccaagcttttcagcaaaatgaaaaggtgaaatataatgaaatattattcccttgctccataaagcttcagatgtggagtgagcttgctgctctgcaagctgacattccatttttaaatgtagagtgtgcttgaattaatcaaagaagcagatttatatacatcacaaacctttttttttatgctgttgctcatttaaaaaaattgtgaagtttgtgctgtctattacaattacatccagccgtgctattcatcttggccaaggaggccatcgcgtccatggcattttactccttgagtgcactgctttaatgctattataaacataaaagtgaacttatggaagtccagatttcctattgtaaatttttgtgctattctcatcaaacttcatactgtaaattctgttatgtgtaattcctattgcactattcttgttgtaagattaatcataaaagtttagagatgtttggacatgttgtattgtaaattgagatttaattttctatgaggagtaaactgtatattgcagatttggtcctcttataccataatgatttttccttcactttgtttacctaagtaatgacagactctcctctggatgccactggtgcagcgcgcaaagcgcgccttcgcctctagtaaaataaattggccggaccaaatgcctagtagatacaaatcggatcatgtggttttagcccctcgattcaatcccatcctaatttagttctgattaagatgttggcgggggtgggcagaaaaagaccgaaccgaaaagaccgggaccgagaccaaaaaattcggtcatcaatttggttctaggtagtgaaagaccgaatttttttcagtcaattcggatagtctcttcgggtaaccgaatagatcgaaaagaccgaattctcaaaaaaaaaaagtctaaatacaacctacaatccactatgtttaataggattaaactctaattttcacatccctatttcttctaggcatacaaccttacaagagtctttactcataagtgcttacaattttttttaaagatttttgtgttgaaaattttcattatttatttgcatatatgaaaatgttgttgaatttcggtcaggaccgagaccgagaccaaatttgtcggtcctgatatttttttcgctgaaattcggtcttcacttttcaaagaccgaaaaaaccgaaagaccgaaggccgagactgaaaagttttggttagatcgaatgtccaccccttaacaaatcgcgacatttctttcttaagttaattccacatcattggtatacgtttcactgatggtatttcctccattacattttaaatgtagccatgagttttcgtgttcaactttgatcgaccgtcttatttaaatttttttatgattaatatttttgttattattagatgataaaacatgaataatactttatacgtagcctatgttttttattttttttttaaaaaaataaattgacgaataattaaatttggacgcagaaacgtatgtctgcgctcaaaatggaacatagagtagcatttgtggccaaagtcaataaatttatgtccattcatcgacaagacggacgacgggagagaggttgacggtgaaatgaattgaattctgatcgatcgtgccgcgttgatatgattcatcacaattcataagccatggatcgatgatggatatatcggagcttgttgctttcaccggtttgtagaacagtaatacaacattttaaggatgatgatgatgttaattaattccgctgaaattgacgaagatattccggtcccagtggcgaatctagaatgtaaattgagcgagggctcgtgtgtatatatggcagtgtgactgaaataaaataagatatgtcaactaagtattttaagatgaaacccaaatgcatatgatgaaaggacaacgcattgctttctccattttaatttgcagttatattaatttatacacacaaatctatcaagaaattggtggtataactataacatatttgtcattggcaatttaatttgggcattgagtgtttgaggtagctttccttgccataatactagatttaagctaaatgctaattagagtcattagttgctaattagaggaaggggatcatggagctggggcttgcgcactgacaagccctagcagtggatccgccacagtccggtcctggataagttgcatctccgatcttccccaatattcgcgtggtgagtggtcaaaaacatatgacactttcgataagattcagtcaaacttttaaaatctcagctatcaataatttttcaaatgcttgatttgaagaaacagatatacatatatttgtctacaatttactatcacaacatatcaacatcatagtacatactgattagatttataaatatattttaatataaaattgattgtcacaattttaaaaggttgaagcaatccagatcacaggatcgactcccctctagggtccgcgcttaccgtgggggtacggtaggggtttccagcggtagggtttaatgaattttgcctaaattcaaaattccgaaaataaattgagaaaacttattgatgtagttcttgatttgtagtggcacatggtgaataaagtatttgaaaaagagtaagataaatttaaatttgagggcaaaacggaaagtacattacaaaatgtaaaaaagaaataatgaaatgggccttaggttgcacatttttatctggcccattaaggcccataagtggagaaaatatctcctggatcctctcatctctctttgttgctttctctccgcatacatactttcaaatgtatggttgttgaatcgttgttgttgaattattatgctacgagatgttgtattgcttcgaagtccataatatggaaaagatcataccgatttttgtattttacactcaaaagttaggtttacaagtatcatatatattcttgtaattatccccaatttctacatacatttaagtgttttttttatttttttgagaacgtttctgttttgcgaatatcgcggttaccgcgccgaaaccgcgaaaccgccaattttttaattcaaacatttgaggacgaatttcacgtggttttcggcggttaccgtggtaatggccttagcgcgggggaggggtgggggcgataacccccctcaaacggtaagggaaaccctgctcccctccccatcccacaagcacgtttttttttcctctctgtgtaaaactaatcttgacaccatccaacggccaacatgaaaccccacgcatatccaaaacggtaaaaataatcgacggatttctcccttaattttctgtaaaaaatgttaaaaagtgccaaaagttcttctgcaattgcgcagggccgtaatgatccaccatgaagtttcgtgtttatcttcaagttgtgttagttgtgccgtgccatgcatggctcatactaagttacatttgatgtaaattttcgtcaaccttgaaggaagatttttttttggtggagtcctttgaattaaatcatatatttttttgattttgttggtagatttttttttatgtgtcgtctctttatccttggttagttcctgataagtggctgcagctaatattaaagcaaagacagaatctatccattatttttttttataaaaaaatggcttagaattatcaaaccttttcgcagtatatccaatccaatctgggctcagaataaattcaaacattttttgcagtatatccaatctgggctcagtatatcctgcacggcctaataaatccaatcctgggctggggctaacttcggaagcgatgatccaacgttggctgggccgaaatttggatcatgatcaatggttaccatccaacctggactgggcccaaatttgatggtgatcattggtcccaagggaaaagtataccggaggtccctgaacttgtcaccgagataaaaaacgtccttgaaccgcaataccagacacccggggtcccccaactatacaaaacaggtcacccaacgtccttgaccccagttttgatctacgtggcaactgagtcagcgtggggcccacgtggccccacatgtcaggtgtccacatcatctctctttcgcctcttctctctcccttcctcccctctctgctctctctctctctcgcagaccaggccgacgggtagggagcagacggctgagcggcggcgctgcgacggcggccggcggacggcggcggcggcgccctcttcttcttctcccactccctggaccctgccgctcccgctccgtcctca

SEQ ID NO: 23205 - DNA, 10397 bp, Oryza sativa
cccttggtcccaatccaatttcatcaatcagcagcccaattaacacacaaagcatgtatataatactccctccatattttaacgtacgacgccgttgactttttaaccaacgtttaaccactcgccttattcaaaaattttatgcaaatataaaaatacttatgtcgtgcttaaagaacatttgatgataaatcaagtcacaataaaataaattataattacataaattttttttgaataagacgaaagttcaagcgtttgtcaaaaagtcaacggcgtcatacattaaaatacggagggagtatttgcacgctgtctcgcgatcagagacgctattcagacgttgatctatgatcatctcgtcgttgtcgatatacctaaggtgtttaatctgatggatgactaattaattaatcgatcaaattgtgcgtctcctgatgctacacatatacatgcatatcagtatatcactcgtagtatatacttaattaatttcctttgaaaattgatcgatttacagacagattaagcagcaatcaggacaaattagccacaggttaactaataatacaaatgataagttcatcaattaattgggcagctagcatggagtcaaaaactaaaacttaaatgcaggtgatgacgaggccagcatcgatcgatctatccatatcacttaccaactacacatctctccttgatcataatttttcccgtcatgctgcgagaccattaattaagtagaccatccatcactgaattagcagcaacagtacgtatcgattgatgatgcacatttctaatatgtatatgtatatatatatggtcacgtgcactgatcgagatttgattcacctagacttattcatttaatttctgtgtgattatcatcaggtctcaataaggccaataagatgaaacggagatgaattattttgctccttcaaaagagcgatttgaatgtccaactccatcaaaatccagatgacatcacttggaactggtctgaatcaggtgtttactcatgcaagagtgccttgtaccaatttgaaggctcatttgcctcaattgaattttgaatcaagctggaaggcaccagctgaaccaaaaatgaaattttgggggtggttaattcttcaccaaaaaactgttacagcacaaaaccttctcataagacactgaccgtgtgattggatttgttgcctttgctcgagcgcgttcgaagatacaaatcacttgttcagtgaatgtgactttgtccgtcaggtgtggaacctagttcatgcttggcaaaatttgccaaattctacctccaatccgcaagttggaactgcaaactggtggtccaaggtaaatctggctgttttgaaggttgataagatcgcgacaagaggagccttgctcacaatgtggtggaatatttggttagaaagaaatagaaggatttttaatcataaaagcctctcggaaagggaagtggctcacttagtaaaacaggactttgacttgcgtagctgggcgtttaagcctccttaagctgtgtctttatattttgtaatcaaggatctgtttgcaatttgtttttcttcttaatcaaatttcaccagagctcccgacgtcgtcttcctaaaaaaaagaaaaagagcgatttgaatcgcttcggaagaatggtgcgaacttagtgctgaccttttgcggatacatttaatttgtatggttacgtatatttttaaattttaatgaagaaaaaacacttcattttaatttctctttttttctcaatgtaatggacacctctaaattatttttgacacatttatatttagactaattagaaaaacacttcatttatgacgaaacttagcatccagttttgatttttttagttattatattgcatccacacgtgcacacacctacaagtgtgctccttatcacacgctcaaagacagaaaatcatcggcaaatgtctgatctcactaaatttctggtaacgttgaaggcacatagatcaattggcatggcataacctatatatatgttacacgatatttttttaaattttccatgatagttcacatgtagttttgaatcttcatatttaggtgcttccacctatgcaaacaatgactagaaactacaaaagaaaaaaagaaaaaaaaaagagaaacgtaaggtgtaatgttatctatcaagcaacaaaatttcaacgcaaaatacttacataaaaagagagttattattagcaagcaaagtaagccattttcagtaatacaatattacaatgataatgtaagtgaacctaaaaaaatatagtttatcggatgagtgcatcgacaaacagttcaagggatcaaaatgcactcatttttttctttaaggaaataatagcttcactggtacgtagtttaaaacctaagatatttacttatcaatttgtttgaatatatataatttatattgtgaaaacctctattactgagagctatgactggtctgtacatatatatgctttccagctgtcgagaaattaggtgagacaaaattgtcacacattactgtccagagattgaccattttaaccaatagtgcgacataatccttgtggttgaaagtcttatctgatccatgcatgtgattttctgatctcaattgtagtaggtcagctgccggccaaggtacaaaagatgatcagtgcgtgagaagaagtgcaagctaccaataatccggcctggtattagtcaaacaactcatcatcaatatgtccatatcaatccagcaacaaccaagtaaaatgtgcttgaaaaaaaaatcaaatcttaggcactaggcagggcaaatctagggtgaaaattactccaccaaagcaacatttacttgcacgtacgatcgaaagtaatgattgaattataatcatactttaaatatggtaaattcgtagtactcggattaagtcgcgagtgatgttgaccggatataaagtagccaaggaataatatgtggatataacggtatataagcaattaaaagtaaactattgttgaccaattaaaagtaaaattttctccattgacgtacatacaggctgtgtgagcactgtgcagcttgtgcaggtagtggtgagacacattcagccaatggaattctagtggggctttcagtgtgtgtgattcatttttactccaacaaccttttgacttgttaaaaaagatcgagtcgtacgtgcatatgcctcattttcttttggaggggacatagagaggattaattaagggcttgttcgttttggaggaaaaacaaactatttggattcctaaggattaactcctacgagtgttattcagtttgtaggactgaagtataggaaattaaatttttttttaatacaagttgtatggagaaaatatataattttttctatcgtatcaactcaaacctcttgaaaaattccattcctataggttgatgtgtgcaaacattcttattcctctgcttttcctattcctatggattcaaattcctccaaactgaataacccctaattgcactagctagctagttgttgcataataccatttttccaataaattatgtcttgcacgattttaaaaatcatataaattattagatagaaaagtactttcgaggtaaatcatttagagatatattttcgacgctccaatccgaataataaaaatatatttgtatttacaatatttcaagtttagcttgaaacatgtacatgctcttttcagatgtcgatgcagtacttgaagcagttcaaccgctaaaaaaaatccctattacacccgtcaggcacgcgagatggttagtcgctatatggcctcgcagagttcgagctttgtacacctcagcagcccctcccaggcgagaaaatggacatttgacattggcctagtaccatacatgcatcaggtctagtatccacctagtactttggtgtacctaaccactacgaaaaccttagatctatgatgaaacatttttatcactgaaaaatatatttatttcatctagcgcctcacaattaatgtaaaaatattaaatgataaaatttagtctagcgatggtaggtattagacttgatatccatttggtagcgtaccgttccaacgagatcccgtacaatagcatcccctcatacaggggcggagctagaacaaaatgaagggggttccactcacttgctttactctgatttgaatcaaatttagcttgatacgggtgcctaagtttaaactgacggggtgtatatatatatatggtaaaaatagataaactataactaaaaattttttttgaaccaggttcctgggtaccccctagctatagatagctccgcgcctgccctcataaagttaatgtaaaaaaaatgataaaacttagtctagcgcgtctcactctaatcttgtgtgctacaatttttctctcatctacaaattaactatgctatatatatatatatatatatctatttaaagattggctaggattactcgattttgtaattattgctaaacttagtcaattaaccttattctcttcaaagagatgtccttgcctacctattatattgaatactattcaatatgatccctccatcgcgaaacataaggtgtaaattctaccttcctaactttgactaataataaattaacattttgttcagtgctacaccagttatatcactagattctgattgaaaggtattttcatactatgctaattttgtgcatgttgatatatatatgatgaaagaagctaatagtcatagttttgcgtcagaaatagtgtagaaaccggcgccgcgctttatattttgggacaagtggaaatactatacgtatgttatgatgaaaatttgtaagaatattctatgacgcatacaatgttatgtatagccaaggcaagttgttccttgtttttttgtctgcatattcaacatgaagtgggaaacaagataaagtcatggtcatatatatacactactcattgttgaaggagaaaacctactacaccatcactaaattaagcaattgtagacgaccattctctctgtgtcatccttaattagatcgatgaaaataaaacaaaaggagagacattccattgggactttgggagtggatgagaagacttggaaaattaattctgccctagccgattgatcatgcatacaaagacttttcaggataagcgcattcgtcgtcttttccaatgaatttctttaaaggcatgtcatgcgtagcttgaaatggagcaatcaaatggttaaattgttttgatcgcaatacatcttgagttgccttcaaagttacacagctgtgaacaatgaccattggataaattaaagtgtagttgctctctgacttttcacacaaacgacaaggtcgtcgtacggtgtaagtagcattgacagtttcattctgaaaagtatggtattagaatgatctctaatggtaaataaagcttatattacatagtataacagtagttacatgctttaacttgtttgtagaaatcaaagttcaaaggaaaattgtgataaaaatataggaaggaccagccatacatatatattactacctcaatataataacttttagctaaagtatgtccagatttgttgtaaaacgtactccctccgcccctaaaatataagcattttttactctaacacggtctccgagatgttactttgactaacaatatttataaaagtaagatgttttaaataaaaatagttgcatattttgataatttgtttaatactccctacattccaaattgatctacatatttcataggtataccaagaccaagaaaagctaataattctctcatgctatatttactctagcaacaaactcaatgcatgcaccatccccaatatttcctagccaatagcaaatcaagatattgcacatgggttataaatacttgtgtgcatggatgcatacatcaatgtccatttactccaatgcacaagtaacgaatagactctaataaataaacacatatatagatcatttaggaataaccttaaaaaaaactatatgtagatcaatttggaatggagtgagtaataattaaatctagcaacatcaattttatatgattgattttttttgctattaatagttaaaatttaaaatgtttgacttgtcactatgctaaaaacacttatattttggaacagatgtagtagttatattttgggacgaagatagcagttgggaaaactttcagatgcctccatatcaggagaccatgcctgcatgatgcctggcaaattatttgaacttctgcgctattaattagtttgcatcaatgcctaattaatggttgtttgtgaagtggatgtgatcctgtccatcgtggcaagagtgcatgtttccccttgcctacctgaagcctgcaggttaattaattagcgaatcatttggttttaactaatggttaattaaattatttgtgtgagttgattatatatataccacttttcttcagcgaaacatcgacaaatctaggtcgctttgcaatggtacaaattagtgatcgatcgacagcaatcatgcatgctttcagcagtggagcagtactcaagctcagtctaaagaacttattaattaattgggtttttttttttgaaaggaaggcaagaaatttgccttatatattgatagagaaggagattaattgggttgttaagggtgatgtatcttcaggccagcttgatcagtgcgtattttttttcctctgctgcctttgtgtgcttgtatcaatttcttttgttatccgccttttgccatatacatgtctcgctccctgttgcccatgtatcatgatcactgtcccacttggctaatttatgcattataatgtataaattaaattcgccatttgatcttgtgatatttttaaagataaagttatgtttgaaataaagatatatatagttttatttatctcagacaactatgttaagatgatacaatttatctaacaccaccgctgacctctaaatatttacgatgtacacagcctagctacaattattagaaaaacgaaaaaaagaacgacatgagacaaatgaagcagcaaactactccctccgtattttaatgtatgacgccgttgactttttgataaacgtttgaactatcgtcttattcaaaaaaaattatgtaattatcatttattttattgtgacttgatttatcatcaaatgttctttaagcatgatataagtatttttatattcgtataaaaaatttaaataagatgaatggtcaaacgttggttataaagtcaacggcgtcatacattaaaatatggagggagtacagccataagtgatcttcatccttatactccacggtagcaatactagcttgttccacaataaaagccctcgactccaaagcaacaccttcaaaaagaaaattatacttacactcccaccgttgccatgatcaaatcagcaaatgaaagactaaatttgtatgttttcattttagggagtaaatcctttgaacttaagacatatgtcattgtcagatacaactagctaagacaagacctagcgatttagagtggaagaaccggtaatcaatgcgcaccacctaactaatcgaagtccccagtgtactattctctcaatcctagctgatgtcaccgtatgctcccttcaggttgataatacttgtcgttttggataaggacacggttttaaaaaacaactttgaccattattttttattataatatgtataaaagtgttaacaaatatatgatcttattaaagtactttttaatactaatatatacatgtagtcatcatatttgaaagaaaaatattttaaaaataattcataataaaaaattctaaaatttaaccttacccttttctaaaacaacaagtattatcagtctagagggagtacctttcagtcatagcccaacttcaatcggaatgaacagcacaacttgcaactgtctttaaatgtgtaaccttatggtgacaaggtcgcgagaaagcaaatagacaagcgaatcgatagggcacatctaaggaatgatgagctattggcgcaagcggttccatgaatcgaaaccaagatgaccatgtctacaagccctgttggctagtagtaaaaacatgtcgcaaacggtcaaaatcaatgagactagtagttacttatcatcttggtgtagacatggtcatctttggtgtagacatgatcttgtaatatccactgctaaaaaagatattttcccaaatggtcaaaatcaatttttccatgtgattgagccagttgactgcactaaatgatatgtaaaaatagcgatttttccatacgggcaatgcacccgcatgcgaaaattgggtgcaaaaattggattttcgcacgtgggtgcttatgtggaccgcatgtaaaatataaaaagtcacgaaaaaaaattttcaaaaaaaaaccctagccctagcctcccgctgccacccactccttcgcgggcgctggccatcgccggtgcctgatccgccaccgcacctcccgcgccaaatctaccggtgtgcgtagggggcggagcggccgccggatctggccgccctcgccacccaccgtggcgaagactatagccacacccgagggtcagatcctttgccgtcgtcgtcagccgttgccgccctccctcattgttcgcccgccaccgcacccgagggccgcctccccgttggtgagggccacctcccgtttgtcggaggagaggagagagaggggagagaaggagaggagagaaatgagagaaaaatataaagtgagagagagagagaggagaatggtgaaaaaaattgaaatgggtgaggagggaaagagagaggagggaaaaaagaggggttatttttgcatgtggaccacttaaggggctgcatgcaaaaataggggcatttgcgaaaataaatttgctttttcatgcggtctcttaagagcttcatctataaaaaataaaattttgcgtgcgttcctctttacaagccgtgtgtgaaaggtgggtcgatttttatagacgctgatacttatgggccatctacaacctattgaggtgcttgttcaggaaaatcatttttatactggtgatctgttaacttaatttgaagaaaatgatatgatacatgtacaaaataaaagtattataacagtaaattgtatgactataagactagaacattacacgctcttggctggaatttaagaaaaccgtatgttacatatatatatccctcgacgtgacattaaccagaggcaacgaaccaaacacgcgtgaaaacgcactagctaggtagctctaactcgattgagatacgtactgccactagttgtagtggatttcaatttccaattcgatggaaatagctagctaaggacggagttatgccttttaaacaatacttttttagtagattttaaacaatactttaacttgatttagatctatactaattgctgtacaataccaaataagtgacgctaactttatgccggttcacttaaaactaacatactatatataaaagatatttttcagttaggacatgtacagtagtgtctaataacgagctctcttcgttatcatacaaataaatttggtggtgtggaagaaagagagggaaggaaggagaaacatcgttgctacgcatgaccacggctcagagtcgactcttagcatttgttaaccgaaaatttgttgcatgagggtagagaaaaggaaagaagtataaaaaaaatatttagtgcattaatggtttaaaaattttggagtatcgtctctaatgacattaattaacagagagagcttatattagactctttgtttgtacatgcctttaatccgagccatgcgaagattaaagttaaaaatcggcacgtatatatacaggtttttattagcaaccaccgtcacatataaattaatatgtgccgattttcacccggcatacatatatattaatacatacgtggagtaaacctaagttgttttgcctttaattaatttaactgccattattatgtactttcagagatggttggattgaacggtccagatgagtgatggagctagctatattccatcatataatattctccgaaacaaagtgcgtgaaaccggaccaatctacgtcactcacctactaccacaagataacaagtcatcattttggatagtctctttcgctagttcgttcgagtatacacttcgcaagcaacgaacaggttattatgcttcataaaaaagagaagaatttaataaattgtaactgatctagctgattatatatactccctccgtccctaaatattcgacgccgttga

SEQ ID NO: 23206 - DNA, 2895 bp, Oryza sativa
agtcaacggcatcgaataactagggacggagggagtatatactgatacacatacattattccataaaatccacttaattaattaactaaagatataagatatagtatagctcgagctagctagcctatatatacacatggcactggctcttgcatctccacacacacacacacattcaattcacatacaaaaactaagctagctaagctaagctaagcgagattatcacagtagctagctagctagctgaattaattagcatgggattcacggtgacgaggacgagcaggtcgctggtggcgccgtcgtcgccgacgccggcggagacgctgccgctgtcggtgatcgaccgcgtggcggggctgcgccacctggtgcggtcgctgcacgtcttcgaggccggcggccgcaacggcggcggcgagccggcgagggtggtgatcagggaggcgctggggaaggcgctggtggagtaccacccgttcgccgggaggttcgtggagggcgacggcggcggcgaggtggcggtggcgtgcaccggcgagggggcgtggttcgtggaggcgacggcggcgtgcagcctggaggaggtgaagctgctggaccacccgatggtgatccccaaggaggagctcctgccggagccggcgcccgacgtccagccgctcgacatcctctcatgatgcaggtatatatttatggattcaaattcaggatttttgaatttcctacaaagtttcgctagactttgtattcttataaggaataataacgtaactaatctggatcgatgatcatattgctaactccatcctacaatatacgagattttatccatacagttatatggagtaaaaaacatatatattaattattgcatatgtagtgcccaacattataaagatttatatatgtaccgtctttactttaaataaacgggtggacatctacttatactacatcatcacataatatgtatgattttgtcaatataattagtataaagtcacttatattataggatggaggtagcatatatatattcgtatattgataactagctaagtggtatcatcatctacggaccattatatgatttggcgggagatcaattatagtagatttactgtctaatattaaaaagatttatgtatagccatctttactctaaattctagctatgctacttagggtctgtttgggagagcttctagctgctagaatttctcccagaattagaagctcctcagacagttcagcttttggtttagattctgagaagttgtacttgtatgatctagaaaataaactagaagccagaagttataggaaacctagctttttttagattctcaaaagctagctaccgactaactatttcttagaattttaagcaccccaaactaacccctaaactggttacaaagacatggcatgctttagcgcgttggatgcatgggccatgcatgcatatgcgttcttatatatatatatatatatatatatatatatatatatatatatatatatatctcctttggttgtgctacacgtggtgtgtccccatatgtagatgagatcgtggcatgcatcgatatcaacatgtacaactaaactattctcgatgatcactgatcactcactatcggggtaggtaagtcgatcaatcggatggctctctccatcttgcaatcttcgattccctttattttatttaatagtatacaataaagaaatatatatccacgtataccatataatcatttatcatacatgtgctgtttatgtgtctactcgtaaaagtgtgttctttttaattatatgctcaaaagatttataaatgatgaagaccatatatatatatatatatatatatatatatatatatatatatatatatatatatatgcaagtcatcaacacactgtacaaaattctcacaaaaattttcccatatatatgttcataaatcaatatcaggatttgataactctggttgatagagtcatgcaccagtaattttacccataaactatatataaaataaaatcgtggacaaatcccccactaataaactgtgttggtacactctagtaaataataaagaaatctggtggcctcccacagccacatattattgtgttgaagtcggtcgtcgatcacatataaaccaacaacaaaagggggccacacaaaaggccgcatattaatttatttccagttgattaacaaaatgaccctatatactatcttttcttgcttggtggaaaagaaaagctagaggtcagttaattataagtaaaatataattaatcacaccatgtgtcttgctgtgaacactgtactggaagaagttaggtacacacattatgtagtgctacgcactacgtgttgaaattaaatgtgctctgtttgcttgcacaacatccatttgtcaggcatgcagacaggcaacttatatgcgtgtatgcagctcaggcatcctctcgagaatccattatcatccatctctttcgcaacttcgcgagaagtgtacatgtacgtacccacactacaaaattagatggatcacctaccgcattatattagttacctctgtttggtaatgcatcttacactctcccatctgtttggtataaaacttttaatacatatctcaacgattcagaagtaaatacagtaaaataaactatgatgaaaactcacaaaatcaacttcaaaataaagtttaataatttaaattttgacttataaacatatataggcagtacatgttcaagattaataggtaattaatgttctttttagattgtggaatatttcgttaattactgaaacatctttcagtaaagtttgtgacgtgttgttatttgttgcatcaaaattatatgtgta

SEQ ID NO: 23207 - DNA, 2755 bp, Oryza sativa
acactccaactaatcttaagcaaaacagctagtagcataatgcacgaattttgtacttagataatccactgtcttctcaaagtctttcgatcaattactttcaccagcttgtgtagcaaaagattgatttgtgccgaacatactttagcacacgaaccggccacacttggatcaaattaaagggccttttctctagctagtgttggattatatcatgaaccatgattattttgcttcaattttcaatcgagagagacttggcaagtactaaagatttaaaaaaattatatagctagtggataatccatgccagtggaaatgcaaaactagctacagttgattatgaccaggtatcgatcggtccaggatttttcaggtgggcgccgctggtatacctgaaactgtagaacaattaatactccctccttccctaaatgtttgtcaccgttgacttttttaacatgttttaccgttcgttttattgaaaacttttgtgatatgtgtataactatatgtatacatcaaagtatatttaataataaatcaaatgatagaaaagaattaccaattacttaaattttttgaataagacgaacggtcaaacatttttaaaaaagtcagcggcgtcaaatattttaggatgaaggtagtatattctaactgagccttttatttattttaatttcactgcttgttctcaaataaaaaatggtatataattttcatgagattcatgaaaaggaaacaaagatcttctctcattgaatctagagttgccttgactaatagtagtacatgtggttcagtggatgtggaaagtttgttggtgaaaaggtaggctacacagtgggcaatagtaattttgacttagtgttcttttacgtccacagtcttcaacataggagtactaactttggtcatcattttgtagttacagtaaaatataagaataaaaatataatattatgaaaacatttttaacaacaaatttgtatagatcttttgttgagttaaagaaacatgggggaaaaggtagcgtggggtagcccttaatgtaggacgccgttgacttttcgaccaacgtttaaccattcgttttattcaaaatttttacgtaaatatgaaaatatttatgtcatgcttaaataatattgatgacgaatcaaatcacaataagataaatgataattgcataaattttttgaataagatgaatagtcaaacgttagataaaaaaatcaacggcgtcatacattaaaatatagaggtgtagtacattataggacccactagccactagagttaaaatcattccgtgcccgcaaatattactcgtgtactggtgcacttttaacgtaaggaatttagagaggatatatgggtggttctcgtctctttaaccttacatcaaacatgaccattcgcgtatgatatatgctttttttctctctctgtaatcgtggaaaaaagaaattcaaaaaacctgacggtcaagtggaaaagaattaatggagggcttcgttagtgcttaataagttgttgtgtcggtaaaagggacggtttaaccacccgcacgtaaggttgatgatcgatctacggactacgatccaacggttcacgatgcgtgatgcgatataccagtatgtgatgtgacaatgaacggtggttgctgcgtcgttactagatgatgctagaacactcacaatctcacttagctctcactaacaaagtgataagctctagtactatctacctaattagttagtgacaatcaccaacatttgattttaattacctaccaactcaattttcttcaaatccgttgaaaattgaatcgatatgtataaaattcagcaaaattacaatgaaatgaaattgagatgcccaggtagtgcagtgacagaagatatatggtttcaaaccctaaaattccgtgttcaatccaaaacatgcttaaattttctttttaaaaaatgtttggaggaagtctctcttttcaaatcctttttttacaaaaattacaatgacattgatcatgttaattatttttaaaaattgtttgtagggagtctctcccttcaaatcttgtttttttaaaaaataagaatgaaattgatcatgtgtgttttaaatttgcaggtgacggagttcacgtgtggcgggttcgtggtggggctcatctcggtgcacaccatcgccgacggcctcggcgccggccagttcatcaacgccgtcgcggactacgcgcgcggcctcgccaagccgcgggtgtcgccggtgtgggcgcgcgacgccatcccggacccgcccaggatgccggcgccgccaccgcggctggagctgctcgacctccgctacttcaccgtcgacctcagcccggaccacatcgccaaggtcaagtccgccttcttcgagtccaccggccaccgctgctccgccttcgacgtctgcgtcgccaagacatggcaggcccgcacccgcgccctcgtcgccgccgccgccgccgccggagacgacgaccaggagcgccgcaccgtgcgcgtctgcttcttcgccaacacgcgccacctgatgctcaagggggacggcgcggcggcggcggcgacggggttctacggcaactgcttctacccggtggcggcggtggcgagcggcggcgaggtggccggcgccgacatcgtcgacgtggtgcgcatcgtccgggacgcgaaggcgaggctcgccgccgacgtggcgcggtgggcggtgggcgggt

SEQ ID NO: 23208 - DNA, 18015 bp, Oryza sativa
ctgtgtgtttgtagatcttgttaactactatagtgctcaagtgccgagtggaataatggttgctgtaatttgtacaccgagttaattatgatggagctttttattttttttccaaaaaggcacctcctcttttgatctaaactactacctgatctgttccacgaaaacttactcactctttccaaaaaaaatatagcatccaaaatttatcccaaaatagatacggttataattatattagcatttcaattttaagtattccttattgaaattcttctccaccttaccctcaaccatcgatcctcttatttaatggaagcatatagattatttttcctctgccaatttatcctttgaatgctataattgcatttttttttcaaaaccaaatggagggcacgcacattagaattgtgctccagactaaatggaggatgtgttcgctattacctgttcccaaccagaaccctccgcacgaaaaacggagcggtttattagcgcgtgattaattaagtattagctatttttttcaaaaatgaattaatttgatttttttaagcaactttcgtatagaaacttttcgtaaaaaacgtaccgtttagcagtttgaaaagcgtacgcacgaaaaacgagaaagagtggttgggaaaaggggtgtccgaacacaccctaatacccacacggtatcatgccattcttaaacgagatcccacactcttacaaaaccccattattatgaactcggcttcaaagatcttccattatccaccagcattttagggcccctttgaatcgcagggtagaaaaaacggaggaataggaaaacacaggattctaacaggaattgaagtgtaaaacagatgattgtaaaacacaggaatggtcatttgattagagcgcaggaaaaacgcaggaatcggatgagagagatagactcaaaggaaatttttcaagaggttagagctcttgctaaattttcttcaaaatccacatgcaatgtactattttataggaatttcataagatttggaaagcttcaatcctttgaatcaaaggaacaaataggaaaattttctataggatttgaatcctatgaaattcctatataaatcctttgattcaaaggggcccttagaaggcccccacccacttcttgatccccacctaacttggagcctatgattactcatttgatccgctagctcaattacctgatggctgatcgatgcgctcctagatgacctgtctaatttgactcgaatcacctgttcattcaggggttcgcattaagattgctttgtccaccttaattaggatcacatcgtgtgattttagatcactgatcgaccacctgctcctgtgacattttggtcgtcattctattcctcatcatctatatctccgtactgaacaggacattcgttgatcgagacctgataggaattcgttcggttaatttgagttggtcagaaagttggtgaaggagatttgaacttactgtcgctttagctggccagtactccagtagtatccccccagctgtctgacgtagacacctacatcgatgagaatatatagcaagcaagcctaattaatctgtcatatatagcaaatatttactgtagcaccacattgttaaatcatgatgcaattaggcttaaaaaattcgtctcttaatttacatgcaaactatacaattagtttttttcatccatatttaatgctctatacatgtgtgtaagacattcgatgtgatgtaatttttggaagtttgaaggaaaataaacagtcctcgtttcgtttatgtttcagactgttgcaagcttacttcaggctgccgtcggcctgacgctaccttttctatccttttggaggggaccaagctactacatgtacatgttgggagatttgcatttcagatggaaacaaaagttcagatcattggatgaatgtctctcaaagttcttatacaaatatctataaataatcaacttttatatatatcgtgtttggatacagtggtacacagaaaattaattaatggttcaatttgccatttgaaataaacgaaaaaagtcccggccttcttttctgctaaatggatgaatggattaatatacacgtttcccaaacttttaaacggtacttaatcacgtgaaatgaaaaatcattagcgcctgattaattgagttataattatttcaaacttgaaaaatatattttcttatattttaaaacaactttatatagaaatttttcacaagaaacatattgtttagcaatttaaaatacgtgctaacagaaactgaagtaaaatatctatattaaattcttaatcccaaaaaaagtacctaataataccttaaaagtccaaattcttctgttgttataagattttgggccgtctgataaatttaccgtcattctttctcttcttatatcatccaacccatcttgcgatctttttttttttgagggggtaaagggcaggagctctgccaatttcatatcaggagaagggagaaaacagagtttgtgcaagctatggttgaggataggatttttaggtaatgcaaagcaactagtaagaggatatgagtgctactcatctaagttatgagctccatcataggtcttacacatggcgatgattgaatcaacaacttacatcactgtgctataggcgccgttgaaaatcctggtatttcattgaagccaaataccccaagctatatagtatatagatgaagaggtgatcaaagcttctttgttacttgaccatctcttttctacacgctgtccaccaacctagcatatccccatcaaagcttcttctttttttccttgacccatcttgcgatctagggccaataaaatcgaaaacgggctgaaagtaggtctggttttcttgattagggcccaattccagcccccaaggcttgttttgggccgtttacacaaaatcttgttttggctccatttctcaatgaaaaatggaattggaactgaaaaaaaaaaggaagacgaagatgacaaatttaaagtttaaacaggcaaaaagttggtgccattcctgctaaaaaactagcttccgtatatatccgaaaactgattttctgatgattgtaagattccggcttctgacgatgatcagaactgtctgatggaactcacggttggtaaaacaaaaactgaaaatttggttgaattgaaatattatctcatcacatgcttcttggtttcaaagaaactttaattttgttttgacagttggaatcgatttgattcggatcacatctagcttttgtaacaaatcaatcctgcaggaccaatatagctttgcatgaaaatgacctgaagaatgcatatgagaaaagataaaagcaagctcttgaaccatgcattttgctcttcagttttcactagatgtactacaggccaaggaattggaatcgatatatcgacttgatccagaatgatattgttgccgattcatcgcgagtcgccatccgtcaatttcattagttcactgatgatgacctacaaatcttaatgccgggctagcttgcttgctgctagctgatgatcagtagtattagtcagggttcacaattccgacgaaaactggccgaatttcatgaaattttgaggtttcgacgaggcttggaagtagaagccatctgagatttcgatgaacttcatccaaattcaactttgaattgataaaaaaaggaaaaaaaatcttataaatagtatgatattcatagaacctattgtgatataaattttcgaaaaaaaataatgtattccgtgtatttactgaaatttatagtaggaaagaaaagaataatgaattaaaaaaggaaaacaatttcagtttacttctttttctagttatcgattgaaatttcgatgattttgcttggaatttcgctaaaatcgaccggttttcacgagctaatcggtaaactcagggaatttgtattcaaattttggtttatgaaatttgttcagaatctaccgatttttttactagatttcgcgaaaaccgttattccgccagagctcaaaacgggaggccatctcgaaatcgtaaaccctggtattagtactacggcaagtgttgatgatcatggcctaattagtgcatgcacggttcaacttattgttaggagtactagctattttagctaacaatgtttgcgtctaattattggttggacttcgactctgatggcgatgaagatgactaagggggtatttaggccatgtttttttcagcttgggattattataatctagattattaagtcagattactataaactagattgttgtaatctgtagtagaataagcggttagttgtttctttcctagattattagagcctagattattgggtttgcaagtctaaagagagagtggggtggcatggtgggtaatttttcacccaataatctggaaaagctcacctaaatgagcttatcagattataataagctggactctagattataataagctactttaataagttgtttgtttctttcagtttactcccaataatctgaattataataattcaaagatgaaagaaacgggaccttagattcaggggtgtaaagttttggcgtatcatatcgggtattataaagggtgtcgcatggggtattcaggcactaataaaaagactaattacagtatccgtcagtaaaccgcgagacaaatttattaagcctaattaatccgtcattagtatatgtttactgtagcaccacattgtcaaatcatggaacaattaggcttaaaaaatttgtttcgcaaagtagtcgcaatctatataattagttatttattagcctatgtttaatactttatgcaggtgtttaaatattcgatgtgacagggtctaaattttttttacgggattaataaggccttaaactcagaagagaaaaagaactatatacagtagcataatccaagagacctgtctctgacacgacattacgtgtacatgtacttattccgtcccaaaataaattaacttctaccttctcattcactctcggttcgtaaatcgaaaatttttattctttcaatatcccttatctacctatccaccaatactaatttgctattaattaggagtattttagtcttttattctcttctttaatcatgcattaagaagttaggagttgtttcttggacagagagagtagtatgcatcaatcatgtacccgatgactgatgacgaagacaaagcaagtcagaaattagtcaaagggtgctcctttcaccgtcttggtcatgtactcatgttcctgctccctccgtcttaaaatataaacacattttcagtatagcgagaaattaaatatttttaatttaactattaatagtaaaaaaaattaaaaaatcaatcatataaaattgatattattagatttatcatcaaataaactatcataatatgtactttttatttaaaacatcttgattttatagatattattggttaaagtagtatttcgaataccgtgttaaagtttaaaaatatttatattttagaacgaaggagcatatggttacgtgcaggctgcttctacttatcaattcggtacaacatatgctttgcatgctgacgcagcaaaataaaagcgcctggctaagctcagctctcaactaatctgtcaagcttataaattctaatatgattatagactagttgtcagccataacacggaagtagtaagatggagttacgaagatagatatcgacagaatttacgggtacagaaacctagtttgatataatctagcataataaatctgaataatgttttttttatggagggattactcatcacatgcataaaatcacatatactctctcgtctctaaaatatcttattttttttacttctttatttgcccacaaatacttcattttaaagcactatagcttgaaaattgaaagtgaacaacaaatacattaaagtttaagaaaagcattaagcttaaaaattaaaagtgaaaaacaaatacattagaatttgaaaaaaaaaggtaaagagcaatatagtcttttcacttttgcattaattttgagggaaactacggcatgcgtttaccgtcggagtaaaccttatcaataacgcgataaaaacaatttacaatgtagaggtgggaggggagatgtagagctttaggagttttgtactacttccgttccaaattaattgttgctttgaattttttttcttataacgtttgactattagtcttatttaaaaaattagtataaatataaaaaaggataagtgatacttaaagtacttatgatagtgcaagtcacaaacaaaaataataataattctataattttttaaataagacgaatgattaaaccttagaaacaaaaactcaaaacaaccagtattttgggacagagatagtacagttgtacaagaagcagaagcgtcaacccaagagactaattaagagtggcttgaggcgaaggggggcatcgatgtgaccagaggagaaaatcattaatgcagcattgtctgagatggtgatcagtttcgtccatgttattgaaagctttgttgtttcggcacttccaaatgttgcaggttatcatggggagtatggtgctctagatccgccggggaaaggggcgggtctgcagtacaagtgtaaaaccaatagcaaaattgtttatccatatatatattataacaccatggtataaacataattagtatactatgacaccaatacacccgttatgatactaacgaatcgattttctggatccatcactggtcggagaaggtgtgttgagttgggggctggacaagccagaggtcctcaagcgatggtagtagccttgagatgctcacgctctgcgctatgtttagatccaaagtttttctttaaactttcaactttttcatcacatcaaaactttcctatacacacaaacttccaacttttacatcataaatttcaaccaaacacttctaattttggtgtgaactaatacactcctggttgcccggggacagcgtagaaagaggtgctcaacatctttaacaagggggcagctgaagtggcagttgggagatgaagcaatcgccctacgaaagcagtgatcgttggtgaaaattcgtctccggtgcagcgtccagagaaaagttgatgtgtgagataggtaaaattgatgtcttttctaggatggaggtagtagaatcgataggtggcatatatatgcgggaacgtatcacgtggaaaccagggaagctgtgcaaacttacaaactctcaatcaagaccacataatcaccatctgatggctaggaatagaggtgggctaattctgcacttaagcgcccaccattagccatactaatcttgcttttttcaaatcaccccctccccctaatccccagcgcgcacgccgcctgttcgtttctcccgtcctgtccacgagttgcccatgagtcgctgccgccgtcgtccgcgtgtcgcccgtgagtggctgccgccgtggtacgcgagtcgccgccgacctggccctcaagtcacagccgcacaccagcgagtcggcatggagtcctcgcccgcgacgccagcaagacgtttttcaatgtttcacagtttcagtgctgatcagtgcttggaaaaaacagcatgaatgtttcagtgttttagtgattgtaaacaccttgtaaaaattctggtagaagcaactgagatacaatttttcaatgtttcagtgtttcaatttcacacacattgctgaatcattaaaacacacaagttcattacataggaggcaccattgctgaatcactaaaaaattagcatgaattttcaatgatatgagtcttctggtacaaacaactgggatacaatttttcaataaatttcacacacaatgctccacacacaagttcattacacaggaggcacaattgccatcgcagaacctttggttcaggcattacagtcccagacgaggacgccctttgttcaggcacaattgccattactcagtttctgatccagtactgactgaagccgtggcaggactgcccttgggtgcctgctgcacatgtgtgacaatagcaaaccactgaccatgaaccttgaggtactcatcatgccacacatcgagcctgacctgtaggaagttgtcatgctgcctctcactgctgatggagtcctagtaatcgctggcagtgaagccccttctcattttttgccggtgatgcgcaggtgccggtgaagcgttgctgccgatgatgcgccacgctgctgcccgtggctccaattcgtgccctacagaactgggcaaaggtgccaccgtcgaggacatcctgaaccggaccaccaccgtcgaggacatctccctggcggccgccagaaaggccacctccgaccaccactgcgtggctggcgaagcccaacgcgggactcatgaggcgacgcggctggatctgagatggcgcggcggatcagaggcggcggctggatcgtgagtcgtggggagacgatactggcgtaggggctcgggtgtaaaagtgatgggaggcggatggcgcagggggtgttttgcaaaatagacagagcggctggcgggcggttatttgcaaatttagcccacctctatctctagccatcggatgctcatcctgtggatatgattgagagttttcaaggttgcacaggctccttggtttccacctgatatgctccctaatatttgcagtaggactacacatttgggacaagtgattagtagtggagcaagtaatggctaatataatcaaacgttcttgcttgattagttagtatatgcagggtgtagttatgcgtgccgctgatcgagctgatgaaacagttggagaggatcgagttggagtagtaacaaagtacaagtagtagatgggcgtggctgcaggtagcatctactggagtactctatcttgtttgcatgtaccacgtatctatctatcaatctatctactccctccgtccagattttgagtttttcatgcactgtttgatcacttgtcttattaaaaaaatttaaaattattatttatttgtttgtgatttactttattattcaaagtattttaagcacaactttttattttttatatttatataaatttttttaataagacaagtgataaataataaaaaaaacttaaaatttcttatattatgggacggatgtaatatctatcagctcatagaaagtaatcattatatgctccagccaataatgcatcacattttgcacggtcaccaagaaaagcacaatcataccacgtaccacgcccccacataaccacatgacgcgcacatacatatataaacagatcaaacatgtaaaaagattaagggtaattttttctaacgaagattaagggtaaattaattagtcaatgaggaattgcatgcctcagtttgttgtcgcatgattacaagtatgcaattgagctatcctacaaaggaattaggattatagggtcatctctctactaaggctatgttcggctataagggatgggaactaatccctttcacaaaaaaaacacagcggttcattagcgtgtgattaattaaatattagtttttttaaaaaataaattaatatgatttttaagcaacttttgtgcagggaatttttccaaaaaaacctttaacagtttgaaaagcgtatgcgcgaaaaatgtggggagtgggttcccaactctaggtgccggacgcagcctaaatacttttctatcacactatactaaatcgatcatctcgctccgatcatccaaaattccatccaaatatatacgcggatggaatttatacatgggaattggtagtttaatttgtgacagaaattgtaatgaatttcagtcatctccaatctagcactggaattagaagtgaggcggaaatgaggaggggatgatcagaggtgatagcaacttatcggtggcatcgcggcgacggcgaggccctcttcttcggcaaaaaagactaaggttttggggcggaggttggggtggaaagggagggttcccaagagcttagaggcagggatggtcttgagtggccatcggactggtggtgggcggtgaggcggcaagagcatcgttggagtcatgaggatgaagattggtggtgggtggggcgacagaggctgtgggtgttaggacacggtgatcgacggcaaatccgcccgcatgccatgggagaatggtgtggcctccaaatagttagtcaggtagacctcacgtgtggcgccattgataacttttggtcagcagacgaggctagggttagtgccgatgagtttgatatgctcaatcgagctcccatatgtatggttgtgcatgaggaggggaaaaggagatgagaggataaggttcaatatttatgcatgaatcacaaagttttttcgcgaacatgtaaaaggattacacgtcaatatattagaagaaaagagttatagttacacagcatgaatcacgaagtgatcctgaccgtccaaaagattaactgaaattattttcaggcagcttagaattagacaatctcttcctgatttctatgtgcacatcaatgctgcatatcatgccaaactaaactctaagagatcacttaaggaacacgtacgtacctctctgtatgtgtgttctacctgataatctatatccaacaaaaagtcatcaattatgagtgacccaattaaaacttgtttaatttcattcatcaattcagcatgcacgacacaaaccatataaatataatagtacatcatcgatcatacaaaattgttttttttttaatttgtactgcactgcatatggttggcattccttgcatgcaactactatctataaatctatctaggaaattattatgaaaggttagctaatcaatctctatagtagatttgatcccacatgaataatgaatagttgggggcagcttgcatcaatgcttggatggtccctgcagttcttgatcgagctggctcgaattattgcaggacagaaccctgccggccagatagctaaataaccagtatatatgtacacacatatgattcaactttcaaggagaaaagatcactgcactattattagtagagtactaaactacagccgaaagcaaaacctacaagttaagagtggttaagtactaacacacctcactctagctctctctagatctcttttcctccctcaaaagaagaggattgaaaatggaaaacaatgaaactatagctacttccctaatttaattatcaaatcaaagtgaagcaaaaaaagatgaaacctttgccgagtaaaacccggagatggctagtgcatcattgcatctatgtgaaagaaggggttttttttttccggttggtaccaaatatgtgctagcaaatcttttcactttatacatatatatcaaggataaataattatccttgtctgaacattgccaaacggctcatgattatgtactccatggaattaatagaagaggcagagatggtgcacacaaatgaaagctggtcctctgcaacatgtatatgatctttttgtagggcacacttcaaaggacacaagccatttcttccctaaaaagagatcgatgaacaggaccattcctgcataggccagatctttttgtttggcctcatcacagcaaagttctatccaagtgcttgcatccaaagggaaaggattagcaactatattatcactgcagaatgaagctgacctgtcaaatatttttttgtgcaacatcaataatatggattggcaataattaacatatattgtgtgaaatgagcataacacaactggttagatttctggtagtggaacaaatttaacacatgtggtcatatttacgactaattattttttcaatggtaggtgacgtacacgttgacagcgagccactcatggtaattttgtcaatcttaaactataccgatacaattaatctttcagatgtgctcatagggttaaggtgtgagcatttatacgagttagtgtatgcacattatgagcatatgtgtttatactatgtttttaaaagaataattaacgtatattctaggggataaagagtacaataaataccagtggtagctagctcggaggattgtagagggaaagcatgtagtagtagctagctccaaggacaaatgattgaaagcaatggccatgatgaacagggcacattcatccatccaaccataactgtggtgagaggtaagtgtatgaacaccaacgaagctgagcagggaagaacatccatgtccagagaaaactatttatatatctaattaatcgctggtgtacaatccaacatttcaacagggtctttactgcaatcacattactagccagtactcccttactaccaacctgtgttcaccaatcaattccaatactgttcacatgcttggaacagtacggtctgaggtggccttgccggtcgtcttcctcccctcatcttcttcctaattagcatgtttctgtcagaaaatagatagtggccctgattagttccaaaataattttttaaacttccaacttttccatcacgtcaaaactttcctacacacacaaacttccaacttttctgtcacatcgttccaattttaactaaactttcaattttggtatgaactaatcatagccaatgtcaacccgttaatggatgtgtagatgaaacattgatgtaggctaataagtagcctctcacatagtttacttgttagtttatcggtcgcaaccaaaatttaaattctaaaagttgaatttagaggggtttttttttatcataatccatttttcaatattaccttttaaactgctgctaacataaatatatttctggttgcttcattcttttcctagggctcattaacaagcaaccagtagtagtcataatcaaggtggttactgaatgattaatacaacagttaggaggaagacctggatgatgacctgatctactcctatctatctatccagtaatataactcgtggatgattagattaggagttaattctgatgtggctgcttgctgaatactactactagtagtacaactgcaagtgatgctttgactatgtgtggcgatggacagctgaagacagaggtcggtaggggtccacgggttcttgaccctgaccacaagcaaacaagagccggattttttatgttttggtcctttttaaaaaacatattttcaaactaggcctcataaaaaacttatggggcaattactgatatgcatccctagagatgttggtgctgataccagatctttgcgctaatcatagacgctgaacacctcctaagagcaactttttttttcttccaaatactattgatttactgtcaaattttgaaaaaaatgacaaatcaatgtatcctaatttatttatgctagtttatttatatttgagaggaggatatgagtccctagctcctccctatctgtaaatttatgcacggacacatgattttttttctcaataggggctgggaacgagaaagagggaggaacctacatcctcatcctagattaagaatttgtaaataaaaataaattagtcggaatgaattagaatatattgatctatcaattttctaaaattaatagtaaaccaataggagaaaacctaaataaagaggcaacaccaaactaatttgcgtcaaacctagacactcgatgctggagtatttggtacagagacattgcgcttcgatgccaacgtccttgacgtcgaggtagaggtccatatctgcaacaaacttttcaggggtctaattgtaaatatattttttaaaacgagcaaagtttgttaggggcctatttgcaaaatatatttttttaaaatagctaaaatgtaaacaaaattgaacaaatcaaagacccacgccgcagcaaaagcgagcccctcgatgccgtcaaacgtcgtcatctatatttcaacacctactctcacgtgaagattaacgtctgatgtctacgtaaaaaaagttactacaatttcctgatatcgttcatattaagttgcatgtggtggtaaagtatttttgttagatgaaagaaaggatatgaacgattgaaaggaaaaggtactgtttctatttgtaatttggcaaatagatactttcataaattttgcgtgcttttctggattatattatatttatttatttattcagcttaagtcgtttcatttgatttggtttgcatgcataagtcaggtaccaaaaggtttagactcgagaggaaacaacctaataagctaaagaaaaaagaaagaagcaaacaaaattattttttgtgaaacttttatatccttgttattagcggtttaaagtttaagtctcaaaaatagacgatgataaaaaaaaaaacctaaaatcaactgtaaaattaagtttcaaacgtagaaaatttggctccgacttaatataacaagcaaacaattaatgccgatcttactgaaaaaccacatttgtataaggagagtgattacaatgctagaggtatatccttgtatatatccataccattacacttgtccagtcgtccagataatgtgattcacatatttcagcaatacaattaattctagtacttgtaaattaaccagatctagtcgaccgacaatggtcatatataaaacaaaaattgtaaaatactaaaaagctttcataaacctgtacagcagcagacggcaagcaaccagagaaatgtgatggcagaggatgaaaaaccatgtgaaatgtcccggaattttccccacctttatttatctatttatttagatcaaacttttgtatttctccaattatattattatgatattaagcaagcaagaaattcggacagtgtcgggtagctgagcaaaggtgccagtgtgctttgctttttaactctgcacctttctctttagcttctcctcgcaaatcgcaatccccatctctccttcgtctttagctcatctcttgattgatccacctcgttgttctttgattgattggtgctttctttgagaggcattggtggtggagatcgatcaagaatcgtggtttgcttgtgcttttctgagttctttgcaatggatggtggattgtagtttggtgttgcgaatcttgggtttgcagagcatgtcggagtcgagcagggcgttcggagtgaatgcgtcgtcgtcgtcgtccggcggcggcggcggcggcgaggcggtggctggaacgacggggaagaatggtggcggggggagcgtggcgttccaccggctgttcgcgttcgcggacggcacggacgcggcgctgatgctgctcgggacgctgggcgcggtggcgaacggcgccgcgctgccgttcatgaccgtgctgttcggcggcctcatcgacgccttcggcggcgccgcgggcggcgacgtcgtggcgcgcgtctccgaggtgtcgctccagttcatctacctcgccgtcgcctcggccgccgcgtcgttcatccgtaagtgcgccgcgccgcgccaccacttgactcgcaatctcgctcgcagcgacaagctcaccgtgatcgatcgtgttcttcatcagaggtggcgtgctggatgatcaccggcgagcggcaggcggcgcggatacggagtctgtacctgaggacgatactccggcaggaggtcgccttcttcgacaagcacaccaacaccggcgaggtggtgggcaggatgtccggcgacacggtgctgatccaggacgccatgggggagaaggtgggcaagttcgtccagctcctcgtcacgttcctgggcggcttcggcgtggcgttcgcgcaggggtggctcctcaccctcgtcatgctcgccaccatcccgccgctcgtcctctccggcgccgtcatgtccaatgtcgtcgccaggatggcgtcgctcggccaggccgcctacgccgacgcctccgtcgtcgtcgagcagaccatcggctccatcagaacagtaaaaacattccgtcgaacacctcagctaccatccatttctccgcgccgccatggccctgaacacccggctcaacacaggttgcgtcgttcaccggcgagaagcaggcggtggcgaagtacagtaggtcactgaagagagcgtacagctccggcgtcagggaggggctcgccgccggcgtgggcatgggcacggtgatggtgctcctcttctgtggctactcattggggatttggtacggtgccaagctgattctggagaagggatacaccggagctcaggtcatgaatgtcatcttcgccgtgctcaccggctcgctgtaagtttcgccgccccgcgagcttcttgatcaattcttcagaaagaatactaagtttgtagcaaatttaagagcatgaaagtttttagtattgaaacaaaatgaatatcatgaaagaagtatgattgacaaatagtcttgtcaaggatattaagagtatggaagtttttaggattgaaaaaaaaatgaatatcatgacaagtatgattgacaaatagtcttgtcagaaggataataagagtatgaaactttttaggattgaaaaaaaatatatcattagagaaagattcaggtagttatttggtgattgataaagtggggtcttactacacattgggataatttggattttgtggtgatttagacatgttaggcaaagaagctaagttagctgctgtgttgacagtgataagcacttgtgtttcgtgagcaacctgctaaaccaactgtgcacgtatggtctgttcatttgtagcagcagcaagctaagtgtgaatatccactttgtctttttggtgtcaacattgtaccaattcactgtcataaaagttgaattatctcattcaaccaaagtaatatatgcttttggatttacgccgattgtattttcatagtcttcttttattaaaaaaagatgcttcttctcatctccttttccttcagaaagaacctcatcagataattttagtgtttgagtttgcaatggtcactgaattttctactacagtctcattatgccaatcaacttttaccatgattacatatggtattttttttcaattaaactaacaggcataaactatttattacttcctgaagctgaaactttactattacattcactagagctctaggtcaggcatcaccaagcatgaaagcattcgcgggagggcaggctgcggcatacaagatgtttgagacaatcaacagggagccagagatcgatgcgtacagcgccacaggtaggaagctagatgacattcagggggatatcgagttcagaaacgtttacttttcgtacccgacaaggcccgatgagcaaatattcagagggttctcgcttgccatacagagtggaacaactgttgcattggttggacagagtgggagtggaaaatcaacagtcatcagcttaatcgagcggttttacgaccctcagctcggtgaagttctaattgatggagtgaatctcaaggagttgcagctaaggtggatcagaagtaaaattggccttgtgagccaggagccaatcttgtttgctgctagcattatagataacatagcttatggcagggataatgctacaaatcaggaaattagagctgcagctgagcttgctaatgcctccaaattcattgataaaatgccccaggtcagtggactgcttaaccccttgaacttgtaaatagtacatcaataactgcataaattgtgttgaaaactagaaatggctacatatagaagaattttagctattaagagaagcttgaactatatattctgtatcatatattgagcatctgtaggtcacaacatgtcacagggttttgctactttggttggtgaacatggaacacaattatctggtgggcagaagcaaagaattgccattgcagagcaattctgaaagatccaagg

SEQ ID NO: 23209 - DNA, 3626 bp, Oryza sativa
  unsure (1)..(3626): unsure at all n locations
caggaaaacagtcatgattctgaggatgcaaattaccagaacaagtcaggcaagaagagtgattctgggattcgctcgggcaaacaatcgttttcgtaccagtcgactcctcagagatcatctagggacaacagtaacaatcactcattctcagtatctgctactcctctagaaattgatgtccagggtggttcaccaaagaagatagctgaagaaacaccacaggaagtgcctctcagtcgcctcgcagcgcttaacaaaccagagatcccagtgcttctgcttggttctgttgcttctgctgtcagtggagttatcttcccaatctttgcgatacttttatccaatgtgatcaaagcattttatgagcccccacaagtgctaaagaaggatgctgagttttggtcatcgatgttcttagtgtttggggcagtgtacttcttgtcacttcctattggctcataccttttttcagtggctgggtgtaggttgatcagaaggatcagactgatgacttttgagaaggttgtaaatatggagattgaatggtttgatcatccagaaaactcaagtggatcaatcggagcaaggctatcggccgatgcagcaaaaattagggggcttgtgggtgatgcacttcaactggttgtgcagaatttagcaacattagttgctggtttgttgattgcttttatatcaaactgggagctatctctgatcatcttggcgttgataccactcatcggcgtcaacggatggatccagatgaagtttattcagggattcagtgcagatgcaaaggtaatcataaaaatgttgaaacaccaaattcttttgtttcagtcaatcttttagcaaatcttgtatcttcaaattcttttgccttggatactcaaatttagatagtttgtcaacactgcattgattctcaattattactgcagatgatgtatgaagaggcaagccaagtggcaaatgatgcagtgagcagcataaggacagtagcctcattttcagctgaagagaagtaatggatttgtacaagatgaaatgtgaaggaccactaagaacaggaatcaggacggcgataataagtggtatcggtttcggtgtttctatcttcctgctgtttggagtctatgcagccagcttctatgccggtgctcggcttgtcgaggacaggaaaacaacatttcctaacgttttcagggtatgtgcagtgttcactacaagatatttacagactcaaacttttaaactttttaggcacttgcatgtcaatatgctagttgaagatttgcacgtcaatatgctagttgaatatagatttttcaaaggggcattgagatttaaacttcaaggtggctagtttgttataaatgatgcaatgcttaggcttagttaaatataatttcaaagtgaaagatatcatatcttgggcatcttattgcaggtgtttcttgctctcacaatggcagcaattggggtgtcacacactagcaacctcacatcagattcttccaaggcaaaatcagctgtatcttctatattcgccatcgtagaccgtaaatctaggattgatccaagtgatgatgctggagtgagcttagaaccactaagaggcgatatcgagttccagcatgtgagcttcagatatcctacacgaccagatgttcagatcttttgtaacgactctgtcgctctaacacattcaactnnctgcgaaaggtacccaacacctccctttaatttgcagcactattagagcctattaacaacacactcataacaggtattctgaagactaaatcctaatggtttttattctggcagcactgttgcntcttgttcggagcagaggcggtagtcgggtaaatccgacagccgatatcacttgcttcagaggttctatgactccggatgcaggctcatatacttnctagtatggagtggacattcanaaagtttcagctaaggtggctaaggcaacagatgggtctagtgagtcaagaaccagctctgttcaatgacacgattcgcgcaaacatcgcgtatgggaaggaaggggatgcgacagaatcagacatcgtatcctccgcgcaattggcgaatgcgcacaagttcatcagctcattgcatcaggtgaaattcaaattgcccgtcccaaccagctcaccctcattcattcagacattgtgttcatgtttctgacagaaaatgtgttacctgaaaaaaatgcagggataatgaaaccatggtcggggagcgtggagctcagctatccggagggcagaagcaacgcatcgcgatcgcccgcgccattgtcaaggatcccaagatcctccttctcgatgaagccacgagtgcgctcgacgcagaatcggagcgcgtcgtccaagatgcgctggaccgggtgatgatgaacaggaccacggtgatcgtggcacaccggctgtccacaattcagggcgcagacatgatcgcggtggtgaagaacgggatgatcatcgagaaggggaagcatgatgcattgatcggcatcaaggatggagcttacgcctccctcgtcgccctccatgtttctgctgctgccatttcgtagcagatctagcagacgccatggatgaaaagatcatggtttgttgctgaatctgtgagaggagcaagagactggtgtaactgtagcttgtgcaggctccagctcttgtcatccagcagcagcagcagaagaagaaaaatttgatgaacacaaatatgtcatgtatacatagatagataagatcatacaaagatgtgcaaatgtaaatgcaacgagttgtatgaatgaatgttcatatgatatgaagcagatgatgatgatgatatggatattcattggcatagttgtgatgctttgttcttgttcttgcctccaaagtttccccccatataagaaaagaacctgatgattggatttaatctttttttgaaacctaatgattggatttaatcgagaaacaagaatcagctgagcaaagataatcttaagagggcaagccaatttgctaaagcaaacacaattttgtcaacagtgacttgagagtcactggataattaatcaatgatgaacctcctgtaagaaactgaagatgtaccaatttcattaggatgaagagataatcctaatgctgcagataaactcttccaaagcaatgaaaaaaacaacaggttcaacacttgacagtaatatatctttagttatcttcaattttttttttgtggaaaagaaaatctgaagttctgaattttcttactcccggtgcagggcagacacggtccacggaacgagcgacctcgacgaccagtcaaaccgccgcgtgctgctgacgtggcagtcatctcagccgtccaaactcgtctaccgccaaccaacagccaggatctctcccccccacgaccaccgcctcattggtccacataagccgcagcccaccgcccagccaaccacggcctgccacgtacgaacccaaggggcaaaaccgtaaattcctagcaacccagacgccgacgcgtcgactcgtcgcaacgcaacctgaggagggaaaaaaaagagaaaaagaaaaaaagaaaaggaataaaaataaaaa

SEQ ID NO: 23210 - DNA, 706 bp, Oryza sativa
gctgagattaacaatgcatattttgcttgaactttacttgggttgtaaaaattagacagatgattcgttttgtagtgtgacatttgtgtgagctaggagcttaggactagaattgaattgctgcaaatgttttaatgcaggaagccacagagctactgctggaggagttgaatcgaatgagggatgaggagggcgaactgaagaagaagatgaaggaggacaaggatgcaatgaaagcactcaagaagcagcagaaggaagcaatgaaggctgccacgacgatgaaatgcaatgatgatgactcctctgaatcaagtgaatcaagtgagagtgagtgtgaggagcagatgatgacaatgagctgcgttgccactgttaccatgccgcaaattggggaaggcgttgcgatctcaacgacagttccccaagttgctgcatccgatgtcgcaacagcaccagcaatggagtatgacaaggctgcaatgaaggccatgaagaagagagaaaaggaagagaagaaagccgcaaagatggctatgaagatgaagaagaaggaaaagaagatggccacattgactctctgcaaggatgaagacagcacctcatgctcctcagaatctagcgacagcgagtgcgaggaggttgtcagaatgagctgctgtgctacgataaccacaccacaaacacaaccctcgagcaccgtttt

SEQ ID NO: 23211 - DNA, 575 bp, Oryza sativa
caaaatcagctttaaacactcttccgcagcgagaaatattcaacacagaatcaccacaagaatcaaaaactttacttccagttttcttaaagtgaacctcaaaatcttcatcaacaatttgtgaaactgaaagcaaattgtactttaaatcctcaaccaaagctacattcttcaattcaaatttttcatttaccttaaccgaacctgtagcgagaatggaacttgtagaagcatcacgaaagataatcgattcagtcttggatgcctttttgagggaggagaaccaatttttatcaccggtcatgtgccgcgaacaaccggaatcacattcttcaattcaaatttttcatttatcttaaccaaacctgtagcgagaacggcacttatagaagtatcaccaaagataatcgattcagtcttggatggctttttgagggagaagaaccaatttttatcaccggtcatgtgccgcgaacaaccgaaatccacgatccacacgttcttcttccttgccaccaaagcctacacacaagcagaagttgaagcctcagtacttggattagatgataataaaa

SEQ ID NO: 23212 - DNA, 1552 bp, Oryza sativa
tatgtctatgcgacgaccttgttcaagtagtagctttggattctgaccatacaaggagattttttttttcagtcagtgtaatgcacatttttaatctgccaagccagaaattgacatccaaattccctctcaatgcatctgcagtagcatttgctgcggcaagtgtccctatgaactgcatctgcatggcaattttcttcagatatttgtactaatcgtggatggtccttagggttcgcacttccaaatgcgagcattttgaagaggtagctcaattcttcatctgaatggttgttaagaaacattggctttacagttccaagtttctctgattttctaagtctgcttatggttaccaccttgcttccctcattcatttgtgccacggatttatagaattcctcccaattcatctcattcacatctgaaacaaactccacaaccatcaaaatgttccctgccaagagagtatgattgtgtgctattcccaaaagatcaccttcattcaaatgcaaaatggaagaaaactgtgattgaaccctctcgtcggcgcatacatgcgcaaccagagttttcttcccaactccaagagcaccaatgattggaagaacagcaggctgcacaccaggagggttgtattccaataggaaattcaggagcctctgcttttcagaatgacggccaaacatgaagttatctatgtaaagataggtatcatatggtctccttgacatccgatcgcatccacccaaaagaacaacaaattctgccatgtgatcaacagcagtttctaatatttccaaagttctgtgcaactcaaggtgcctggccttgtcctttccagaagcatcaacaattttgcaaaaacgtttgaggggaggaaatgggttgctaacctccttgatgggatcctcctgaattagggtcctgcacctgaacatgtccaggacatggtggcctctgtacatggcatcagcaagtgccttcagctgcatcagcatcccggagttggtgatgtatcgcccatctgcctcctcgacaaccatggaaactcgtaggagaagctgctgcagtcttttcagctgcttctcctctgagatttcatgtcttcttgagtacttgctcatgaggtaggagatgaaccgggtgaccagttcaccggttactgctgatacgacatgctccatatccaaacctcgaaatttaacagagagatgagagatcaaatttagctgttgtgtgtgactgaaatttcagggaagattgtttgcttaaattggtagtcatctttgtcaggtccgtcaaaattgttggcttctatttgtgatattttggccctcggagcaactatttagaagaatcttaaaaaaaaacatctggatgtcctgacaaactagcctggcagagcaagtgattttcctaggcagacataggatatctcatgattggcatactgtttaacttaaatatttagtagtacattactattttctatttttttgtcacaatgccacacatagttgatattttatagaacttcatctatcaactg

SEQ ID NO: 23213 - DNA, 19947 bp, Oryza sativa
cctgaaacatgtcgctaatgttgcaggaaactaatacttttatcaataaaattgcagttttcttaaatttactctatatctaaattacttttagattttattaaattacttcttagtcataaaagtaatttaataaagcttgaaagtaatttacctatattatagaaggaacttaaaacaaaaggtaacttgttacggcattaaaagaaatctatacattcatgttgtgagttgtttattttataatcatttttagtcaatgacgtaatttgtgctgattaaatttaatttctatatagactcatgtttttacctctataacgaatttacttttaatgtcgtgataaagttactttctttttttttctaagttacttctataatatatgaaattacttttaggctttattgaatttacttttatgagtctaaaaagtaatttagtgaaatctaaaagtaatttagatatattataaaagtaatttataatttttcatcaaaatataatcatgtgagattttgttataaagattcaattcttacgaacacaatagtgtaatcggatcgtagatcggatgattagtttaagacaaaattatttttgacgccggcgtagcatagagcatcacatggcttccaatttggattcctcttgatgatgccatgtccgtaaatcaccaggccatgtacggaggcaccagcgcttgtgggatcggacggccgatgaacatgtcgcatgatagggcaaaacagagagcgcgcgcgaattagattttgccttaaaaattggtgaaatttaggatttgctgcagtctcttggaatttgtaaccttcatagaactgttggtttcagttggttgtgaactaatattaccacatattttttattaaggtagctaagcttagttttaccatacttttgtggcaaacaaaataacaaactaagtttaggcaaagttagacaagaaaatagagtgtatgacatgtggcctaggtggctaagagttaggcaaagtagacttgtgtcatgaaccaatcactacatgttaaagtatggtttacctaaggttagatgtgacaaatttagttgccgaccaaacatgccgtctcttggagttttgctttcccctgcttgtcacctaaattattagggtgtggtcattttcactgtaatgtgtgagcttcatttgtaaagttgtaaccctagcaaacatggctttctataaattggtcctcgtggctcgtgaccttttatctaaaaaattaccgtattcgagaaatggtattactaaagttgacatagaatatgtgctattaatacttctctaaattttagccataccaataccattaatatttatgtcaacttccatctctcctctgttatttcttctctagcttcaacgtggatgccatcactcattcaatctagcttcgacgttgatggaatacgacgccaggggtggggaagacaatggatgtggaggagaagagtagcggtgtgtcaatcaccagtaattgagggggcaccttgcaaggcaacgattcctgagctcaagcagccaagggtgatggtggtgcggcttagggagatgacgcagcttggcagtggcgaggaaaagcgatggtggttgctagggcgttggagatgggcagaaaaggggcctgctagtggatcccgtcacgctttgcctccttcggccaccattgtatcctctccaaccacatttcctcatgctgccgctgaatcttctccagtcactgtccccgaaggaaatgtgactgaaatattttggccagagcaattttgtaatggtatggataaaattaacactaaaatttattaatttccttgtttttcatccttcttggccaaaataggtagctgggttatctgacaccatagaaccaaattatctatgatgtgtattagcataggggatcatagttggttatctaaaaatagccattctttagtcaggtttattatgtggatataggttcaccttttattctatttccatctctatatagcctgtgctcctcactcgtaacatatgtcgttgtaaatgtaaatgttgcgagtgtgtggatttctgtctctggttttttaatatatggtgccgttaacttttgaatatgtattttgaccattcatttgattcaaaatttttatgcaaacatagaaaaatataagtcacgcttaacgaaactttagtgataaatcaaataaaaaacaaataatgattatatgattttttaataaaataaacagtgaagcgcgtataagaaaaaaatcaacaacgtgagatgttaaaaattaaagggagtagtgcagtagagaaaacgtccttgctaaatattttccttcttttatacagaccacatgcttgatcggaccatattatactcctttaatatattggtgaccggagtgatctagctttaaaaaatgatcacgcatagtcacatataaaatcaaattaaggggaatattccctatacaaaaataataggtaacacattgcatgaaatatatagatattattataatatattttcgtttatctgcatcaatgcacatgtattcagctagtataataaaacattaattatatgtatttttttatgaaatttaactccatttgattgagaggaatggttcattacacagtagaacatgcagctcatcttaacaaaatgaaatcaaaagttatcttgcacttggatcagtaattaatggtcacatcattgatagtactacatgttcctacagtggatgattcatcattttttgtcacccttacatggaaatatgctggatgcttaggctcatcaaggaccatactctcactacttagcattgcaacaacatttgacatggtcggtcgatcaactgcattctcttgtacacacaacaacgcaatgttaatgcacctcaacatacacgatgactgccaatttgtaaccaatgatgcatcaagaagttcaagccatctttcctctgaccacaacttccatgcctatttcaatatttcaacagacagtataggtaagataccaaataaacaaaacaatctacacactttacatgtgtccaagaactcacatatccaaggagattgatgaagtcttcacattgatctaaactggcatttctttttccgctaatgatctcgagaattataacgccaaagctgaatacatcagattttggagagaagaggccctcggaagaatactctggagccatgtaaccactaaaaatgatatacaatatttgtcaaattttgttcgtgcttgaattataatgaaaaatatgttcaaatttctatgatacttactaggtcccaaccactcttcttgtagttccttcattgctatttgagccaaatatttttgctagcccgaaatctgaaattttggggttcatttcgctgtccaagagaatgttacttggcttaaggtctcgatgaatcacacgcaatcgggagtgcttatgtagataaagcagtccttgtgctattccttcgattatcactagacgtttgttccaatctagtaaatcttttttcctttcatctgcacaaaaattatatattagtacaacaggaaaaggagatagacacctcaacaaaatactgatgggaaaattttccaaattttcctcaataaataaacctaagttcaggaatctagatatataccgaaaatatagaagtccaaacttttgtttggcaagtattcatagaccaatattttctcctctccttgagagcagcatcccaagagcctaactaaattcctgtgctggagtttggcaattagttggacttcatttttgaactctaggaaaccttgtcctgaatgtgaagcaagtctcttaactgctatctccaatccctcagaaaacaggccctgaaacaaatattcagaaatttttcattgtgattatcatgggatctatggtagtatgcagttttttttatacgaatctatataatgagaatttgcatatcattcttttgtattattaatcagacaatgaaagattatactccacatgtgtcttatttaccttatatacagggccaaatccaccttctccaagtttgttttcttcagaaaagttatctgtagccttgataacctcacgaaactcgaaaaccgaaaactctgaaatctctccctccatttcgcaaattagttcatctcctcggaacctgcgactacgcttttctcgcaatctcactctatctggataattgagaattagtgcagattcattactcttagttaacaatataacgaacataacaatttgagatgaacatttcagcggcaataaacacaccttttctgaaccttcttgaccaacgacagtagtaacagacgatcaagcagagaactactgccgctacaggagctgcaatagcagcaattacccatgatttgctcttctttcctaaattaaagaacccacgatcaaatttaacatgtcaattaacggcatatttgcaaataaaaaataatttgtgaataaaaaatgtatatacgtgttcttagcaatctaaaaacaaaggctgaaaaataaacttcgataaaaaaaactctaaaatcaattctaaatttacggttgaaaatttaaattttggctggtaagcatagcataagtattcagagtgaaaatcatatatttacagaggaaaaaaaagcagaattttcagatactgaaaaagagggggagtttttacgcactgtttttggtcggagcgatggaatccggcgccggagttgagcccggcgggctgacacgccgcgtgggctcgccggcgtagaagacaaaggcctcgaacctgagattgcaccggagcaagaggacgcgtcctcccaagcgcacggaggtggtggagttcaccatggcgatgaggcgctggaggcaagccaggcagtcgccggcggccaagtccggcgtgcactgcgccagcgagtagagcgtctgcttcgactcgctgcttccgtccatgaagcctgtggcgaaccgcctcgccgccgccgccgccgtccgggccgtcaccgtcagcagctcgcggacgttggcggcggcgacggcggcgtcgccggtgatgttctgctggttccatgcctggaagagcgtggcgttctccgtgatgttgggcgcggcgaggaagtcgtcgccggcgaagcggaggaggcagtcgtcgtagtagatggtcgccgacttgtcgctcgggcacgtccgccgcgcgtcctggaacgaggccgcgacgcagtcgccgcaggcggtggcgttggcgacgtcgccgcggcagagcgcgagcgcgtacgccgcgtcgggggcctggccggcggtggccgtggcgaagtggtccggggaggaggaggcgttgctcgggagggcggcggcgaggcgcgcgaggttggactggtaggtgccgttggccgtgtagttgccgccgttgccgcagagctgcgccagtagttcgccggcggcgagcggcatgatgctaaggaggagcaggacgccgaccatggcgaacgacggtttacctgtagttgcatgcttggtgttttatccggaatcaacctgtagagattttttttttcaaaaaagaaataaataaaatggtaatgaaacaatactcccagtctaagatccgcgggtgaaaatgattaagtccctcaattcaaaagtctaagatccactggtaaaaatgattaaggtgaaccaaacaatactttaaaaatttatagaaaattcatttcaagtccgattaaggtgaaccaaagtttctccacgatccttacaatattctctttaatatgactggttcatatttacttaaaacaaccattttcagtatgattgtttacttatatatatcttacgtagtctccatgtaagttgatattagtaagtgaccatactaaaaattactgaaattgccatattataggaaatactataagaaatctcatagaactttggtttacctcaatcatgtttaatatgttttttttctatttttcttaagtttggactttctagaggtaaaaatatagaccaacaaatttaacgcatatttaaacccccccctaatgatctcaaatgaacgacctttcaactattaagttgtagatcttattcgaaggttacaaattttttttagaacataccttcgtctgaagacttttgcaaatacatataaaaagaacaaattcaaaaatagatcttagattggaaaaaaatatttgaacccctaaaagatatcaaataatgaataaacattcaactacaaagttgtatatctcgttgagggcaacatattttatgcacataagcttcccgtgcacaccaactagcaaatgccacagaaaattctagaaaaaaaattagatacatacttccaatagtattacaccaacgtgtgaaatattttcttcaaattcattatattttagccacaacaaaaaagacaaaattctaacagatttttacccaaaaactgttagatttttcatttttttttgttacggctaaaatatattgaatttgaatatgagactttacaaatatgtgtaatgctattaggagtatgtgtcttatttttccatcaaagatgataaataaactttttttccatcaagacgatgcagagtaagccagagcagtcgtgttgagacgctccccaaaaaccttattgcccgcctacctgtgcaggcactcaagcggataggattccggaggctccgctcgtcccgtacacctgtgcgtgtaggtgaacggaaccgggaaaggatcttgcagcgcaagaacagagggaggtacaggaggaagaacgaagtgcaagagtcgggtagaactgaagaaccttccgtacttctgttcgttcctatggcggtgtatatgcgagcgcgggagtaatgttaatcaatcaccgtgtttaataccgtccgttacaaaaagagagagagagagagagagaagcagccgccgtctgcctcgccacgcccacggcctggcctggcgcacgcacgcgtgtggctgttcgcccaccatctcaaccggtcaacaaagactctccactagctctatcgaagattacaattttttatagaacatatctccatgtgaagtcttttgcaaatataagaaaaacaaattcaaaaatagatctgagattggaaaaaatatttgaacccctaaatgatatcaaatgaacaaacattcaactacaattcggttaactgagacccatgaccgaccgaattaatttaggtctttcgctgtttgagactgaactactgatcgaatatcttttctgttcagtcttactctacccactcctatttagtggtgctcttatttttaacggtgattttcttacgtataaccacatgtgaaattcagtttttacatgctaatgtcgtagggaataattattttcgcagtggatttgttagagatccaaaaaaaaaaggttttcttagttagtctatgacctgagacaaccttaactatttttgcaagtgctatttgttttagccgcccgtgacgttgagacatttttacccatttgtgcgagaattatatagcagtgccaccgttcttttctattgttcaagtacttctactacctgatcagccaagggggagaaatatcttgatcctgcagtttttccttattgttgtggacgtactccctccgtactcgtaaaggaagtcgtttaggataatatttaagtcaaaccttgcgaatatgaatcatgaataactctcaagttattgagtttgaaaatataaaaattatataaatagatttgtcttgaaaagtcataaaagtatacatatatcacttttcaataaatatttttataaaaacaagaagtcaaagttgtgttttgaagaccgtatcgttgtccaaaatgacttcctttacgagtacggagggagtacactcgtacaggacgaaggtatggatctatgttagtctgacctatataaccaacacgtctaacaaagtattaaaattttaatatttataatatagtaataatagtctatgcaacattcgagttaacgactagttaatataatggcccattaatacataattagctagatgctactccctccattctatattataaattgttttattttttcttaatttaactaagtttataaaataatttagtaatatttactttcattaaaactaaattttaataaatttaaaaaatatatttattttgtgttgagaatattttaatatttttttataaacttagtcaatttttgaaaaaagttaaagcactaataatataaaaacagaaagactaattaagacttttgggtgtgccggtctccagccggcaccctgtccatgtctgcctctccttatcaatcaccatttgttcatttcacctgtcattttgagagataaaaaaatttctcgattcatttatatttatcgtacgttagttgctttcaacattacttcctaaattaattttaggccttcacacacgctttctagtatgaaatgttaacaattaacttgactaaatactctctctgtgtccacaaatataaatattttcttaaagacattaaggataaaacaaaaaaggctataaaatagagtttaggattagttgaaaattaaatgagatatggttaagtgagggaagtagtaccaagtaatcgcgtgtatttatatatggaaaaaattcaaatgctataatttcttatatttgtgatgaaatgagtattagacaataatgcacttcctttcttttccctgaaatcctatggactgacgtgaagggcacgagaccagcaaaaaactcaccgttaataaaatgaaatacttgtaaaccatcactctcgatggtctttgaattattcaatggacgcgccttcttgaatttaaagacaatgtgtactatatgggatagctcgataggtcctgaagtttgacaaattcttcatttagcttgttgctatcaatcaataaacggtccctctttaatttagatatatatatagagacaggataacaggaagaaaggaagtgtcttattgtccacaaatactccctccgtccttaaatatttaacgctgttgacttttttttaaacatgtttgaccgttcatcttattcaaatttttttgtgaaatatgtaaaactatatgtaaacataaaaatatatttaacaatgaatcaaatgatagaaaaaaaattaagaattacttaaatttttttgaataatatgaacggtcaaacatatttaaaaaaatcaacgatgtcaaaatgtttagagacggagggagtataaaagagtgaagtgtataaaaagttctagcacaagggactaaaaaataattttcatatatacttgaggtatcaaaagttgtgatagctctcgtcgtacctatcgaaggacgtaaaatcgctcaagatttttagaccttggtttgagatgtgtgtagtcaagtatgagatcaatttcctgggtctgccaacctgagtagaaacaaaaataagcagaagatgaccggccagcccggcacatcaatcaaatttaattaaacttatatttatattttgtgtgcataaagatttttttttaccttctctcttgagatatttgtagccacatatatgaaaaaaaatcactcgatccgcaaccatagattgatactctcttcgttcatattataaatttattttaactttttttaattattatgttttaagttctgaacaaatttatagataaattagcaacatctgcaatattaacttagttccattaagactaccatttaatatattttgataatatatttattatgtgttagaaatattgctatattttttataaaaaatcaaatctacttataatatgaaaccggaaatgccagcgatcgggcgctcgatcagctgcagaaaaatcatgcgcccaccgcttcccgcgcctatgcacgcgcgctcccgcgcctccgtgccgtccccaccacgcgtcctaccatacgcgccgttgcaacaaatcacccacatattacggaaacgctctgttaagggaatccgtttcattttttgttccaccaacaatgtttcaccaattgtacttgtaatgttttactatatatgaatcaaatgttgcagtgaattgaaacatcctttcgctatttgctgaaacattgtttttatgtagggtgaaacaacactcgatttttttggaaaatgttgtttcgtacgttgtagcaaaatgtttcacgaggtgatttaatttggttgtgtttcagctttttaaaatattgaaacaatttcgatctgcttggtgaaacaatttcgatatacttggtgaaacaatgtctgatttttttttaaaaaaattggacgtccgatttataggtggccccatatgaaacggtaacggaggggtagtataacaaaggggtgtagctatatttatggcgccatatttttcatcaaaaaatagtcggcatgtatttacattgtaagtccctaaattacatatgtaattttagtgtatttacaatgtaagtctcaaaattacatatgtaagtactaaaattacatatgtaaattcgaaaattacatactaattacatatgtaagtgaggtgtaaatgatatgtaactactgtgtaagtggctgaaaaaaatcaactagcatatagcgccatatttctagcaactccgtaacaaagagggtactgatcgggaataaaaaggggaagcagctgactggccggccggctgcgaggcagttagctagcttagacgccatggacatcgtcgtcggcgtcctgctcatactgggcctcatgccgatgccgttcgaggtcatcatggccgccgccgacgatggtggcggcgtgttctgcgacaacctcaagttcgtgtccgcaaccctccccaacaaaacctcctcctccccgcaccactacgccaccgccgccgccggccaagcccccgacgtggtctacgtcctcgcgctctgccgcggcgacctcaacgacacagcttgcggcgaatccgtcgcctacacgttcgcgagactgatcaacgagtcgtgcgtcgccaactacacggccggggcttactacggcgactgcaccggcgtctactccttccagaactttctcgatccttccgacgccacagaagacgaggagcccttcgagaggtggaacgtcaacaacatcaccggcgacggcgagaacgtgcggttcatcgccggcctcatccaacagcttctgtcggaaacggtggagagggcggccggcgccgcggggcggtttgcgacgggcgtcgtggacaccggcaggacgttcccgctggtgtactcgctggcgcaatgcacgccggacctgtccgccggcgactgcctggcgtgcctccgccgcctcaccggcatgatcaactccaccatggccgtgcgcatgggtgcgcagatacatgtcacacggtgctacttcaggtatgaggcgtacgtgttctacgacagcaagcctatgctgcatctcaccggcgcgccggctccggccatccccaaaagtaagactattcttggattctcaattagacctcgttcggttattccctacaactgtggaattaatcctctgggtgggcttgttcggttattctccacgactatagatggccaaaataggcgccacggccgggcccgggccgagatcacttgcccatgtccacttgctgcaccatcggtctaggcacggctcaataaaacttgggccttaccaagccagcccaaaggcatgaaagccatcatgctaaaagtttatttgaagtccctaatctctttcggcagtctcttaatggctgggataagtctatttgcatccctcgtttctttgggccatatcctatatatagatggccatatggcttgaggcccatggcccggcctaagacacgccattttggcccgcccaagcacggcacagcccgactcggggtcatgccggtgccggcctggcccgatagccgggccgtgcctcggccgcaccctcggcacggtgggccggcccggcacccaaccaaataaaaaaagtcgtgggatgcaaaatatacttgatgaaccatatcagacaggacccaaagagaagaggaatacataatagacttattttccagccatatagacctagcccacagagttgagggaccaaaaacagatttattatgtgaaaatcacaataagtcgtgccttcaagccggcccggcacaacccgagtcgtgttgggccatgcctgggccatgtgtgcggcccgtgggctggcacggcatggcccggagtgtaggtcgggccgtgccggcccaattaacctcggtccaggcatggccaggcctgggccgtgccgcccgtttggccatctatagtcctatatggctagaataagtctatttaactccctgatcatttgaccgggccatgctgggtcggcccatcgtgccgagggtgaggcccaagcacggcccaaaaatcgggcaatgccatactttaatttggtcaggccaaaaccccgtgccatgggccaagccgtcgggcctctggccttttggccaactatatccacgacggaggcaatggaggggattgagagggaatatataatccctatgtaaatctctctcaactctcttgtgggtgggattaaccactaaataagtccttaatcacgtccaatttctttctcataaagatcaaccgaacaagctttagagattacaaattccgtaaaattaatttaatcatatatatactcttcagatcccacatgtcagtcaccttagatgacgtcacatgacactagtatagcagagtaaatctttattgttcgattaaaaggaaggacatatggtcaaacctcacaccaaatgttttgaatttgtttgagtttagttaaaataaattaacttcagcaaaatcagattcaacctttttctttctgaaatttggaattcaccaaaattattatgtattcagattttcaacctcctgacccacatgtcagttactttagatgaccccacatgtcattgggaacatgagagtaaattcttaaattttgatctaaaggaacagtatatgatcaaatcgcctgctatgatttaaattcctttcttgttagttttgaagtgaaaaatgttcattgccttgaacaatttcgaatttgtttgactttaggtaaagttatttcaaattcagcaaaatctgttcaaattattttttttgaatttcctgaaatttgtaattcaccaaattatttcatattcacgttgtgaacctgtcccaatgcactatagttatgaatgatttgcaaaataatatccaatgtgtactattaatatattttccatgtatacaaattagcttctatctacttttgtttagacaaaagattgttatgtcatgttttagggcataagagcaagctctgggtaattcccattgtcataattcctgtggtggcatttttctgcttcattgtttactgcggctggcggagggggcacagaaaaggtaggttactaatttataaaatatttcatattgtttaaattacttaccgatgtcatggtcagttttttactgaggtacagatactaggagattctacattactaattaattaaaatcagagaaaatgacactagctagttaacattaggtggtctcagaccataaaaggtacctagtatagtgttgtgttcattagatataactgaacattgaagattgatattcttgattattcaggtataatgggattacaagcaaggagaactgataacttgcagggagaggaagaattagtttgggacctagaaggaaaaaatccagagttttcagtatttgagtttgatcaggtactggaggctacaagtaatttttctgaagtaaacaagcttggagaaggtggctttggcgccgtgtacaaggtaaaaatccaaaacacatagttccttcgttaacttttaaacatatatttgatcgtttgtctaattaaaagaactagtacaaatatgtaaaaatataggccatgtttaaggtactagtaatgataaaacaaattacaagaaataaataataattacataatatattttgtataagatgaatggacgaacatgttcataaaagtcaacagcgtcaaaggagtatgtgattataagtaatgggaaacctttctagtttaacctcagtagacaatatacaataaacatgcaactattatttaaaacgggttcaattttggcttgatgataattatcaggaattgaactttcggtctaaagttttatgagacctaaaccacaccaccctcatctccaaatatgcatccaaattagctactggtttcctggggacttttcatggatcaactagattttgcaccacaaaaaccactgaaggacttctatttttttgcagggccattttcctgatggaatagagatagcagtcaagagacttgcttcacattcaggacaaggtttcatagagttcaaaaatgaagtccagctcatagccaaactacagcacaggaatttggttaggctcttggggtgttgctctcatgaagaggagaaaattttggtctatgaattcttgccaaacaaaagcttggacttatttatctttggtatataatttgtattatatttctcagtataggttacatattttgataaaaaaaataattgttatgttctttttcctatcatactgatactttactgatgtgcagatgaaaataaaagagctttgctggattggtacaaacgtctagaaataattgaaggaatagcacatggacttctttacctacataagcactcccgattgagtgtcatacatcgagatcttaaaccgagtaacattctcttggatagcgaaatgaaccctaaaatttcagactttgggttagcaagaatatttagctcaaataacacagaaggaaacacaacaagaagagtggttggtacatagtaagtttcatgtaaattagtccacttatgaaatttatgttataactcaactgcacatacaatatataatttttacttgcatgtatcattttagcggctacatggctccggagtatgcttctgtgggcctcttctctatcaaatccgacgtattcagctttggtgttctatttcttgagattatcagtggaaaaaagaattctggttcccatcatagtggagactttatcaatctccttggatttgtgagtttacaaacacatatacaatattttaaaattgtcttttctgtctaagtggtgtttttcctacattaacctacctatattgttctcgaaatttcatacaggcatggtcactatggggagagggaagatggcttgaactcatcgatgaatcattagtttccaaatatcctcctgcagaaaatgaaatcatgaggtgcattaacatagcattgctgtgtgtacaagagaatgcagctgatcgaccaaccatgtcagatgttgttgcaatgctaagcagcaagacgatggtcctggctgaacctaagcacccgggatatttcaatgtgagagtggcaaatgaagagcaatctgttcttactgagccatgtagtgttaatgatatgaccatatctgccataagtgctagatagtttattcttcatgtgtcatgtggctttcgttgatccaatgtacgtagtatttgaagatatcataacagaattataatgctgtggtatttcaggtgtcggagtatgtactccccaaagagtgatcctagatttttgtatacaaacaaatggcttttgtatttatttggtgggtagcaaatcaataccataactatcgttggtgccaattttgaaaacaaagtgaaaatattgggtatggcctagtaaaaaatgaagaacattggttacaagactctgttcgtgatgggttttaggctgagcttatggtttgcacgacaaaacgagacaattgattagggatatgattaattaagtattaatctctactattataaatattgaagatgtttgtgccggtattttggtatgttatccgtgtttgagtcagtttttaaagtttattcgcttttgaaaatacagatccgtgtttaagtcagattttaaatttgtttgcttttagaaataaaaaatagtcgtataagaaatctctttaaaaaactcgcatgcagacttctaattgtagctcctgattttctaaaaaaaatatccaagcaaattcccacaatcaattttaccttagctaaaccgtataacaataataagattaaaatagttttcactcgttgtaatgcatggatatttttttaagctatattataaacttgaaaaatgggtttaaccaaagaaatgaaacgcagctgacattggcatttgccccagttgctgcctgtctctgatgagtaaacgcaggcgcatatgtgtatccctatccagccactatggctgccacctcacgggactagagtggcaagccacactgttcgccgtcgtgggtactagtcattgtacaaaccggcagcaatcgatgtactccctccagcccataaaaactaacataatactggatgtgacatatcttaatactataaatctggatggagggagtataaaataatgcacttcagaatttcaacctcccgactcacatattagtgactttagatgaccccacatgtcattgggtacatgagaggtgtagaatcgaatcacagtaactaaaccaaccagaggaggggtgaatggttggtatacccaaaaatcaaaaacttttagcggaaataaaagttaccctcgaattcaatgagatcggtctgaccggagtagattagccggtctgaccgaagcgtagccgttagtctgaccggtgtagatcgatcggtccgaccgccaaaacttgttgccgcctcctatcgccgaagccggtctgaccgcaggtcacccgccggtctgaccgccgcgatgccgccggttagaccgccgaaacccggtgaaacacaaatcgaagaactcttaaagtagatgacgactttattgattctctctgtgtttacaaagtgcaccaacagcactccttataaaaatttcgactaaactcgaaaccttaactcaaaacttaactcaattgctctcaaaagcgataccgggaagcctcacgctccccctctatttatacgcgaggtaggcagcctaaagccatgaaccaaactcatactaggagtcctaaacaccttaggaaaccctctagtacaagaaacaaactttacataaccaatcataccaaatttggactccttccaaattcaactccgcatcccatacgcacacaataactccatcgtatgccatatggaatctccatcaaccacgtgcatcaactgtagcctaagtatcccgcatgatctttgaccaccacggacgttgtcttatccccaagccgactcccagtccattaccgcaaatactctcccgaggcatcgagtcacctacacatgaaataaacaaagaaactatcttccgagaccaagctatctccaacttgactcatcagtagcaaacaacagtattacatatatatagtatccatctagaagccataatcatgaaataatcacggatatccaaacaaacaacccgaaacagaaaccgacacagcgtcggccggtcagaccgtgagctgcgccggtctgaccgcgcaatacacgccggtctaaccggcatccacggcccggtttgaccggtcacatgaaataacagcagtatcctatagattcacctatgaaatccaatcatctccaaaaccacttcgtgaataaattccaaatatcaaaaccaataatttccgatgccaattgttcatcacaaaataataataaaaaacctttgattttacaatctcccccttgatgaacacattggcaaacccatcagaaatgttttggtatttggaaaaataaaaacataagtggtaaaaaaagtatacttcgtacaaacgtacacatcgtgctcgaaaatctaaaagaaaacttctctcacttttgaaaagaaagatattccctcatgaaccaaaaacaacatgctcttctcttcaactcatttgtttctccaaaaattttcatcttgcttctcccaaaaaaatccaaaaattttacttgcttctcccccttttgacaatgatttcatcaagcataggaattacgtttattaatgtataagagcttagcatacatattgcatatcaagtcatgtgttgcaataaaaagaagatgaacccatctataacataacaagcatgcattaagtataaccatgaaccaaagattttacaattaagcttgaatcaacaatcaaaattcataattttatacgatttataatgcaacaacttaacaagcacataggttgaagaataaacactaaacacatatacctattgtatttatcactctttctcaaataacctttagcacaaaataacaaagagatttttttgactttttcttttcttgagcctttttgctcatatttttctcttttattctgggtacgtccctgtcgtcaagactgttttcagggattcggcacccattattttgctcacatcgaatacgtccttgtcgtcaagactgtttccaaggattcggtattcattttttttcatattttttattctcttttcacaatgagcaattaaagctatttgaggaataacaattcaataaagcatatatatagagcatttataaatcaaaccatatgctagcatcaacattgcatatttgcttaattcaagtagaatttaaatgtcatgcatcatcgcccttaaaagcaaaatctaaatctcatgaaaagactataatacatacaagctatgctagagacaaataaaccttcaaagtattgctaacatgcacaagaaaataccatatgtataaacaaagctctcttttctcaatttttctcattgtcatatttttgcttgataaaaccataaggtacaaactccccctcaaaccatgccaaaaggatgaattatgcccaattcactacgaagaaaagcaaaacgattataatctaaaggtttagtgaaaatgtcagcaagttgcaactttgtgtccaaaaactgcaattcgacatctcccttctcaacatgatccctcaaaaagtaaaaacaaattatcacaaaagattcttagcaatgttaatagcactaatattatcacaaaagagaggtactttctcaaaagtaagaccataatctttcaaagtagataaaagccaaaaaatatgtgaacaacaactagcagcagcaacatattcagattcagcagttgattgagcaacactagattgtttcctagaagaccatacaatcaatgatgtaccaagaaaatgacatgttccactagtatttttcctatcaattctacaaccaccaaaatcagcatcgaaatatccacttaagcatatagaagatgaagtagaataccaaattccaaactcaagtgtatgattcaaatacctcattatttgcttgaccggttgacgatgtgaagcacgaggagaagcttgaaagcgcgcacacaaacatacaacaaattgtatgtctggcctagaagcagttagatacaacaaagttccaatcatacttctatactccttttgatcaacagcttcaccatcttcatcaggatccaacacagctgtagaaccaattggtgttgaaattggcttgcatttctccatcttgaaccgtctcaagagatccttcgtatacttcgtttgatgcacaaaagtaccttgaggtgtttgcttaatgtgcaatccccaaaaa

SEQ ID NO: 23214 - DNA, 782 bp, Oryza sativa
ccaaaaatacgaccatcctccccctgaacctgtaacagtgtacctgcaatatcgtgtctagttcctggactagcctcatcaaaagaaacttcgcaagtttcaacgattttgttagtctccaaaataagtacacgatagccacgagtatgtgcggggtaaccaaggaacaatccaacagtagaacgtgcctcaaacttgtccaaatttccagatttcaagacaaagcatttgcaaccaaaaacacacaaatgtgaaactttgggttgatgaccaaatcgaaattcataagaagtttttccaagttttgatctcaagaaaactcgatttgaaatatagcatgcagtgttaatagcctcagcccaaaattttctaggagttttatactcgtccaacatcgttttagccatctcaaccaaaacacggtttttcctttcaacaacaccgttttgttgaggaacacgaggagaagaaaattcatgttcaagacctctttcgttgcaaaattgttcaaaagtatttttaaactcaccaccattatcacttcgaattcttttcaaagaaccagaaaattcaaaatctaatcgaagaaacaaaccatgaaagtgttgaaaagcttcgtccttagttgccataaagaaaacccaagaatatctaaaaaaaatcgtcaacaataacaaacacataccactttctttaacggattgcactctagctggaccaacagtgtccatgtgtaatagctgtcccggtgcattcgtcatcacagaaacaataggagcatg

SEQ ID NO: 23215 - DNA, 1313 bp, Oryza sativa
attcgcccatccatcttgctggcgccgatcaagaccaccttgaagtggcaggaccggaagccgccgccgtgcacgtggccgtcgtcgccggcggcacaaagcaccgcgccgttcatgacggatctctccccaccgtcgagctcctgcggaacggccacgcggcggcgatcgccggaaacgggatcccacacgaggaactcgcaggtgttgtagttgaagatgaggacgaggccgtggcggcagccgaggaggctcgcggcgcggtagtcgtcgagccgcagcgcgaagcggtcgggcgggatgagatccggcgggtcgaggacggatctgaagacggggtggtggagctcgtccttgaagacgccgaggagggggggatcccggtggcgggcgcggaagcggcggaggaaggcggggtcggagacgaggcggcgccactgcttgcagacgagggaggcgcgggggagggaggagggatgcgaggggaggcggaggaggatctcctggatgaggtcgtcgttgtccggcggaagcaccggcggcggcgccggcgccgccggggatgtccgccgccgccgccgctgccggcggcaggtcatttcgtcgccatggtcactcatgggaatctctgtctcgtttgttcactctggtttagtttttctcccacaaattcgggtaaaatttaaaaactcggatgaaatatgtctctcaacttaaaaaatggacgtgtcaacagagaccgttctctgtatggtcataaccaactacctcaatctcatatctagttgctactagtatacttccttcgtcccaaaaaaagataaacactgggtttccgtgtccaacatttgaccgtccgtcttatttgaaaaaattatgaaaaattaaaaagacaagtcacgcataaagtattaatcatgttttatcatctaacaacaacgaaaatactaattataaaaaaatttcatataagacggacagtcaaacgttggacatagaaacctagggtttgtcttttttttgacggagggagtactcaaaagtgcatgtatttttttttcttcttatggaattttatcttagattacttatccgatttacgatccgattacaccattatgttcataacaattaaatatttataacaagatctcatatgactatatttttatgaaaaaaatataaattacttttataatatatctaagagtaaatttcagaaaactgcaactttagtgacaaaactatcagtttgatgcaacattagcgatatgtttcagtttgctacaacaatagcgtgaaaaattatcaca

SEQ ID NO: 23216 - DNA, 1816 bp, Oryza sativa
aaaatcttaccacttctagcacaacacctaacacaacaggggggtgtctagaattatgagcataaggattaaaacctaaaccacggttatgtgtgctaactttagattgatccaaaatcatgttgaggttctttttaccatcagaaaatctttgcaaagaatttttcaaataagaaacctctttttctaaattagcacaattttcacaatctaccatgacacctttgcttttacgacacttggggcaagaaagcacttcattgtttttcacaacatcttccatttattcaacacgacctaaagcatctttcaatttcatcttattcaaattgcatgttgagcaatccaaaacatcatgaggttattttaactttttagcacaaatcatgttaaacatcaaactagcatgaaaagcaatttgatatttttgcaacaactttttagttaaaaacaactcatccaaagtgcgtgtgtgcaaagcaaaactacaagcaagagaagatctatttttcaaatcatgtgcaacattaatctctctaatttttgaaatatcattcattaaaacctcacaacttttgcaatcatcatcattaggaataagagattttaatctagcaatttcagaattaagagattcaatgataaattcctgttttctatacatcttctcacacttcatattttttgcactcaaaatattaatagcttcttcaaaagcacttacctcatgatcttcatactctgtatccgattcaccacgcgccatgaagcaaacactggagatgttctttcctttatcttcatctccacactcaccatctacatcgcttagtggctcaaatgcggcgtatacttgatcaaaaaccttcctgagattctccttgaacttcctcccttgggatgtaccctttggcttgttgttgttggttttctcaccatctttgtcttctcttttgcctctccgaagcttacgacaatgcgaacgaagatgatcaactgaaccacattcaaagcaacgatttggaccacctcttttcctgttcctggcattattcatagctcgagcaattctgttagcaaccaaagccaaatcctcctcctcgatctgttcgagttgatcatcggaagtggcattaaaaatagcaagaaaagatgacttagatgaagaagcatcaacatccaaaaagaagaaaaagaaaccaaagcactcgacttagaatcaactttacgagaaagaacgttcatctcatgtgttttcaattttgtgtaaagtgaatccaaagtcaaagtagatatgttaacagactcctgaatagatgtaactttcatctccaaatagacatgtcaagaccattcaaaaagtgacgagaaatctcagattgtgaataattagcatcactagctgccaacccgtgcgttgcacgggttatttatcaccatcacaaaatattaaaaatttaattatacattggcaattttataaaattacggcaagataagaagagggtcattgtcaaatgctactcctaatttcgaaataaaatttacaaaatacttaactaagaactaagagcttaagataggaacaaccatagtcacaaagttcctgggtcgatgggatcggggaacggggtcgaggaacgtgatacgctacttacaagaggtttttactaggtggggacgaaaatgaccccgtgttttcgggacggggacggcgttcccgggtcgaggatcgctgccaccgaccccgtttcctatgactatgggaacaacttcatgtttattaattctggatttagaggaagacaataagctt

SEQ ID NO: 23217 - DNA, 13946 bp, Oryza sativa
atatgtaatttgaattatagtacatttccatgatttaatattcgcgatgctcagaaataaaattaataaagtatcgagttctacctggcgttgattccagattgatttttttaaaaaataactttgaatttgtaaatctttaatgattttaaaaaatttaatagttgagtcgtaaaaattctagtctgaattatatatagtatttccacgattcaataatggtgacgctcaaacttgatttggagactcgattatagttttttttcactatttaataaatttgaaattcctaattaattaatgtcaaattgtgcttttatatatgatctaaaaacgaaagacagttatgcatacagctaatatatatgcaacaccactcccatctacctgtgaatgcatcccttaatacatgggaaattaaagacccttaatacacgggaaattaaagagataattagcatccgtgtgccatctctttcgtatgcttaatacatgggaaattaaagagataattatcgtaagtgtgccatctttttttatacgatactgattaggttaatcactgagtactgaaaaaaaaatagtgcaagagcaaacatggtctcaagcacgaacgttccatggttgacatacattgcgccatctcgttttctcatagaatgctgacgacacactcgggcggtggcggcggcggcagcggcttgagttcatcgagtgcagtcgacatcggcggcatatggtagcgacttcatcatccggagatcgatatatcgataggattgtatctgatacggtggactcccaacgaaacaatacctctagatttaatggcttttaaagtggcccataagtgtgatctgttaattgatggtcaggattagattgaatcacctaattaatggtttgatctttccggttaacgtgagagctcgtagaaagtgcccaattagtataggtatagatagataagaagaatcaacagatctaagatcacttaaaattttattaaacctagaaagatagtcatccaaaacttctccaggtttcatctcaaatttaatgtactctttttcaaaaatatcacgacgaagttctttaatgttatttgtaccttgatgaaaattattcaaagcaacccaaatctcatgagcagtttgaagatgagcaacacgatcataatccgaacgagaaatcccactcaaaagaatattgcgagctttgcaatttagttcaaaagcagttttttcagcagcagtattaatagcttcaggaatcacataaggaagagaaacttttctccaaatatcataattctcagccataatgtaagattgcatcctactacaccaatgagaaaaatccgttccatcgaaaacataaggcttagttgtaaacttattagaaatagccatggcaaaaattcaagatcggtaaagatcgaaaagagcaaacgaacgtggctctaataccacttgtaggatcgaatcacaagaactaagccaaccagagaaggggtgaatggttgagatacccaaaaactaaaaacttttagcggaaataaagttaccctcgaaatcgatgaaccgcggtcttaccgaagtatggttgagatacccaaaaactaaaaacttttagcggaaataaagttaccctcgaaatcgatgaaccgcggtcttaccgaagtagtagcaccggtctgaccgcctggatatcgtcagtcttgtaagatcataaagggcctttcccatcccaaaagctagccattgaggtgaggggcttctccacttatatcttaggtcctttgcccttccacaaccaatgtgggactattcaacaatctcctccttcacacattggtgtccctcagcccttcaccgtgtatagaccccacagaataggcccacggtccatcaggtatacgggccccgcaggcacccacggtccacggtccatcaggtatacgggccccgcaggcacccacggtccattagacctccccacagaacaggcccacggtccatcaggtatacgggccccgcaggcacccacggtccattagaccttcacacactgtgtccatcgggccagagatgttaacctagccaggctctgataccaattgtaggatcataaagggcctttcccacccaaaagctagccattgaggtgatgggctcccccacttatatcttaggtcctttgcccttccacaatcaacgtgtgactattcaacacatgtgtccatgaataatcattttctataaactgtagccaaagatattcaactgatgtcttctcttgtgcatattgactaggcacatgcaaagggacatctcagcacgtgagataaaaacacaacttattacgaatggtcataatttaaagcaatgaactcaaaaagatattaacggcacagtccatacatctaatagtatcaagtgaaaagactacctagctcgagggcttctaagtgggccaattgtaaaaatttttaattgcatgtttgtgaagtgatatattacatgttaatacatttcaaattttttaaaattttttcataacaatttgagtgacatgcaacaacgaggggatatccctctcgagcgatatcaaaattcacttcccaaagtgaagtgattgttcagttttcctcgacgagatagagagcatattgtcacaggttcacagcagcaaggacaaaggctaccatactaatgcattagtcagtgagtccaaagactggaaggactcacaatcccgaagtgtcaccacaccaaactacagacgaaggtgtccatatagcacctgaacatgctaacattgttagtaaataacgagccaagatatattaggcacaggcacatacatattactccctccattttaaattgatctatatatttttataggtataccaaaactaagaaaagctaataactctctcatactatatttactctagcaacaaactcaatgcatgcaccattctcagtatttcctagccaatagcaaatcaagatattgcatgtgggttataaatacttgtgtgcatggatgcatgcatcaatgttctttactccaatgcacaaataacgaatagccttaatgaatgaacacatatatgtaaattatttaggaataatctcaaaaatactatatgtagatcaatttagaatagagggagtatctgactcgctaatacttgggaaagatagataggcatctttaacacaccagttcaccagaaatgatgcatgatcatccatcgttggggcagggcaaccattctgtcgtcaacaagaaaacaaaagtcaatcagtaaacgaatatgcgaacggaaagttaagagaaaatcaattctataccactgagtttgtttggattcaataatttgccttcgatattgtctctttctataatataccggtgactttattaattgttctacaatatgctattggactgggcattcttttcaaaaatacgcaaaaaaaccttagatacatacaagattaacatttgatttatctaattagaagtttcaaaaaaatatgaaaatttttatgtggcctcgttacacaagtatacatgctttaattttttctagtatatttagattttagaaaaaaattttgtatgtggtatataatgggaaaaaaatatgcttatacgagggataataacacaaaaaaatatcttatgtagtatatgaaagatgatttatattaaaaacatcaataaaaaatattttataaagcatataacagataaattatatttttttaaaaaatataaatgtaaaaaatgtttcaggccatataaaagttttcatttttttaaaaacttttaataggataaatcaattattaaccttgtatgtccataagggtattttgggtatttttgaaaagaatgtctagcccaatggcatattgtagaacaattgatgaagtcgtcggtatattatagaaagagacaatgtcgatggcaaatcgttgaactcgaacaaactcagtgatatagaatagattctctcgaaagttaaatactacatacgaattatgcatgactagatgagtgatgaatcaccggaataaatccatgccttgtgcccaaaaaactacattttccttcattattagagaaaggtcatatgctacatcaaagtcaggccaaatcccccccaactatacgtcataaaccatcaaactcaaatgaagggcatccatagtcacattactgtactcttcccttacaagaagtgacatagtcactctatggcatctctgtatccacaaaacaaaactgaccatttaaataatactagtcaaatgtgcatacagagagtcagcaattaaatggacaaatatacactttcatgaagaaatatcaagaaagtacataatacaaatttaccacccagcatcctataccaaattaggactacgagtctaagatttatccagtccacagaaccgcatgcatgagaataaattaagcaaactgttataatttagatatttttggatcattcgagttcataattttcaatttcactctctaaagtaagtgttataagaaaaaagaaaggcgagacctctatgacttgtttaatcttcaccatcagtacaggcagtacacatcaataaatcataataagcacaatttttttaacatagcatttgcttcatcataaaacatagctttttgttatgggcattgggccaagaggccatgcccacgaccaacccaaggtgagaagtactcatgaacagtttcatatcaactgttatgcacaaggtttcattggggaaatatagctaggaaaatagccggacggcgtcggcttagatgggatgaggagagattataggatggggaggagaacttgagcgatattagactaatcttgatgcattgcttaaccaaacagagatacaatccatccttgtagatgggcgacttgtatcttactccatccgtcccagaaaaaatcaaacttctagagatgcatctagacaagtgtttgtccagatacatctctagaagttaattctatttggtacggtaccgctgctacagtaccgcgcttcatcttgggttggtcgtggacatgacctcctggcccaatgcccgtaacacttttggtaaaagagaatgatttgttcctctagcataacctccgtcacaaaatgtagtcattttgggcagcaaaaacaacttaaatataaccttaacaattaatttgtacacttgtaaatagtaaagaataataatattgagaatgaacctttcaagacaaaactacagttacatatgttcgatcgaaatatccaaatttattcaacagcaaatatttagacagtcaaattcaatcttccaagaaggacactagatgattctggaactctaatgacaatttcagcataagagattattgacaattcaaacagctaagcgagcacaaaggtgtgacatttagatcaacccaaatataacctataatttggagagaaaaaaattaacacagtttgcttatctacgtaaaatgaagagcatatacgcaccgtgcacaatagagttggtcagaaaagaaaatgcatcaacatataatctttcatgggctcattccatggttcttaagtagacaaaactaaaagtacacaaaaaaaaaaacaaactgtagcaacatgtgtcaatgaataatcattttctataaactgaagccaaagatattcaacttatgtcttctcttgtgcatattgactaggcacttgcaaagggacatctcagaacgtgagataaaacacaacttattacgaaaggtcataattcaaagcaatgaactcaaaaaatatattaacggcacagtccatatatctaatagtatcaaatgaaaagactgtatctagctcgagggcttctaagtgggcccattgtgttcctaatttgatatttcaattctttaaggtgagtttttcatgtggttgtcgccaatttccaaagtgatatataactcaagctacaaaattgtatactatagccatgtagtatgcacaaattgatactactttcaaacaagctgagtagaaatcaaagcacccaacatttagttctggtatttctaagctatggacattcatagcatagactagtcaaacacattaaaacagatagatagcacttatgagaaccgcataattcaagactaatatcggaagcggcatgtcatatgtaggacagttcatcaagcaggtaaagtaacaacaactgtcaccgagaaaataaaaggcattcacaagcaaccaattattgagaataatatgaccttgctatatgtagagagtaaatacgcatgggaagaaattacctttagtatcgaaactacagaacggatagtaataacccattccaatggtttggggtagtttcttaaattgcatttactccagatggaccaggaaggcaccaatacgagtgctcacaaacaacatattatgttcctcaacaaagccaagacatggtgatgtgatacgaggccctggttcgacagaaaggagcttgtccagttgaatggttctctcaagcacccatccagtagcatcatcacagttggtcttgttcttccatagatcgagactaaaatctgtgagaacaaggaagaccagcccaccatcctcagccggcacaatcctgcagcgctcatcccaatcggtatgcataaccagtaaaaggaattaccaaccaggatatcagaatggtatgccaaattcccaaaagaaaacgcagttgagatgacattgccccaatttccgttctcagatgagtaaacgcagacgaacgcgttggcctcgtctgcgaagagcattgtcacctcaaatggactcgaatggcagtcgccgtgcacgtgaccctggtcgccgtcgacgcaacgcaccgtcccgtggtagatggttatcctactctcgtcaagggatgccggaggaatatccacggcgccggtcgccggtgacggggtcccacagcacgaatcagcggcggtggatgaggttgaagagaacggcgcggccgtggcgggtccagcgccggggtgaagatggattccaggttttcgtcttgcctgaagaagccgaggaggggaggcttacggtggcgggcgcggaagcggcggaggaagccgtggtcggagacgaggcggcgccagcgcttgcagacgagggaggcgcgagggagggaggacggctgcggcgggaggcggaggaggatctcggagaggaggtcgtcgttgtccagcggcggcgccggcgaggtggggcgctggcggcggcggttcatcatcgccgagttggggttttcctttttgtctgtcttttttccttttttttcgaattacagaacactggggctgtttactcactttaccaacttctctatgccacaagtgtggtgtatgggctaaaacggtacggaaatggacggaaatcatctttatccttttcgttttcatatttttttcggaatcgtaatcggaattggaaacccggatacgaaaacggaatcgaatattatcgaaaccgaaaacggagcgaaaacgaacctgcgcgaatacggtaacaaaaatttatcggaataaaaaaccccttaaactggtaaatccaattaaataaattatatatatttaaaagagtaatgttgttgataaatcccaatgtaggacaaaaaatattcttatgtaattttagatttgcataacaaatattttttaaaaaaataacagccaaacaccaggtattcactatttagtgcttaaaaaaagaatctagtgtatttcagtcacaaaatttctagtaattccgagaaaatttccggaaattctgagaaaatttctgaccgattccgagttccgacggaaactgcccttatcatttccgattccatttccgagaaaatatttccgaattcgtttccgtttccgaaaaatttcgaccgacaaattccgttttcgaaaataggtccagaatccggaaagtttccataccgttttcaccgctagtgtggtgtgccatagtttttttggcaaaaaaaaaatggattcttttgaataccatcacttaaatgagtttcgctagaatctcattctcaactaagactacttcgccaaaatgccatctcggaggaaaatggccgtcattcttattcttcctcaccacaatgtcgaaggagcttacgggcaactaccgctagctccaccatcgcgccagcggtgccacctcgctggccttccatcctacccgccacattggggcttgaggagaccgcaaccgacgtcgtcaatgttgacgacaatcgagtcggagagtgggccgacagagacgaactcacttacgacgggggcggcgcatcgaggcgtgcggatgaactagccagcggtaagggcggcgtatcgaggcgggcacagaagacgcagacttcggtgagggctggagcgcatgagtggcggcgggggagcgcatgagtggcggcggcgcaaccgtggcggcgatagttgacgcgtgcgcggccagcaggagcgcgtgggcgggcacgcatggcaacgacggccgttgcacagcaagcaagatcttgtgggccacggcgcaaccgtggtggcagtgttcatcgcacgcgtagccggcgagagcgcatgcacaggcacgcaccccggcaagcaaccatggtagcggtggtcgtcgcgtgcgtcacgcttgtggtaattttttttaacaagtgagtgtataacatatgggccattttagtagaaaagtgtggcatgccatacctttggcttcaaccaaacacttgcactaaaaagtcaagcatgtctaattgtagtgtggcaatatttggcaagcaacgaaaccgtccctagattgtgggcacatcttttgcggtaagatgataatatgacgtactgcatattataacaaagtaattttatagataacatttttaaattaaaaaaatcgatagaaaactttaaaattagtttgtgaaattcaaattttgatagtgtttgattttatagtggtccaacaaatgaggcctggattttcttttcttttgtcgtcagtttcagtgttgccggtgatagatcggagtcgacttgggagaagtagatatctagggatcaagagatcatgcgggatactaaaaagctagagaacaataatgcacatgatgatgaagaattcatatggtatacaaagaggaattgtgtatgtatggaaagaggagtcaaatttggaagggagtccaaatttgggaagattgatagagataatgaaagagataagttgaatacttgcaagagagggtttcccacgtggttgggagtcctaaattgtgttagattcatgggatttgcacagcctacctcgtgtatcgattttaaagagacttgagttgagagaaagttagggtttcgagttcaattcgagattttggtgaggagtgctgttggtgcactttgtaaacactagttgatgcaataaagtcgagattcaatctacatcttcgagtttgtcatctaccggtgttttctgggtcccaacggtctgactgacagcacggcggcggtctaacctgtgggatagcggtggtctaaccgcaggtgtgcaggctgtctgaccggtaaggctacggtggtctgaccggcggcgacagtgcttcgtcatctactctggttgatgtaaatcttttactccgcaaaagattttaggttttttggttttccctaccattcaccccctctgttaggtttgtttggtcttgttcgatactacaatgtgctatttgtcatgtgttctataggtggcatatatattagttggttcgaccaacccagcgatcagaagcaatcactggtggagaagtgctttttagtcccggttcgtaaccccctgtagtcccggttttcaaaccggaactaccaatccgggactaaagatcgctatctttagccctgggtgaaaaaaccggaactaaaaatcgatctttagtcccggttgataacaccaatcgggactaaagatagggatctttagtcccggttggtgctatcaggcgcgactacagcggcggtagcggcagtccgccgggtggtccgttcctccctttcttattgcctcccaaatggcgcgttgtccatatgcgccagtcagaccgcacatgcccatcccaactccatagcgggaggcacagattcatcacaaattcattcacaatatccattcacgtattcattcataacatcacaaatatattcacaatattgattcacaggttcattgacaacattgagtcacatactcattcacaatattgattcatagattcattcacagatcaaaacatccaaaccacaaattaaaaaaaataaaaaaaaatcgactcaccggccggcctcccatcccgccgccggccagccacccatcccgccgcttcccctccagccggatctgggggaggggagggcgaggccgccggtgatcggcctccatcccgccggcccgcaccgggcctccgccggccgtcctccatcccgcgcctagccgccgccagcccgcgcccggccgccatcgcgccgccgccggctgcctctgcaaggggaggagggggaggggaggaggagagggggtgagagaagagcaaggggagagaatggaaggagaaggatggagaggatggagataaggaaggagaagaaaaagagataaggatgggagatggggagagagaggctacgcatgctcttgtgcgtgggctggtgcgtaacatcaaccgggactaaagatcccggggggcctgacaaggtctgacaggtttagaaccgggactaaagatcaaatatgcccgctgtagtcaccaaccgggactaaagatcggtttttagtggaaccgagactattatggatttcggccgaccgaccaaagatggtttctccaccagtgaatccacggtccatgtctatttggatttttttggatcactagctatgcatagatttataggagctgagattttctagatttaattgtgaacattagcttgaattactctagctcgaattgcacctacaaataggatggactaaacaaaattcggaagagtaatctcttgattaaagccttcatagttattatatcctgagatgtgttgcgaattggatgttttcttgtcattcatgagtttgtcaaagataggccataatttgatttgccttcatgccaaaccgcaacaattaggacggatcaggatcctctgtggtcgattgcaccgtacctttatcactgtaatatgggcccgatggtcttcgggcccacatattacaaaggatctcaatctctcccacagtgcgtggagctttagatatggtccaccactaatttttttcccgtctggtcccactaaaaatccgtcatctcctccttcagaggagaaaccgcccgcacctccccaactttccgccgctccttccccatctctctcttttatcctctccgttacgactcccatggtggtgaccatccgccccctcctcctctccgtcctctcccacggccgcgcacggcggcgactcccccgccccctcctctccacccaccggtggcacacggcggcggccattccccctccccctcctctctcactggcggcacagatttgagcccctataccaccggcgccgcttgggagaagacgtggtggtggcggcatctcgacggcagcgggtgcctctcccctccctcggctaccccgagtccacgaagcggcggcgaccttcccgagcgccccaactctggcaagcttctctctttagtcggataccgacattcccctttctctctcctgctctcgctttcttgtgcacggatgggcaacgaaattgctgcgaggttctcgtgaccaaagttggtcatgcgaacccagggaaggaacggtccccattccactctcttctccatgcaagcaatttgcctaggtgaaccaacattgccatatatcacgtgtgtgcactgtgaatagtcttatagaacattgctctagccatacatacaacttacaaaagcagaaatcatcaactcatggccgtcagcatgtagccaatcttcgcatatgcctgtaaatacatctgaactctggaaatgatggctgtagcttcgacgaaacaaaacaactgcatttctggactgataaccggcatgtatccagcaaatctgtcgcttgttcgcgccaattctggttgcagttgtgttttcgacagtcacggatggattcgattgaagtcacaagtttacagcagacaaaatagcaggattgagaaaacgtaaaaatagaaaaaacgtaggattttgataggaatgtaagtgtaaaatagaggattgcaaaacgttggaaaaacacagaaatatccgtttgatcgaaccgcaggaaaaacgtgggaattggatgagagagatagactcaaaaggaaagttacaagaggttgaagctcttgctaaatttactccaaaatctttataggattgtctattccatagaaatttcaaaggattgaatatgattcaatcatttgtttcaaagtgcttcatagaaaattttcctacaggattgaaatcctccaaaattattatgtttttcctcgaaatcaaaggggaccaaatcagtaaatatgcccaaactaaaaagagtttacagcaaacagaaaagaataatacggagtactgtatatacggagtagtaaatagctaaatatgcccaaactgaaaagaacccaaaagttcttttgcatctacaatatctttgtatatttgcgattacacagtggacgcatgcccacatccaaaaatttgtttgtaataacaataattttttatttataattatacggcagacgcgcccacacacaccacttacaccacttcagatgcaacatcattataataaatcatgttgaaagcccacttacgtatgcgtagaatttatggacactgggattatttgaaatctaattggtgaaatcattcacccacgacttcatcacacctgtagtgctttcccatttgcaattacaatatgagtaaatttcataaaactacatatactttgcatgatctatcataaaactacagattttagaactagtttcacaaaactacagatttaatgttctcgtttatcacaaaactacaggtactttgaacactatatcataaaactatagatttaagaacttagtttcacaaaactacgggtttaatatcttcatttttcacaaaactacaggtttaatatcttcatttatcacaaaaactacagatttagtgtctccattctcacaaaactacatgttttaacaatgctaaaacctgtagttttgtgagaatagagacactaaatctatagttttgtgataaatgaagacactaaatgtgtagcattgtgataaacgaatacactaaatctatatttttatgaaacaagttcataaatctgtagtttttttatagattgtatatataaagtacctgtaattttatgataaacaaagacactaaatctgtagttttgtgaaacaaactcttaaatctgtagttttgtgataaattatgtaaaatacatgtagttttgtgaaatttactctaaatgagtaaatttcataaaactacagatactttgcatgatctatcacaaaactacagattttagaactagtttcattagtcttgcacagccatctaatgcaacgaaaactaggtgtactctagaaacagtacgacttgcctatgcatccccattgatgtacccatcccattccaagcttcggttatagtgctgcaaatatattactccttcgtttctggttacaagatttttgattttggtcaaagttaacctgctttaagtt

SEQ ID NO: 23218 - DNA, 23626 bp, Oryza sativa
caaaactacgggtttaagatcttcctttttcaccagagcacaggtttaagatcctcatttatcacaaaaactacagatttagtgtctccattctcacaaaactacacgttttaacaatgctaaaacctgtagttttgtgagaatggagacactaaatctatagttttgtgataaatgaagacactaaatgtgtagcactgtgataaacgaatacactaaatctatatttttatgaaacaagttcataaatctgtagttttttgatagattgtatatataaagtacctgtaattttgtgataaacaaagacactaaatctgtagttttgtgataaattatgtaaaatacatgtagtgtaaaataaatgagtaaatttcataaaactacagatactttgcatgatctattacaaaactacagattttagaactagtttcattagtcttgcacagccatctaatgcaacgaaaactaggtgtactctagaaacagtacgacttgcctatgcatccccattgatgtacccatcccattccaagcctccttatattgctgcaaatatattactcccttcgtttctggttacaagatttttgattttggtcaaagttaaactgctttaagtttgatcaaattatagaaaaaaatagtaatatttttaacccaaaataaatttattataaaaatatatttaattattaatttaataaaactaatttggtaatgtaaatattactatatttatctataaacttagtcagacttgaagcagtttaactttgaccaaagtcaaaacatcttataacctaaaacgaacggagggagtaccaactaccaattagatgactccccacactttgctacgggaaacactgagcaattctcaatattttatttgacgatcaagctatgagtaaaaagaaaaaaaagaaacatcaaggtttattagtcaaatgatacccgtgctttagtgtgaaacatattgataagtatatgctaaatattgtaaaagtgataaatagatttgttaaaatatagtgcaaatgacatgagggggtgatgattggatatgtttgcattttgatttgtagaattaaataaatgagtaaattttataaaactacagatactttgcatgatctatcacaaaactacagattttagaactagtttcacaaaactacagatttaatattctcatttatcacaaaactacagatactttgaacactatctaaaactacagatttaagaacttgtttcacaaaactacgggtttaatatcttcatttttcacaaaactacaggtttaatatcttcatctatcacaaaaactacagatttagtgtctccattctcacaaaactacacgttttaacaatgctaaaacctgtagttttgtgagaatggagacactaaatatgtagttttgtgataaatgaagacactaaatgtgtagcactgtgataaacgaatacactaaatctttatttttatgaaacaagttcataaatctgtagttttgtgatagattgtataaagtacctgtagttttgtgataaacaaagacactaaatttgtagttttgtgaaacaagctcttaaatctatagttttgtgataaattatgcaaaatacctgtagttttgtaaaatttactctaaataaattgtaaatcatgttgtatgcttgcatgagattaaatatataattattgctagtgggtgatgatgtggcatggttgcagttgagatttagatttagtgggctttaactttatagaaagtatagattaatagaaagaattagtaacaatatcccctgaggccctgactgcggttgatcaaccaaccattgcagatgctgttgcaatgaaaagcaataaaaagatggtgcttgctgaacctaagcacccagcatatttcactgtaaaggttgcaaatcaagaggcatctgccgttacttagaaatatagcgttaatgatatgattgtatctgtcgtaactgatagatagtttctttgatccacatgtaatatcgaagatatcataattttagtatataatgctgtggtatttcagatagacggttgctagttataaaaataattaaatgactgcacctagatttaataaatggttgcacctagatttgtagataaatgaattgtaattgtgttgtgcgcatagcaaaacaaaccataattttgttggtaccaaactgccaattttgaaaacataatttgctactgaaatgaaaaatattgggcatggacaggtccagaataaaacattcgttataatgcttatcataatgctcatttcactttgatagaaagcaagtcagggcatcagttgttacgtcttataacaggacatctcgagtagataattcctacgagtccacttcacaattgacaaagtgcactaaataaatagagggtcagtttccagtttatacattgggtcattggcacatatcttcataggccacacagccaccgccacatacaaaatggaagatcatgcaccagtaatccatctctgcaccttaccaataacagtcaaaagtctagatacctgcaagagaacaattccatcagtcattctggtataaatttacagtcacaaaattatatcgcattttttttggtgcaatgcaaaatgtaactattattttcagcgttgtgaaccatacatcaaatttccaaagttgaataattccagtattattactaggcaaaaacaaaaagaagaaacactgaacagacaatatagaggaacaattgaattattggaactgttctcgaattttggctacatcaaactagaaaaaaacgcatattaggaaaggacctaatattaaataaatagaaggggtgaggcttcgaaccaggtctgctagcccaccaccttgtggagctagttggaaaacgcgtgggcgtttctctctacatctaactagcaactaaaggggtacaagtacaacgacacttggcaggtagaaagtagaaacacctgtttctagttcatactccagtctacttttagaaattttaggacaaaccaattattactatattcaaattaaaagtcattggagaagcatagggacatcaaccattcatgatttactaccgtttatgattgtacactcaactctttctgatgtgtacctcaatatctcataagtggaacctcttttggtccacaaatatcatttatcttagcatggtaccaacacaaaccttaccaaattttcttaaaccataatttgctgccaatgaaaattttattactaaaaagtacaaaagtatgcacaatgaggatgcaagtgagggatctagttaatttcaccttgaaccagagctcccaatgagttctttactgtagttagttatctattttatagaagagtgaatttcactatggacccctttttattaccctagctgcacagtggaccatgtttagcaacctttccactttatgccacctaaacataccaaaatacagcaatttgattcgattccctagcctatttgtggagcctggaatctacttcgctcctcgtcggatcagcggaggatcgagttgcctgggcatgcaaatcagaggtgcagtttgctgctgacctctccgctcacagaagccactactgctctgacaaagcacactcattatccccttgtgctcacaagctagtgccatctaccatctcttactccttccatggatgggtcatgggccaaatagccatcgtagaatctcaagcaatacccctggttcaagactgctatgttttgtcaagtatgttaaaacttggatataccctggtccattgtgcagctttatgtcccatggaacgtggaacttgggtgtgttccttgttccgggaactttgttctagatcgagaaacgggaactatgtggaccttcgtcccgaaaatggatggaacttcgtcttgagagtcgtcctagtacaaggtatggagtaacaagtagagtggtctgatagagaaattaatgtggcacgatggaaaatgatggaaaggcaatccaaaattttcaagcaaaatctataatttgattaactttcactaaatttgaactcatctggatgggacgaacgctgttgttgctcactcgctgctcgccaacgttctgctgtgcatgtacgagcgtcagcaccatcatgcagtggagaatggacaagcattgccctcatcacgctgtggtacgaccatggagagatagagggacgttccaaacaacgtaggaacacgttccaactaacgttccatgcttttagaaaatgacgtcccacgttcctcgatccatcgatccgggaacttttgtgagttagtaatactgcagctagggtaataaaaatgtgtctaaagtgaaattcacttattttggaaatttagtggacatctgacaaatcataatcagacaaatacttctgtaatcacaaatcgccatccaaaacctgtgtaacacactagcacctaaaataataaaggctccagatatccaaaaaacacacatacaagataaatatatgtaaactgaataaaattctaaaaggaagcaatattcctccaaacagtatattcataaaccttgtaactagggggtgcataagttatctaaaattattctgtgcaagtaatcactagtatgtaaatggactagagtaatacatcctgaagctaacataatctagtaaaaaatagaacttcattgaccaatacaaaatatataaatagtgatttcttcttgtgcaaattaatacattgcttgcagcaggactaagaagaaaaaaaagtattccctttgttcttttgtagtgatactccagacattctacagtctctagacaagatagaacattagtttccttatattagagtcgacaactaaatactatattagtattttccaagacaaatctaactgtggttctcttctcagtggccaatctaaatagtaaatacttctacatctttcaatgttcaaaattaagaaaaaaagaatggaccacaacacaaggcttctaaaaggtcatctcgcagaaacaggtattgaatgaaaaaaaatagtgtcactctctgaaacgagccagtaaattacttatttgatatgtcggatgaattaatctgttctgcagtcaaatgctgaaaacacacctaattttactgcattgtaaaaacataagtacctgcaacataagtacttgcgtagggatgaagcgaggacataatattggtttcccaaagcttcctggactgcagtgaatcaatttgtagcatgaagacactggaatcagcacatagaagcatcaccttaacatcctcagcataacccaatctcactaaatgacttgtcttgaccccagagcccagttcaagaaccttgtttagctcagctgtcctctgcagcacccatctggtaacaccttcagaacagaccttcctctcccatatttgaaggctgtcgtacgacagagtgacaaggccaagataaccaccttctgccagaaagatctgagacatgtagtggctataacaatttggattggaaggccactcaatcacagcaagggtttgcctatccaaatcaaactgaagaatggcactgccaagaccagtggggaaccaatacagggaatggccaacgagtatgccaggatcaacaaaagcaaagaccaagaatggagcaggagtgaagatgagattgctccatctgccggtctccgatgtgtagaagcaagcgaacatttgtgtgttgttgctggccacgcccaccaaggcaacattgaaggggcaacagctgaatccgccgtgaacgtggccgtcgtcgtcggcggcggcacagagcgccgcctcgttccagacgatcttctccttgccgtctatctccggcggaatgcccacccggcggtggtcgccggtgtcggggtcccagaggacgatctcgttctgcttccggtccaggaggaggacgcggccatggcggcatccgcagaacatccgctctttgcggacctcgtcctcgccgagccgcatcgagaagcgctcccttgggatgagatcccgcggatccatcacggaccggaagaaggggaagccgaagtcgtcggcaaagacgccgatgatggggggattccggtggtggcgggggcggaagcggcggtggaaggcggggtcggtgacgaggcggcgccagcggttgcagacgagggaggcgcgggggagcgaggagggcagcggcgggaggcggaggaggatctcggcgaggaggtcgtcgtcgtccggcagggtcaccggcgccgccggtgaggtggcgcggccgcggcggtggcttatctcgccgctgaggccgcgtgcattgagattggagagtagtactactgtagagtgtggacagtggataggtggagaagaaaaccatgaaaattttgcaaaaccgaaattattttgttaaaactgttaaaccgattattttgaaaaccatactccctcgatcccaaaaagtttcaaatcctaattacaaaatcgtagccatgaccatgatggttagctacaggtaaactaacacgtgattactagaccagcacccagcatgcagaggtagcacatgtaggaccttctgtttctcctggtttctggtcttcttagctcgatcttgtcctttaatttatgatttctgaatcgtctaactttttggatttgataatttgtgaagatggatattaacgggaaaggaaaaaggcctcgttatctcaaagaggtagatttgggaatttttattagtctatttagaaccagatttgaaagatattggaaataattgattgattttttttctgtcttcaccttctctttgtcacctttagcttgaagccttaaaagcttgcctatgttgtctcgtaggtttggttccaacaaatattatttatgtgttagtaaccgattagtacatgatgattattagttatgtattagtaacaagtaaaacttttaatgaataatattttttaaagcaacttttcaatagaaaaaatatattattttgcagttaaaaacatgcaacaatatatcctccccggtcacaaaatggaaaccatgcccatacgtgttggccgttggacacttgaatcacgaccttgctattgtgtgaatgtctattgcgaaggcgtggaccgtggaaacacatccctacgagatctatttgcgtgcttatggcattcaagtagattagtgtgtacaattgctattatagttagatgagcacttacaccaaaaaattgttttttaaaaataatcttgttgtgcaaaaataaattttctttaaataaaaccttctactcaacggatttttcttaaatatttttcttaaattatgatagggaggtaggatggctgggggggaggcggaggaggatctcggagaggagatcgtcgtccggcagctgctccagcgaggtacggcggcgatggatcatctccgactcactcgtttggggggttttctcgtccagagaagcatatttgaggtttttcttgtgccagacaaagatcgttagcttacgtgcttttgcataattttcaaacgatagcttgtttagttgcacattaatttaaaaaaatcaggttatttttattattttgtttaaatgtgggatagtttcggaataaattcaataatattaacactaacacattaaatacacaaatgttgcaagattaataagatgggtcaagtagtcttgttgatgcaaactgctcactttgtatatgaggatgaatcaagactccccctgtctcctctttccgatggattaaaaagacttcctaggaaagctcaagttattctcaagcaacaagttgccattcagacattgtcgagaacacatttttcatgggctttaagaaactgtactcgctatttgtccagggagagcttatgttttattagggattgtttatatgcctaacttttttgcatttttaagtcaaattatttttctccagtgatgacccaaagacaacggtgatgaaaaggaccgattaggtgtgagggttgaggttggggtgggatagggggttgggatagtcgaaggcggggtctttgcgggcttagagtaatggcctaggagtcagcgatagggttagagcagtatagtaggtgaagttgatggtgggggcaagggaaatcaatttgtaaggaggtgtaagccgtcaaagatgaggaaggtggggggatttcatcaatgaggaagaagggcgagagtagttggctaggagatgggcatagcgcacgaaagccgacaggcctttctaacattatagaggcaccatgaagcacatcactagtggtggcgggatgctaagtagggaaaagggattgcatcggtagtggaattggggtgaggaagaagagggaggtagggttgggggagggggagtggtttggagacagcctgttcattcaaaaattgactgatatttttttctattttcagacctcggaactatagataatccctttcttattattaatatggatcctataaacttacatcttggtgctaactctttcttaaaaatagtcgcacctgataattccgcatctggttacttaataccatgagttggagtaaatttgttttcattctcccttgaaacaacagagcaatttaattcaatgtaagtaactttcctaaaaaaaacctatttctctcctaaaacaattttctatagaactaaacccctcaagtgtcctaaagtattgagaatgattgtttaggctgtgttcgccagtccatgttcccaatcggaatagtacgcgtggaaaacagagcggtctattagcccatgattaattaagtaatagctattttttaaaaatggattaatttattttttaagcaactttcatataaaaactttttgcaaaaaatctcaccgtttattggtttaaaaagcatgcgcgcagaaaacgagggagaggcattgggaaaagggtgtgccgaacacagccttacttattaatacttcagtcctaaatttttttctaacatttcaattctgtcataaattataaggaacaattttctcttagtctgtctttaatgcaaggcagcgcttttgctataggaaaaagagagcgtcacgttcttttatgtgctgttaggcttttgtactagaggtagcatatttgttggttcgcccaacacaacaattagaagcaatcatcggtcgatgtctatttggactttttggatgactagctatgcaaagatgtagtaccttcatccctaaatataaaattcaatccctaaatataaagaattttggtgggacatggcacatcctaacacaacgaatctagataaaagtacatccaaattcattgcattaaaatgtatcaaatctcactaaaatcccttatatttagggacggagggggtatgagaactgagattatggagatgtaataagctcgaattgctcatagtcatataaataggatggagtaaaccaattttgtagagtaatctcttaattaaggcattctaagtttatgctatcctgagatatgatggatttttttttttgtaattgagtttgtcaaagatacatcataatttgatatgctttcatgcaaatcgacaacatttatagaacatagatcatcgaaattctagtaagccaaagcaagctaaaagaggacatgtgcatgctccaaattccaccacccaaccaaccagttcttaaaaccatctgaagtgcaatttttcgacaaagagagttttattaatcttagacaattacatcaagaggatacaattattctaagaccaccctcgccctctgcatagctaggatgcacacagcctatcatctgaagtgcaatgccaaaatgtaaataaatcatactaaaaaaaggtggaactagcaacaacacaatctccatcatgttataaaacaatgggcaaaattacacgcagtactagtaaagtagaaacaccattgatatatagtatcatttaccaacaacaaagcatgaagttcctcaaacacgaggaaatgtgcaaaagatacatcaccagctccatcatagattaatattcatgggcaagcatgtgtcaaaattcaaaaggattcagttcagttcatgaggcaattactagctatacatacaacttacaaaagcataaatcgtcaactcatggccatcagcggtttgcccatatatacggcaagtaaccaaaccttcccatatgcccataaatacaactgaaatctggaaatgaagtggcaagccagcaaattcatttgtcactatcagtcacacaatttaacaaatttcacaaacatcagagttcaaagcctggatcaagctgtgatgataatgacgacttcaacgaaacaaataactgcatgtctgttctgggtttaaaacccataagaaacatgtgttcagctgcgcacatcagcctaattagtgctatgactgataactggcatgcatccagcaaatctatcccttgttcacgccaattctggttgaagttgtgctgccaagttttcaacagtgacgtatggggaaaaaaaactcaatgaagtcacaagtttacagcagaaaaaaaagcataataatgtatatagtaaatcactaaatatgcccaaactgaaaatgacccaaaaatttgttgcacaccaagcggcattgcaactacaatattgttagtcttgcacagcgatctaatgcaatgaaaactgggagtgtactctagaaacagtacgacttgccaatgcaccccctttggtgtacccatcccaatattatgatatactgcttcaaatataacatcgattaatacaaacaatatcccctgactgcagttgatcaaccaaccatgtccgatgctgttgcatccagcatatttcaatgcaagggttgcaaatcaagaggcatctgccgttactgagaaatctagtgttaatgatataatccactttatctgtcataatgctaagatagttttttcgatccaatgtagtatcaatgattcataactttagtatataatactgtggtatttcagatagacggttgctagttataaaaataaatgattgcacctagatttgcaaataaatgaattgtaattatgttgtgggcatatcaaatcaaaccataattttgttggtgccaattttgaaagcataatttgctactgaaatgaaaaatattggtcatggcctggtccagaatgaagcatttgtataatgcttatcctaatgttcagttcacttcaatagaaagcaagtcagggcatcagttgttatgtcttataccaggaaaccttgagtacataattcctacgagtccacttcacaattgacaagtggactaaataaatagagggtcagcttccagtttctacattgggtcattgacacatatcttcataggccacacagccaccaccaccacatacaaaatggaagatcatgcaccagcaatccatctctgcgccttaccaataaaagtcaaagtctagaactctagatacctgcaggagaacaattccatcagtcattctggtatttacagtcacaaaattatatcactttttttttgttgcaatgcaaactgcaactattattttcagcattgtgaaccacacatcaaatttccaaagttgaataatgtaagtattattaccaggaaaaaacaaaaagaagaaacagtgaacaacgatagaggaacaattgaattattggaactattctcgaagtttggctacatctatctagcaacaaaaggtttactacttcactgcctcattttggcagatgagaggcacaaccacacatagcaggtagaaagtagaaacacctgtttctagttcatatgtatacttttaaatatttaagaaccaatcagtaattactatgttcaaattaaaagttgtcagagaagcataaggacaccagccatgcatgattactattgtttgtgattgtatacgcaactcattctaatgcatatctcaatatctcataagtgaaacctcttttgctcgacaaatagcatttatcttagcatggcaccaaaacaaaccttaccagtttttcttaaacacacatacaggagatatcacaaatgtaaactgaataaaattctaaagagaagcaatattcctctaaaacatatgttataactatgggtgcacaagttatctaaaattattctgcagaactgaccgtgtgtatataaatggactagagtaatgcatcctcaaatctagtaaaaaataattagaacttcgttgacaaacagaatgttatattagaaaaaagataatacaaaaaatatatgtatatatttcttcctggtgcaaattaatacattgcttgcaggtgcaaattaatttcttcctggtgatgcttctgactttttaccctcttttgacaggactgaacattaatttatcaagtaaataaaaacaaaatactatgcagttattttccatgacaaatctaaatacttctacatcttccaatgttcaaaattcaaaaaaagttggaccgcaaagcttctaaaatgccatctcgcgcaaacaggtattgaatgaaaaaagaaacagtgttaccctctgaaatgagcgagcaaattacttatttgacatgccatatgattcaaattctgtgctttttatttcgtgtttatacaactacacctattaatctgttatgcagttaaatgctgaaaacataagtacctgcaacataagtacttgcgtagggatgaattggcgcgatgacacaactttcccaaactttcttggcctgcaacgtatcaagttggagcatgaagacactgtgatcagcccatagaaacatcaccttgatatcctgagcataccccagttttgttaaataccctatcttcaacctaaactccgggttaagaacattcttcagctcatacgtcttctgcagcacccacttggcaacacctccagaacagactttcctctcccacatttgaaggctgctgcgagacaaagtggcggcgccaagacaatcaccttctgtcagccaggtctgactgtatggctcggaatcgtagggccattcaatcacgctgagggtttgcttatccaaatcaaactgaagaacggtaagccaacgttcaccataagccatccaatacagggcattgccagcaagtatgccaggatcacgaaagaaaaacaccaagaatggagcagctaccgatatgagatcactccatttgccagactccgagcagtaaacgcaggcgaacatctgtgtgttgttgccggcgacgcctaccaacaccaccctgaaggggccgtcgtcggcggtggcagcagacagcactgccccattccaaatgatcttctccttgccgtcaatctccggcggaacggccacctggcggtggtcgccggtgtcggggacccacacaacgatctcattcttcgcccggttgaagaggaggaggcggccatggcggcagccgtagaagtgccactggccgccctcgtcctcggcgagccgcagcctgaagcactcccttgggatgagatccggcgggtccagaacggaccggaagaaggggtacccgaggtagtcctcgaagacgccgatgaggggtggtggattccggtggcgggcgcggaagcggcggtggaaggcggggtcggtgacgaggcggcgccagcgcttgcagacgagggaggcgcgggggagcgaggaggggcgcggcgggaggtggaggaggatctcggagaggaggtcgtcgtcgtccggcagggtcaccggcggcgccagtgagatggcgcggcgatggcggaggcggttcatctcgcacgcagcgttggggtttggctggggggcggcgggtcggggtaggcggacggctgtggggggaggtggagcggtggtggggaagagctggcatgccgggctggcggcggccagagccggcgccgacgaacggtggatggtgtggcaagagattattgatccgatggttttagatacatcaactagtgttccgatgtcattaaatccaaacgattaaatccaaacgattagataattaataaaacttttattgcaactagctaaaaccaacttgttgtaatccttataagccgatgcaacgttcagataactcattggctgaaattccgataaaacccttattgtcaatcaaaacgcaggctagagattatggttttaagcacaacttaggaggtcaaacccaattgatacagcactaagtatgaaaaaaaaatataatattagacaatcaagcctttgattgattttcagggtggtggatatcttagctaatctagattgacaaaaacaatttagccgatactggcaaaaccctagaaaagatctaaccgatataagtaaattgaataattgacttaaattaactaagatatatgataaataggtacgcaaatatatcaaccgaaccagagcgatccaaaagatcaaaatgaaccgccggcggaatgtaggacttaccccttcgccgaagatcgaactgaaccgatgcagcccgcgtcaggtgccaaactccgccagttgataagtaaaaacctcatgaaagaagatggtgatgcaccgagagtagttgttttgatcgagagatagattatagggaccctaggtcttatagataaaaggaaatatacaagtcctgatcggacactaaataaacacttcctaaagatagaacgaaattactaaatcttgccaaattaatagatagaattaagccgtcatgcgagagtcttcacgattccttcttgaactcggtctcttctggataagtttcagtcggttaattgttctcattccttaaccgaattagtaaagaatcttatcaaattttggggttaacaccccggccccgagaggggcggattcagccttgggcgcggcggagtctcgacaatgacagtgtctatactagagtggatttgagctagggttttgaagttttggcattttttttgtgatttttgttttggaccttcacactgtagtgcatgtacaccaatcatgcatcaaccctttctagatgctcgcatgtactaatcatgtatcaacctcatctaccagggttgattttccatgacaagccatggtaagaacggcttgccatattcgtacttttttggcatgtcctcggatgtccaatgttgcatccctttcatgcgaaaaaacatgaaggcctaggatatctgtttagctccagtgcatgacctaaactttgatgaggtatagacatgccagtcagtctgaacctgcaactgacaatatgtcgatgtagcagcgattagacgataagttgaacaatcagctgttagagaattggagacccggacgttgatgatgattgtaggctctagtctcaagtgtgccaaaagcgtgtaccgacccataaacgatagccgatggcttggtgtagaatcggctgaaggatccgatgtagtcgttgaggctagccgatgttgatgggactctgaatgatcaactgcaagcttgttgtagaattggatcggccggaagtccgatagaaatagactcaaatagttagataaacaatgaagccgttgctaccaatcttgtatataatccttataagtcgatgcaaccatatctagataactcatcggttgaaactccgatgaaacaatgattgatgcctactgacttaactaaaatttacttacaaccacaaccccataggtcaaacataaccgatgcagcataaggttgataattgcctgatatatttaagcaaaccgatatgacaccgatcaaagtggtcatgtattaaatttaactaagacagtaaaaccatcaacggagaaatttaagacacctgataagatcagctaacactctgataaaacattagcatgaacctactggcttaacaagacttagattatcaacaacagtctatgggttggatataactgatgcagcacgatatataataatctaatactcaatgaaccgataaatttatctaatgtgatggatataacgaatctatctaaaacaacattgtgattgtagagatatattgactaagtcagaagatcagacctaaccgagacagtcccaactaaactgatgcttctctaaatataatgcaattaaagatagaattaagatatcatgtagacaaagataccgactaaagcagagaaatccaagaggtcaaagggatgcagccttgaacaacaccaatgtagccagtacaattgacaaggccgacataacatagtacttaccccttcgtcgaagatcaaaaaccgatgcagccccgcgttaggtgccaagttccaccggtaataaataaaaaccttgaaaatgagggtggcgatgcgccaagagtagttatattgatctgtgagatatattacataaaccctgggtatatatatttatactcataggctgataagagtccaagtaagacacgatataaaatttcctgaagataaaaagaaaaacatatgtcctgatcggagatgacacaaactttcctaaatacaaaacttgcctaattaataaataaactcaaactgtcatgccctggtcttcatgactcctcgaacccggtcttttctggataagcttttcatcggctaattgtgatctttccttaattgaatccactaaagaatcttatcaaaatttgacgttaacgggaatcaggcacgcgtcacgaatgactcgcaaggcgcaagggcgctccggattcagaatcacatgcggttggacaggtgacgctatgaagtgggtaggcgcccgcaaggtagtaattgaatcggacgataacgtaatcatggcgcccgatataccactcatgtacttggacaccgatattgtatcggaatagggtgacataccaaaattttgggcagaaacatctttaatttttacaataactaaaaaaaagcccatacattgcaacaggtaaaaacgttttttcagtggtacaaccgctattaggaactaacgttaggatcactgcatatatacattataattgaaaacgttaataaaaattgttccatggtttgggccgaaagcctattctttctttccttttccatcccaacccaatccgctacctctgtctgcttgatctgactctcttcgatccagcccacaagtggagctacaagtccagctcacacagccgactgccctgacttaggtggagctataggcccagctagcatattcaactgccgtctccaacctccagatagtcatgtgcttgtatgccggagccgatcctctccatcaaatccagccgaatcttttttatatctcaaaattagttgagggcttttgttccactcgatctcctctttccatttttcctgaaatcgaaacgaatccgtaaaattcggaataaaaaggtcggtcggctatcatcggcaactaagactaaatctactgaattaaagccaaattgaaaggaaaattatgagaaaaaataatgagggaggagtggggaatcgatttttgcaatgtagagactgtcgacgtttgatgtcgcgattccggtatttgcatagtatggggatcgtcggtgctaggatatatgcgagactgaggtaaaagagacagagacagggatttttacatatgttcgggcccctgaattgtcaagtaataaccctacatcctattggccggagccggtgttgctcttattcactataaatcacaccagtacaatatttgggcagcctatctaactgttgtcaatatggcggtttaaaggtctgactcgtagtcgacaatagggtagtcttcctcctcgaatccgtgcccggcgagatcagagatagcgctttcgtctctcctgacagtatccggagacaccgtaggggactagccgtgcttatccctgaagtcgatatccggcgtcttgtcttggcgtatgttggcttgtatgttgttccgtagattgtggtgggtgttgattgtggtgatcttgtcccctctcctcctagggggccttgtatttatacccataggtgtccccttgtccaagtagaactagggaaacctatatggatacaatccgagtagtccttgtcgtttccatgtagaactctggttgtctttccttattcggaacttcatccatatctgaggtcggtttccgtataagacatgatacgtggtgtgtcctgccgagatgtagtcgactgctattaggtatgtggtatccataaccctgacagtagcccccgacttcaatgcaaatgaacaaattcatattctcaaccgctgaccatggagtaactgttatcgagctcaagtgaccgttcttggtgagttcggagataacgttagacttcctttatcagcctcgtgcgggcacctaaagggtttgtctgagtcaatctctgacgtcaaccaagaaagtacagagcatacgactaggtctcccgtcttgctgtaatcgagaatttggattgaagtcaagaaattttatctcggcggatacaccatctcttcattccgtattccttgtcgagatccaccaactgttctcgagcgatcgagaaggcgtagaatctgcgacgaagccttgtcaacattggtcgtactcgccttagtcgatcttggtgtagaaccatagagacatagagtcttcgtcaatgtcgaatagaattttcctgaaatcaatactcagaaaagaatattagatagaaatagcccccgagcgagcgctcaaagggtgacatgttataatatgtatgaaaaactgaaaatgagttaaatttatagaccaatgttttgtatatgagcgtcttctctcttaccgacttcgatcagtcagtttgttgagtcatacactctcccttgaccctaagaggagaaggctcttggacccttgacctgccttggttgaacaagcactgatcctagcccccagccgtgaagttggaaaactcaatttccgattacacggcttggttaatacgcgcggcgagaactcttacacgaccagatcttacatggtcttttgtctctacaggatccgacaaggccttatcggctctgggcgtcactagccgaagttcctcgaaggccttgtcaagacggcgtaaagggacagtaggataggtttcaacgctaggtgtcgtcgtggtaagggatctctgggtaaaacacttggcgatattgtgtacctgatatcaactttgttgaggtagaggtagtgggagaatcgctacacttttggtcgaggaccaggtagtagtcccaactcgaccacttgaagtaaaggtagtgggagaatccctacaccactggtcgaggaccaggtagtagtcgtaattcgaccacttgaagtggaaatagtgggagaatcgctacaccgctggtcgaggaccaggtagtagtcgtaactcgaccactagaagtaaatgtacgagagatcactacaattaactggttaagaaccagtgagtaggtgtctctcgatcattttgagtcgtggtacgaggaccgctacgctgccggtcgaagaccagtcgtagctgttcctcaaccatctgaagtcatggtgcaaggaccgctacgctgccggtcgaagaccagtcgtagctattcctcaaccatccgaagtcatggtgcgaggaccgctacgctattgctgtagttgtacctcaaccatatgaagttaaggtgcgagagattgctacgttttactagttcgagaaccagcgagcaagtagaattatctctcgaacaccaatggaagtttgcggtgcgagagattgctacgtactggttcgagaaccagcgagcggggcagaattatctctcgaacaccaatggaagtttgcggtgcaagagattgctacatactggtttgagaaccagggagcgagtagaattatctctcgaacaccaatggaagttgcggtgcgagagattgctacgtactggttcgagaacaagcgagcgagcagaattatctctcgaacaccaatcgaagtttacggtgcgagagattgctacgtactggttcgagaaccagcgagcgagcagaattatctctcgaacaccaatcgaagtttgcggtgcgagagattgctacgtactagttcgagaaccagcgagtgagcagaattatctgtcgaacaccaatggaagttgcggtgcgagagattgctacgtactggtttgagaaccagcgagcgagtagaattatctctcgaacaccaatggaagtttgtggtgcgagagattgctacgtactggtttgagaatgtcacgcccagaaattcactagtaatttccgaactaatttgtgtattaaaatcctcgtccaggaatcagccgaggtacacaaactgacaatttaatatacagattcatcataatgcgataaatacttacatgagaggcactttagtcctcagcacgaagaaaactgcagcgaaaaataaaatctagcgaagctctggcttcactcccacaggcagctcaactggggtataagccaaacgtcttctccttcgcaacttgtcttcaactgaggtttgattgattattgcaaggtgagtatatggaatactccgcaagccacatagcaaatatgcaagtgcacaaggataccaaagaatggcataatatagggcttatttgcaaaagaagcatttagcaaacaattgagaattgtaaaatagtggagtaattaatcatcaatattaatcaacactgaacagcacacccatgctgcacaagcccaaccatcctgaacaaccatacccggctgtacagatctatctccaaaccaggaatgtaccattccaaaccaggagctaatcaaattaccatcaattatcacgttattattaataagtagtgtgggactaatcacgaaagacattgttagacccgcccataaccgcaggcacggctattcgaatagttttactctggccagaggtgtaccactgtacccataagatacaacccaccgtcatgtcaccgtgtccgcgcagacacgtcaccatggcgagtgattgtgacaagacccctcgcataactcaactcaaagcagtgcaccattcccggatcatagtcaccccctcaaaaaccagaggcatggactccctagcgacccccatgggcttatctccaccacttctcagtctggtgctccgcagtgagccttgttatacaaagtgtccagccgttgcccattctggcttatggttggcacggtaaatgtttcacaatcgaaaatcgtgaacaggtccttaattgtcatgagcactaccatcaaaaccatgtgctcacaacccaccattatcaaattttagttggcacattaattaatcaaccaatcacgattgaccatcgtgagctatcattaagccatcattaaataacagtgaagcattagttatcccaattgtgtgctaatgtttctaagcatggctaagcaattatgtctaacatctagctgaaccaatatataaagctcaactagtcaaattataataacctaaggtatcaaggaatagagtaatcaatgcaaacaggccattacaaaggaataagttcacaccacccggtggcattcgaaaataaatgcacagttgaaataaatagagaatttaaatataggatcaacatgcttaaaggaattgtgtttgggatctgtgtgacttgccttgcaataacgggtcttcaattaatcttcttgaacacttccggcgcactcgcgaaccttcgaaacgacggaaacgacaagctaacacgcaaaacaaggaaaaagactaataaaaaccaaataaacaatacatataaagtaaacaaacatgtagatcataattttagatgaattatgagacttgaacggcctcattctgacttcatatgaatttattacgaattttactagattaaatctaattaaagcctatttaaaaaggattaaataaatttaattcaatttatggataattttaatatgtggatctttattttatacaacttttgcaacttgaaccacattaaactgagttacagagaattagttatgaattttcaaagattaaattggattaaatcctttatatagattttaattgaattatgacgcaataatgaattatttttgaaaaggaaaagggatttattgcgtcagcggactcggctcatggtggaccgggtgcacggcggcggtctacggaaacaaacggccgagatctatcctatctaaaacggacggccaagacctaaacgatccaccgcggtccacggggaacggcatcgatgacgtcatcaccagcggcgactcggcctcgcacgctcgccggcgaacgacggcgcggcggcacaaatgaagagcatctacgcgatgcgggcgacgcggcgatccttaccgaggcacgaacggctgcggacggtgaccggacgacgacggcgacgaggatgagcggcgacgaagatcgggtcgacgacgacggcgatgttccggcagtcctcggcgttgacggaggggtggacgaggtcggcggcaactcggcgaacacggcggtggtcttcccaagcgacgacgatgaccggagcgacggcggcgcaaggctggacttgcggcggcgatggcccacggcgaccggcgatgggaaggaaagattagggttcggggagagagacgaatccgattcgagatcgaatccacggatttccaaacgattttagtcgacgattccaaaagagaaaaggtagaggagatctcggggatcattttccctctatcaattcggccagaggaggaaggaagcggccgaatttggaaggggatcggcggctgcacggcaaggctagggcacggctgcggcgactggaggaggaagacgacctgacaggtgggccccacctgtcagcggcgagggctcgcgcgtgggcggctcggctggcgggctgactgggccggggagagagagagagagctttttgggccgactttcggcccaaagccaaaagaagaattttaaaaactttttcaatttaaattattcgtgaaatgcaattccatttattaaaaatacttccttggctcaaataaatcccagaaaaatctaggaactatagaaacaagagaagtatttaacaaaattttatctagcccacttttatgttgagatttaacaaattaaaattagatcttctcttttaggattttaagatcatttctaataattccttttacacaacaatttataatttaaggatttttaaatgagaaaagcacttaacataattataattagatcattaattgattaactaattactgaattgttctttgtatcaattaggaattgagctctgaaaaatccgagaaaatttcagagagtatacttaatcatagagaatttaataaaaattaaattcatccatgctttatatttaggaaattttatttcccacatttaacttcacctgtaaattaatgaacatttaatataaattctattaataatttatt

SEQ ID NO: 23219 - DNA, 3429 bp, Oryza sativa
gggcggaattatctcttgaacaccaatggaagtttgcggtgcgagagattgctacgtactggttcgggaaccagtgagcgagtagaattatctctcgaacaccaatggaagtctgcggtgcgagagattgctacgtactggttcgagaaccagcgagcgagtagaattatctctcgaacatcaatgaaagcgctagagttggtttattacatgtgcatctcatgtggccagcatgactcacatacccaacttatagcatatccggaagtccgttcgcaatcatgtcgggtgatcaagccgacgccgttcgcgaggaattatccgttaacaaccttttctcgagtagtccagccatggccggtgctatgagataagtcgtcaatcttcgttggtaggttggacgcgacgactctgtatttgtcgagatcgttctcgataatgcggtgtagtcgaccacaacctactcgagtgctcaattattcctgaaaaatattttctagaaggcaagacatatagcagagaatatcgagtatgtactaaaaaactgcatggatcttctagcattatcaggatataacgagcagatgtaattatcaggcattatgtaaaccgtaaacaagcatgatttatacagaagaaaacagagcgagtccccaatgttagaccgtagtcagtttaacatcgggaacacttgcacaacagatattgtataaaaaacatgctctaggtaaacataataaattactgatctgacaatattgtatgaatctagaaaacaggtacgataaaaaatattgcgtacctttgtagatacatgccggatgtatatacggaattagtagattaatttaaaataattaatctgctaattacctttgttcatgtgttaattggtctgacacatgcgacatgtgtgtagacgtgtcaaggagctgtccagtagttttgctcctggttcatggttgcgtaacctagtcggtttcctttaggcttcggtacagcatatcccgtcgtgtccgacaactcgttggactcggtcggcgcctcggccgcggtatgtgtttatatgtaaaccaaaaggaaccaacaaaaagcacataagcagtactaaaagacaaaaccgatataattatgattagaatcagatttagaacggttaacctgttaacgatggatttcaagatttcggcggtggacgtcggctcggatgtggttggaacggagcaagatctcgtggctgacgacgctgaaccgatgtcctccgcggtatctcccaaagctgaagtcgagagtttcttgtcgggaaatccatctcttaaacccatctcatcaaaatcttgaagcaccaaaatcctcctacctggcgtgccattgttgacgtttgatgtcgcgattctggtatttgcatagtatggggatcgtcggtactaggatatatgcgagattgaggtaaaagagacagagatagggatttttatacaggttcgggcccctgaattgtcagttaataaccctacatcctgttggccggagccggtgttgctcttattcactataatcacaccagtacaatatttggacagcctatctaactgttgtcaacatggcggtctgaaggtctgactcgtagtcgacaacagggtagtcttcctcctcgaatccgtgcccggcgagatcaaagatagcgctttcgtctctcctgacagtatctagagataccgtaggggactagtcgtgcttatccctgaagtcgatatccggcgtcttgtcttggcgtatgttggcttgtatgttgttccgtagattgtggtgggtgttgattgtggtgatcttgtcccctctcctcctaggggtcttgtatttatacccatatgtaggaatgaaaacggatcaaatacggtcggaaactagctttatcatattcgttttcatattttttctcggaatcaaaatcggaatcggaaacccggatacgaaaacagaatcaaaaattatcgaatacagatacggagcgaatacaaatcgaaacgaatacggtaacgaatattaatcggaacataaaagtccctcaaactgaccttcacaaatcaatgaagaaatataactcgttactttttctaatagaacatatcaacattttcaaattttagtgttaataattttgttatatccgattttgtggttgaggaagatgattcaatctaagagtaagacattatgaggcaaaatcatgtcaataaattggatgattgtttttttctaaatatttctaaaatcatgttctatcgagttattgtgttcttactgcaactagtttttgataaccttttcacatgagttcatttagtatcataaaatttaattcaaagttgagggacatcatatagacttaatagctaattcttaggcccgttggcccagggatatataaacctatccctagtttctcccgcctcccaatctcccacacctcccaatctcctctcagccgccgcccttcctcccgggctcccggctcccgcgagacgccaccacgggggcggggcccgcgtgtggcggacggcgacggcgacggcgacgacgggggctgggccgcgtgcggcgaatggcgacggcgacatcgggggcggtgccgcgtagggcggatggcgacggcggttgctcggcggcgcgaggcgacgacttgcggcttgcggcgacgagcgtaaccggccgcgccgccgtcggggcggccgggtcacggcgacggccagcgcgaggcgacgtcgtgtgggtgcggcggacggcaacgccggcctcggggcggccggatccggggttggcggccctggagccgcgggatccgacgtcgtgaggcgacgacgacggagggggctcggcggcgcgaggggacggcgtgcggcggacggcgacgagcggatccggcgtgcgacgtgcgacggcaacggcgggaactcggcggcgcgaagcgacggcgtgcggcggacggcgacgagcttttttcaatgttttaatttggatttttctgtttattatgattcggatatccggcaaaaacggtcggatagtttccgaccgaatccgagttctgacggataccatcgctactgtatttgaattcgtatccgagaaaaactatccgaattcgtatccgaatccgaaaatatctgaaaaaatccgaccgcaacaatccgcatccgaaaaacaggatcggaactcggaaattatccgtaccacttttatccctacccataggtgtccccttgtccaagtagaactagggaaacctatatggatataatctgagtagtccttgtcgtttccatgtagaactctagttgtctttccttattcggaactccatccatatctgaggtcggtttccgtataagacatggtatgtggtgtgttctgccgagatgtagtcaa

SEQ ID NO: 23220 - DNA, 6183 bp, Oryza sativa
ccggatggaaaaaaacagcgaaaaaagcggcaacaacaaaaaaaaaaacggagcaaaagaaatctgatgaaaaaaagcggaaaaaaccgaatcgaaaaaaaaaacagcgaaaagaaggagacgatagaaaagataaatataaaattagaaattaactcaaacacggatggcgtaccaaaatcccgacggaaatatctttaatttttataatagtaaagaagagatagagatagagatagagataaagataaagataaatataaagatttttgatttccaggatcgtaagattagatttatctgatttcctatttttaaggtcgttagattatatttgtgatttttatttttagagtcggtatgtcaggtgggacttaaaaaacactataaaaatattttttaagtaggtaaagttacggagaaatatatgagcctaactcaaattagcccccacaggagatatgccaacaaatgcatgcggaagtcagggcaaggctcgtgcgttctcattaggatgacctacttccaccaagtttctttgcatgaaggcagctgcagaagcgacccagcaaccacccaaatctccatacggtatggtcgatctcgatcatgcatgttgaagaagaccaacgatgaccggagtagtagctgactgccctgactctgcttgatttgctatgccacctacggtttggaagattcagagaaatatcccttttacttgtacatgtactaataattgtcgacatgcaaatgcaagtggttgctgttcgtttgtggcacaaacaaagttgttgaggtattattgaaatcaatatttgctataggatatactccctccgttcctaaaatactattattttaactagtcgaaggcaaaataaataaaattgtaaaagattactatgcccttcattagattttattagataatggaaatggattacatctccgacttctatcataagacacataaccataagtttgtttaatataaaataaatcaaaatgagaaataagatgatgggacaaatccccaactcccctttattattgatagattttttagctagcaattctaatgaaactagaccacacatagtgatagtgaagtaagagacccttgactaccgattacaagagtgtaataccgatgtatattatcatgttcttcctcgtgtgatagcatcgtaaactaaaagtaaagtcaataagaatatatgaagataacccgcgtagggttagataattgtttatcattatggcaacatcaaattgaccaagatacaacactagcttcaattagaataatatttttaatggatctagatacctctctaagccaattaccaaaaatatttttgatgttacggggtggagggatattaaaagaaaaaaacacacatctcaaaacaaactgagcaacgtaacattaaaaaaaagatgttggattgtctcttgtccataacagacagaatagtgtttgcctccttctattttcttttatccagtttatatctttcgttagaattactttctttagtggaacgtacatatcgataatgagccgtctttgatgattttgtaagtctcaagatatgccggctgagcttttagagatgctcgtaagggtatgacgtgtgttagtaaggattagtgtgcatacggttagacgagcatttgtgtctgtgtttgtactgtgtttcatcgaaaaaaaaaagagaaagggataaaacaaagagggagtatggcgtgtgttcgtacaggttagcgtgctgtttatatgagcgttgtattgttttggggaaaaatataagcagagggggataaaacaataaggagtactactgattaagtggttaattaaaggaaagagtatgaattaccccctaacaatcgcaacaatacgaattaccctcgtaaatcacaaaaccagacatttgacaccccaaactattgaaaccggataaattactcccttggctaaatctgaagtggttttggtgctatgtggcatacacgtgatgttaatctggcaatccaataaaaaataataataataactatgggcccatttctcatatactcctacctcacccctttctcttctctctctgatgctgggggcgcggcatgcagggcgagcggtggccggagggcactgtggacgtggagcaccggtgttggtgcccgcgtctgtggtgggtgcagtggcggtgttgcggggagatatggaggtgcgccagaggcggacgatggtgaggaaggccgccaccgttgttcccccattcccctatccgtctcttatgactccctcccctttcttgcagtgcggcggtggcggtggtttgggcggaaaacgccacgggcaggaaggtcgccaccgttgccgccacctttgcacgggggcgagctctcggccactgggggcgtggtgatcgtggaaggaggaaggggaatgggcgaggaggcagacacgcgaacgggatcgtgctggcgtgctacaccgcggtcctcgacgagccaggcgcgcccccgcgcgacaccagttctgcttccgccgccgcctgcctggtccgcctccgccactacagtcggccgcccaagcgtgtgcgagagagagaaagagcgaccggggaaagattgggttgagggagaagaatggcaagtgggcttggagagttttatttgtttttttactgactggattgccacgttggcaccacgtgtgcaagctcaagttgaaaccactcaaaatagtgttaaggggggttatttgtccggtatgaatagttgaggatgtaaaatgtctggtattttagtttggggtgtaattgggtcaaccacaataatttgatggggggaaataattcgtatttttttccttcattaaaagagaagaaaagggtaagcagtagcaagaggttcggcagacctcactctaaaaatagtctttgtgaaacaaaacttgaagctgaaacgacagtctctagggtacagaggaagagtaactaattaacatctagtactaataatttagctgtccccactccccactagctagttccttcttgcacatttccattccaccaaaccaacttccagacaaagatggatcgattattggttgaagctcagaggaggctacgcttgctttatacaagtgctggagctgctattgcattttgagcatcgagcagccgcggtaccccaattctcgggcctcaccaaacgcagaaaacacacattatatactgcattcgtgtcagtaatacaatggcaaagaacctgtcaatctccgttcagctgcttctcgtcctcttcgttttactcgcttttgccagcggcatcctcgcacaaggtggaccaagcacctgcacggacaatcgtaagctaccactgctgctatttctttacttctttttttctaaatagacgaaagaaggtttaatttgctgcataaattacgatcttaatttcgcctttctagctaattaaagttctttgctcgtcatttctggcagctgtgcagcaagattgcccgccaatccctggtagagggaactaataattaattaatgttgccaccggatccatgcatggatggacgatgcggagaaatatataattgatcacgtgccatatagtagtatttctacgcagcaagtttactacggagtactttctcagtcaataaaacccatttctggatttgaatatagatatagtgttgatgtgtttttgccgtgcgttgcttgtaatgatttgctttaccaatataaataatataacggacagtataactgcccgaggagatattgtatccggtaataagtaaatgtatattcaccatctggtgtccaacaccgccaagttatatattcactgtggggaagagctctttagtcctggtttgtaacctcttttagtcatgggttacaaaccgggacacccaatccaggactaaagatgataacgctaccatccttagtcccggtgttaccaactgaaactaatttttttttcttttttctattgttttttttctacttgcatctatttatttcaagcaccaatgctgtcacccccaattcctgacaaatcatccacaacaaatcatccaccataggtccatccccaaaataatccgcgttccacaagtcattcaaaaaatcatccctaaatctaaaaatatctacaacaaaatttacaaatcattcacaaaatctaacaaaaatctagaaagccacagccgccggcgggcgcctggccatgcgccgcctcccatcccgccgccgcggctgcttccgccacctggcggcctcccctcccgccggatctggtggaggggagagccgccgcccgccgtcgctatcgtcgaaggaggggggagggggtggagaggggaaggggaggagggggaggatgaggatgagaaaatgagaggggaggaggagaggatgagcagataaggacgaggcgcgtggctcggtgcatagctcggggcaactgttcatggttttttttaattttggtcccggttggtataaataactgggactaaagataatagggtctgacatgtttttcaaccaggattaaaaatgataagtaccctaggttactactcgaatcaggactaatgtgatttttgcatgaccaagcaaatatcacttctccagtagtgatttcatcctactcaatgtcacgatgcactttctgaaatgaccatggatcataattggatcaacttactttgtaccgggctctttctagtgcccacgtactgtctctagatagcgtcttgccatcaagtgcttttgtcggtgcacggtttaggaggaagactgtcgtaatcacaggctcaccctacaacttcataggcaagtcgtgttcggttcagcagctggctatgcaccatcgccacgatgctctggtctcacttctcaacgatgttgtttactccctgttggaggcatgccatgaagcctttcggccggacctgccgaaaccatagtaccagcagggattcaagccaaagacgtcaagaccattcgggcgaagccctatggcgaaagccataagcgaagctggcgaaggctggaaagccgcatcggtactccgcaagtaaaggcatctcgggcgaagggcatacggtgaactacaaatacttcgccatgacgagttcggcattaaggaggcccagcaggctgcccccgacctttaaggccccttcgccatagaccaggcccagcctatcggcccattaaaggcccatatatgcaaatgacaccgtgtacccatataaatatccctttcataagggcaaccatgtaaaatcccctgtaaacctaaaccctaggaggtgtaagcctgtgctaaggttataaatagacccctagggccatgtaatgggggatcccaataaattttataaatcaatacacttattgcttttccaacactgttgagcaaccacgtccttcgacgtgacgcagttgtccattcgacaacagctggcgccgtccgtggggaacccagactaaaaggctgaaatgggagccttttgccacacccacacccttcgccatgttaccaataaggtacgacgtcaagggctgtgggcgaacaggttttgccacacctaggcccttcgccgcaataccaataaggtaaggcgtcaagggctgggggcgaataggttccgccatacccagacccttcgccacagtaccagtaaggtatggcgtcaagggctgcgggcgaagagatttcgccacacgtcacacccttcaccacaataccaataaggtacggcgtcaagggctgggggcgaataggttccgccacacccagacccttcgccacaataccaataaggtgcggcgtcaagggctgcggatgaacaggtttcgcccgcccacgcccttcgccatagtgctaataaggtacgacgtcaagggctgggggtgaataggtttttccatacccaagcccttcgccacagtaccaatgaggtacggcgccaagggcttggggcgaaaatgagtcaggaccagagacgaaaataggggccgcgaagccaaactagcctgtggacacctttcgccacaataccaataaggtacggcgtcaagggctgcgggcgaagaggtttcgccacacgccacgcccttcgccata

SEQ ID NO: 23221 - DNA, 21711 bp, Oryza sativa
acacgccacgcccttcgccatagtaccaataaggcacgtcatcaaaggctgcgggtgaacaggtttcgtccgtgacgcccttcgccatagtgccaataaggcacagcgtcaagggttgcgggcgataggtttcgcccgcccacgcctttcgccatagtgccaataaggcacgatgtcaagggctgcaggcgaataggtttcgcccacccacgcccttcgccatagtaccaataaggtacggcgtcaagggctacgggcgaagaggtttcgcgacacctaggcccttcgccacaataccaataaggcacggcgtcaagggctgcgggcgactaggtttcgccacacgccacgcccttcgccacaataccaataaggtacggcgacaagggctgggggcgaataggttccaccacacacagacccttcgccgcaataccattaaggtgcggcatcaagggctgcgggcgaacaggtttcgcccgcccaagcccttcgccatagtgccaataaggtacagcgtcaagggctgggggtgaatacgtttcgtcacacccaggcccttcgccacagtaccaatgaggtacggcgccaagggctgggggcgaaaatgagtaggaccagaggcgaaaataagggctgtgtaacaccctgaaaattcccgacaacaaaaaaaaatcactaaaattttgaacttttataacttgtgcatcatgctggttgttatggttgatattgcttgccaaaatgtaaataatcacaaagaaagcaaatccaaacaaagggacggttaattactaatttaatttgtagatcaaatattaaatattcgaaccatgctgatagcttgatgccatgattaactaaaagaaacagtaaattcaaatctaattcatttggatccattctcacatgaaatataagaacacatgaaatgatgatcaccactataatgatcgttttttataaataagtaattcaccagaatatatagattgatacttagaacacttcaccaagttcctgatgacatgaaaatcactcatataaaataatggtcatataaataaattaagctttatatataaacaagaatatgtgaatgtttaattaaacaattagattaatgttgtatcgagtctcaaattatatttatagaatgactagatccacgtaaaatacattgttatacaaataagttcattcaatgtgctattgtaataataatagccacattaggatattttaattaattttagaaccctcaaagcctccaaaattatctaggttaattttggaattagacctcatctaaataatgcaataggaatatatatatatatatatggataatattaaacattgagtaaactttcatctaaattaacagttgagtgacctggctcataacagttgaaacatacctgctgctcccttccactactgttatcttcttgaggctggttctgctgaactggcactgattgagtagcttgctcaatgttaacttcattgcttgcattagtctctgaattgatctcacaactgatgttcaactgttgcgactgtccttgacctgcagaagaagattcacccatttggagtggcttgatacgctgcctctgcctcctggaaaacagtcattcttctcttacggttgtccatcctgttcttcttgtcttcaagtcgaattgctttgtcaaccaactgctgaaaatcagaatagtcatgagagatcaacttaactgacagttcatcctttagaccttccaagaacttctcctgcctttccttgtcagtacgcacatcttctagagcataacgtgctagacggttgaactcatgaagatactctgtcacggtatgatccttttgcttcaatgtcctgaactcacgtttcttcaaagtaaccactcctgcaggtatgtgtgtcttcctgaatccttcgatgaactcttcccaagtgattggttgtccttttgctctgttcatccgaaagtgatcccaccattctgaagctggtccttgcaactgatgtgaagtgaaaacaactttctcctggtttgtgcactggagcaataccaacttcttctcaataatgtgtagccaatcaccagcttccactgggttggtagtgctagaaaaggtaggcggcctcacacgaagaaaattagctaacttgttttgaggcggcggaggattgacattattgttcccttgctggttctgcacttgttgcactaacatgttgatcaattgggtctgttgagccagcacttgagcaagggttgggttctcttcattgttattgttttcgcttctactggcgcgagtgttcaccatttgttgcatattagagaagatagaaggagaggggttacactagagttaagaccttaaccaggttaccactgatctggtgtgtgtagaccattatattgttcaagttgattaagcaagcaaccttgtatagttacacgctcatcattgaaccacaccaatgacgagaatgcaaccatacctacacacaagcaagcaacaaacattctaccctactaactattcttccacgacagtttggcggcgtaggttctaaggtaggatgcaaacttcattccatcttgacatctgggcactttagatcgaccattaccttcttattcgtcgatccacttgacttaacctccataagtagaccacattggcgtcttcaagtttcaacaactagtttcagaactactcaagttgaaagagagaggggagtagacaatgaaacaatttgcaaagaattctagataaggaagaaaggagaaattttcacaaatcatgtttttgggaaattagtccttaaggtttgaccatttggcttatcctacagtcgagatggctctgataccaacttgtcacgcccagaaattcactagtaatttctgaacttatttgtgcattaaatcctcgtctaggaatcagccgaggtacacaaactgacaatttaatatacagattcatcataataataacgttacatacttacaaaataaaagaaaaacagcagtggaattacggtctagcgaagctccggctccactcccacaggcagctcaactggggtataagacaaacgtcttctccttcgcaacttgtcttcaactgaggtttgattgattattgcaaggtgagcatatgacatactcagcaagccacacagcaaatatgcaagtgcacaaggataccaaagaatggcataatatatggctcatttgcaaaagcagcatttagcaaacatttgggaattataaaacagtagagtaattaatcatcaattttaatcaacactgaacagcacacccatgctgctcaggcccaaccatcctgaacaaccatacccggctgcacagatctatctccaaaccaggaatgtaccattccaaaccaggagctaatcaaattattaccagttatagcatcatttattatggtgagaagtgtgagactaatcacgaaagacattgttagacccgcccataaccgcgggcacggctattcgaatagttttactctggccagaggtgtaccactgtacccacaagacacgattccacacatgttaccatgccctgaagtaccaccacggcactgcagtggtggtggaaatcgcgacagtacccttcgcacaacacaactcaaagcagtgcaccattcctagatcataatcacccccttataaaacaaggcatggactccccagcgacccccgtgggcttatctccgccacttctcagtctggtgctccgcaatgaaccatgctatataaaagataaagccgttgcccatgctggcttgtggttggcacggttaatgtttcacaaccgaaactcgtgaaccggtccttaattgtcatgagcacgaccatcaaaaccatgtgctcacaacccaccattatcaagttttaattggcaagtaattaattaaccaatcacgattgaccatcgtgagcttccattaaatatccataagtgatagtgaaacatgatttatcccattagtgagctattgtttctaagcatggctaagcatctattataagcatctgtgtgacttgccttgcaataatcggtcttcaattaatcttcttgaatacttccggcgcacacgcgaacctttgcaacgacggaaacgacaagctaacacgcaaaatgaggaaaacacagagaaactccaaataaacagtacataaaagtaaacaaacatgtagatcatgattttagatgaatttagagacttgaacggtctcattccgatttcctatgaattaaatacgaattttacaagatttaatctaattaaagcccatttaaaaaaaattaaataaatttaattcaatttatggataattttaatatatggatctttattttatacaacttttgcaacttgaaccacattaaactgagttacagagaattagttatgaattttcaaagattaaatcggattaaatcctttatatagattttaattgaattatgacgcaataatgaattatttttgaaaaggaaaagaggattattgcgtcagcggctcgggttcacggtgaaccggttgcacagaggcggtctacggaacggacggccaagaacaaccctatccaaaatggacggccgagatcgacttgatctactgccggtctacgggaaacggcgacgatgacgtcagtggtgacgtcaccaccggcggcggctcgggcgcgcatgctcgccagcgaacgacggtgcggcggcgcaaacggagagcatctacgggtagcgggcgacacggcgaactcaccggtgacccaaacgacggcgaacgacaaccggatggcaacgattacgaggttgaaacggcggcgacgatcgggttgacgacgacagcggtgctccggcgatcttcggcggaaacggaggggtggacgaggacggcgacggcttggcgatcacgatggcggccttcccgagcgacgacgatgaccagagcggcggcgtcgcacggctggacttgcggcggcgacggcggcgcacgggtgaacgcggagacggcactacaagcggcggcgagctaaggcgagggtggcggtgggtagaggaggtcccaggggtccttttataggggctaggaggcggcgacggaggcccacggcggccggcagcgagaaggaaagattagggttcgggagagagagaggaatccgattcgagatcgaatccggcactttccaagcgattttagccgatgattccaaaagagaaaagatagaggggatcccggagattatttcccctcaatcaattcgggcggagaaggaaagaggcgacggaattggaagggcggcggcggcgcggctcggctagggttcgggcgagcgacggcgcgaggtagacgacgggcctgacaggtgggccccacctgtcagcggctgagagagaggagggagggcgcggcgaattgggctggcttgggccgggcgcaagcaggccgaggagagggagagagagagacttgggccgactttcggcccaaagccaaaaagagagatttaaaaatctttttctatttaaattattcatgaaatgatattccattgattaaaaaaatacttccttggctcaaataaatcctagaaaaatctaggaactatagaatcaagagaagtgtttaaaaaaattttatctagcccacttttatattgagatttaacaaattaaaaatagatcttctcttttaggtttttaagattatttctaataattccttttaaacaacaatttataacttaaggatttttaagcaagcaaaacatttaacataattataattagatcattaattgattaattcattgattaactaattactgaaatattctttgtatcatttaagaattgagctctgaaaaatccgagaaaatttcaaagagtatacttaatcatggagaatttaataaaaattaaatccagccatgctttatatttagaaaattttatttcccacatttaacttcacttgtaaattaatgaacatttaatataaattctattaataatttattaaataatttataaatccttaaatggaaaatcaggctgtgacaattgggtaaactctattcgtgtgaaatctagaatttatgggacaagttttaataggaaataggcccctaaaattggataaataggaaaaagtcactgttcattagcccctaggtgttcgatttggttccctagccctgccccctcctctgccacgccgtcctcgcaccccgcgcgccgcgcgccgtcaccgtcaccgcggccgctcgcccgccgctcgcccgtcgcgtcaccgcctcgcgccccgcgcggtcacgctatcacccgtcggccccgagccccgctccgccgtcgccatcaccgcgcgccgcgcgccgtcaccgtcgcgctgccgcaccctcaagccccacgccccgtcactgccgcgccgctcgtctgtcatcgtcggcctcgcgccccgagccgccgcgcgcccatcccatcgccgctgccacgccgcgcgccgtcgccgcacgccgcttgaccgtcgccgtcgccgcgcgcttctcgccgtcccgcccatcgcgtcgcgtcgagcctcgtgccgagctgcgcctagccccgcgccgcgctgcccacccgtcgcatcgccgctccgagccccgcaccgccgtgccgtcgcgtcgccgcgcgtcaccgtcgcctcgcgccccgcgcgctgcgccgtcccctcaccatcaagccggccgcccctcctcgagccctataaattccccccccccgtcgccattccaccccacaccacctcgcctcctcttcccccatttctccccttccttccaccgcgaccgccacgccgccacctctgtgccgccgcgccgcgccgcgccgcgccgtgtgacgctccgccttgcgccgccgccgccctcccctcgttcggtcgccgtcgccgccccgggtaggcagagagccgagagagagagaggagggagaagaagccgggagggagggatagaagggagagagaaagaaaagagaggaaaagagagaaaaagagaggaaaagagaagaaagaaaagaaagagggaaaaaggaagaaaagaaaatagaaaagaaggaaaggaaaaaaaataaaaataaaagagaaattagggagagattaaggaggtctagaaagttaaaataattagagtttagttattgattaatcatagttgaagaattgcaaattttatataattatagattattcttggtaatctctataagtaattaattcgcgatgaataatcgggtataactactaagagttgtattgtcgttgaaattttaaagaagatacttttaaatcgcaaaatacctttgagtaaattaaaatcgaaatagtcctatttcgcgaataatgtaatcgatatagaattcacctctcgtactcgctttttgatttggttttcattagatcttatctgaattctaattgagttcaaatcgtttctccgcacgtacttttagagctcgagggagttgcagatccgagagaggatcaagacccgcaggactatgagtaaggcaagtcatcactattccttgaacatgttgaacccaattgcgaaattattttgtttacaaataaaattgcatgcaatgataaacatcctacttgtgattatgccatgccttgattattgtttaccccttattccttcgtaaccatgtttacgtatggagtccctagtcaattatgacaaatgcttagaaatgctcttctagaatcatgcatactcatattatcaaaatgctttatgcttgggcaattaccttcgagaaggtaattgagatgtggcatgtggagacatgagcgccacattgccatgatattgatgacatgatttgtgaaaggaaaataaaatgaaacaactgttttcgactggggcggatggaggaattgggtggtatctggaaaaggctagtaccgtccccagtcagttaaaaaccgagccatgaagttaagcatgaaacgacccccgtacaaccatacttctcgaatgggtatagacctagcggattagatagccgagcggaggcagtatccctgcatagatggttcacccccatgagtgaggcaggtgcgctacggtggggcagctgttgaggtagggccgcgaggcgtgctcctacatcggtgtcgccattggtaggactgccatgagtgtgtgagagagagaacttaacttgaaccataatttaatatgtgtgtgatacttctctttcctgggagcgctagaactcctctcactgctagaaacatggacacctagagtgcatgaggatgaaagttcatggagcgggtactgccaatgcaaggttatcgaaatgctttgccgtgacgcgtctcatgtgttgggacgaggctcatgtgttgggtagtcgcggagtgcgggtaaagtgtacatccactgcagtgtgagtagaccaaatctattcgaatagccgtgctcgcggttattgagcaccgggacatgtattacacttggctagactctaaattcataacttgtgtgggatgggatattgcatgatgatttttatgctgatggagccacttcctgagaggagggaaggtggacgtcctcagaaaaccatgacgactcaatggcgggaagctatccttgggatcacaatggatggtggacagaaccgccgttgtttaatgtgaacactggtactaaaatttgatcagtctatgctaggtcttaggcttgtgaaaagaattacaaaacttgctttacgcaaatgaaccatagccacaccttgaatactctctatcatgtgcattgtggctatggtggcttgctgagtacggttggtactcacccttgcaatatacaaatttaatcagaggtcggagatgaagcttcagacgatccctacgcttattaccaggcgggcgatgaagacgatggcgctcagtaggtcttagttacggtcattacctgtggcaatggcgtgccgctaccttaactccgctgtcttatctacttctgcttttgggatgtattccggaccgttcggtcctatgttctaagactatgcctgcgggcctatgatgtaataattcgcactagactctcgtctatgtgcgcttggtatttcagctccaaattcatgtgtaccagactacttgatccagggaaatggtaccgtttacacgcttgattcctgttataaaaacgggggtccacagcctacgaagccaacctagcctctggacacctttcgccgtatccacacccttcgccacagaaccaataaggtacggcgtcaacgctacgggcgaagaggtttcgccacacgccacgcccttcgccatagtaccaataaggcacggcgtcaagggctgtgggcgaacaggtttcgtccgccgacgcccttcgccatagtgccaataagtcacagcgtcaagggctgcgggcgataggtttcgcccgcccacgcccttcgccatagtgccaataaggcacggcgtcaagggttgcgggcgaataggtttcgcccacccacgcccttcgccatagtactaaaaaggcacggcgtcaagggctgcgggcgaataggtttcgccacacgccacgcccttcgccatagtaccaataaggcatggcgtcaagggctgcgggcgaacaggtttcgcccgcccacgcccttcgccatagtgccaataaggcacggcgtcaagggctgcgggggaataggtttcgcccgcccacgcccttcgccatagagccaataaggcacggcgtcaagggctgcgagcgaacaggtttcgcccgcccacgcccttcgccatagtaccaataaggtacggcgtcaagggctgtgggcgaacaggtttcgcccacccacgcccttcgccatagtaccaataagctatggcgtcaagggctgtagccgaagagacctttcgccacacccacacccttcgccacaataccaataaggtacggcgtcaagggctgggggcgaataagtttcgccacacccaggccctttgccacaataccaataaggcacggcgtcaagggctacggacgactaggtttcgccacacactacgcccttcgccacaataccaataaggtacggcgtcaagggctgggggcgaataggttccgccacacccagacccttcgccacaataccattaaggtgcggcgtcaagggctgcgggcgaacaggtttcgcccacccacgcccttcgccatagtgccaataaggtacggcgtcaagggctgggggtgaataggtttcgccacacccacgccctttgccacagtaccaatgaggtacggcgccaagggctgggggcgaaaatgagttaggaccagacgcgaaaataggggccgcgaagccaacctagcctctggacaactttcgccacacccacacccttcgccacagtaccaatgaggtacggcgccaagggctatgggctaattcgccaagggtaatcttcgctgcaggcaaacgaagaaagccggcaacggttaaaaaggtcgaagtactaaaagggccgaaggccggtaacggttaaaaaggtcgaagtgcaaaaagaccgaaagccggcaacggtcaaaacgatcaaagtacctaaaaatacctttgccaaaggcaaaaagggaaaattacgagccgaacagccgtaacacgcaccacaccccatttatttgccaaaaaagcacaagttacagattaaccatgacgactcaatggcgggaagctatccttgggatcacaatggatggtggacagaaccgctgttgtttaatgtgaacactggtactaaaatttgatcagtttatgctaggtcttaggcttgtgaaaagaattacaaaacttgctttacgcaaatgaaccatagccacaccttgaatactctctatcatgtgcattgttgctatggtggcttgctgagtacggttggtactcacccttgcaatatacaaacttaatcagaggtcggagatgaagcttcggaggatccctacgcttactaccaggcaggcgatgaagacgatggcgctcagtaggtcttagttacggtcgttgcctgtggcaatggcgtgccgctgccttaactccgctgtcttatctacttttgcttttgggatgtattccggaccgttcggtcctatgttctaagactatgcctgcgggcctatgatgtaataattcgcactagactctcgtgtatgtgcacttggtatttcagctccgaactcgtgtgtaccagactaattgatccagggaaatagtaccgtttacatgcttgattcctgttataaaaacgggggtccataggccgcgaagccaacctagcctctggacacctttcgccacacccacacccttcgccacagtaccaataaggtacggcgtcaaggctgcgggcgaagaggtttcgccgcacgccacgcccttcgccatagtaccaataaggcacagcgtcaagggctgcgggcgaaccggtttcgcccgccgacgcccttcgccatagggccaataaggcaccgcgtcaagggctgcgggtgataggtttcgcccgcccacgcccttcgccatagtgccaataaggcacggtgtcaagggctgcgggcgaataggtttcgcccacccacgcccttcgccatagtaccaataaggtacggcgtcaagggctgcgggcgactaggtttcgccacacgcccacgcctttcgccatagtactaataaggtacggcgtcaagggctgcgagcgtacaggttttgcccacccacgcccttcgccatagtaccaataagctacggcgtcaagggctgtgggggaagagacctttcgccacacccacacccttcgccacaataccaataaggtacggcgtcaagggctgggggcgaataggtttcgccacacccaggcccttcgccacaataccaataaggtatggcgtcaagggatgggggcgaaaatgacttaagtctaagctgggggggctacaaagccaacctagcctctgggcacctttcgccacacccacacccttcgccatagtaccaatgaggtacggcgccaagggctaggggtgaaaatgagttaggaccagaggcgaaaataggggccgcgaagccaacctagcctctggacacctttcgccacacccacacccttcgccacagtaccaatgaggtacggcgccaagggctcagggctaattcgccaagggtaatcttcgctgcaggcaaatgaagaaagccagcaacggttaaaaaggtcgaagtacctaaaaggaccgaaggccggtaacggttaaaaaggtcgaagtgcaaaaagaccgaaagccggcaacggtcaaaacgatcaaagtacctaaaaatacctttgccaaaggaaaaaagggaaaagtacgagccgaacagccgtaacacgcaccacaccccatttatttgccaaaaaagcacaagttacagattaattccattgcccgccaaaaacattcggactttagatccgattcatcagcaaaagctgtccttaatggcgaaggactaccccttgagcatcttcttcatcgctagttgttagatcaacaaaaatttttaagcggtgaagaaggaaaaacggggactatgctgtatcgatgctgggcaatggcaaactggcgctcggacatataaaaattcataggtgtcttcgccttttttgtgtatgatatttcgtggaaaaaccccaaggcaatcgtttgatcaacgaaaacgccgggggggcgatacgaaccggccgaagcactgctcgccgaacgttgaaaccgcgacagctcgttttcggaaaacataccgatcgtcgttatactcgacttatgcaaatacttaagcgtttctggacgcgtatgccaaaagtcgagagcgaatgatgagggctgaaaagtcgacaaatcttttcgctaaattacgcaaaggggccgacatgtttcgacctaacgaaagcacgaaagtgactatgcgaacattagcaaaaagaaatttgaaacacacataagctccatcaggcgaaagcacatactttaaaaaaaaagaagaaaaggagctacagcttcgccataaaaaggcgaaaacgaatcggccaaggcatcgctcgccgaacgttgaaatcacgaacgttggaataaagataccgaacgccgttacatttgacttacgcaaaacacaagcgtttttcctagcgcaaaatgctacgagtcaaaaacggaagtcgaaagctgaaaagtcaacaaatcttttcgccaatcctcaaaagggggctgaacgcatgactttcggcgaaacccccgctaaagcaatagggaaaaggggaaggaaaaaatacaagtcaagaatcgcgcaaagcagacaaacttggcaaaatataatcacccagtgtcataataaagcttcaccattctcgaaaggcgaacgccagtattcatattttttctgcaggagtctaaaaagagttttcggcaggaacgtcggccgaaagggggcgcctcatgccatactgtatagtttgcacggtctcggccgaagctccttactcacccttgcccatgaggggcttgttggaggcattccatgaagcctttcggccggacctaccaaaaccatagtaccagcaaggattcaagtcaaagacgtcaagaccattcgggcgaagccctatggcgaaagccataagcgaaggtggcgaaggctggaaagccgcgtcggtactccgcaagtaaaggcatctcgggtgaaggcatctcgggcgaagggcatacggcgaactacaaagacttcgccatgacgagttcggcattaaggaggcccagcaggctgcccccgacctttaaggccccttcaccatagaccaggcccagcctatcggcccattaaaggcccatatatgcaaatgacactgtgtacccatgtaaatatcccttttataagggcaaccatgtaaaatcccctgtaaacctaaaccctaggaggtgtaagcctgtgctaaggctataaatagacccctagggccatgtaatgggggatcccaagaaattttatcaatcaatacacttattgcttttccaacactgttgagcaaccacgtccttcgacgtgacgcagttgtccatttgacagcactccctctgtcccaatatatagctaagacgagcccatcctacttgctatatgttgagacggagggaatagtttttatgatattatttttatagtatggtagcataaatatatataaaactatacttctacgaaagtacatattgtcacaatatattttcattggatatgcaacaacctatagttggcaagtttatttatctttctttatcttttttttttctggggtgtctaaaatggccatttctgttattaattcgatcaaatgggcatctcatgattaggctattgtgaaactggcccacctagatttaaagttacttagtacaggtgcatgctcacattttttttcgattaatatcagaaaataaaaattgctcttatgctacaaagtcgaagagtgtactcacaattgccacaaggctgattgatgttgcaaatttgcaccttagttcttttttttttgaatgaacatcacctgagagtatggtgttttgtattgatatagcagaaaaaaaatcacaagactatagccctacgatgttataatcgggcaaaagaaaaaaaaaataggaccaccacgcaccgacggcattacgcacacctaaatttaattagaaccgcccgcctgccactatgcataacaacgccaccaaacctataacgtacccacccctataccgttcaccacctccaaacagcaagaaacaaaatggcctcatggacaccacctgtgaagaagggcgagagagcgagagagacgatgatccgtgcatccctcgtataacccaccgccattcaaaagcgttggctaaactatttggaggtgggaaaggcaggaacgagacctcctagatgatgcctccagggaggatgtgatgccatagtgccgcaactgcccatctaatgaactggatatggtttttacctagagtgtcccaccagcggcagggggaggtgcctcaacaatgccctcatcaggtaacaagacactcaaaagtgtcggtgttactgacgcaacaaaccactaggataggtttacacatgcaggctacagcctaccaacccctgcaatcatgacccattgtccctctacaggccaccctccacccacctcatgcatcaccccaaatcaacatgtcatttttgtcaccacaagacaaaccaccgcaagggccgagcacaacgctctccccatagtgtagtttgtcctttgctatcgacctcgccggctagcaccgcccatgttgttgtcatcaccacatgacagattgccacgaggccaagcacagttgccttctcgcacatggatttggtccaacaccatcgatagcgcaagtcagcaccgcccaagccactatcgttactgtaaccaaatcaccgcagggtcatgcctccacatgctggctacaccagaccgaagatttcgtaggcctccatcctgaagtcatcgttgccggtcccccgaacctccaagaagacctctacctgcagctgcggatgccatgacgccactagatccgcggatcttgtaatggatgtgccagatctgcctaccttcgccgtgctcatgagcacaagcatcagtaagacgaaccgactagatctagcctaactagttgtggatctgaatgcttccaaacaccagctacactcgcaccacccaagttgccgccatcagcatcttctctactcgtaaggtctctgggtgggattgccccgctgccaccttcctcgttgcttgtcgtgctcccaacatgctggttagacggcgacaaaggcagggtgatgggtagggggaggagcggtgctaggtttggggtgtcgcccgagttacctctttaggcaacacggtggctaggcatgaaaaatctcctatgcgctccattttttgccccataattgaggtgctagcttgcgctctcttttggcacaacatacacaacacatgaacttccaaagttaccccccttttaattgaggcgctagcttgcgctctcttttggcacaacatacccaacacatggacttccaaagttacccctcttttccctccattctcatcttctttctctatacgtctaactaggccatgccgtcgtgttcatgacctttctcacctacgtggaagtctctaccaagccacccgttcccatcaacatcgcccatcgtgcccacgctgccaccagcctcgacggtatcgacggtgatggcgagaggatgcagcagagtttgggagcagggtggcgccggcgaagcttgaatgcgtcatcggtggagcttggcaacgtgcataggaagatggaggaagaagggagaaaatttgaaagggaacgtacatggtgttgtggcaaaagagagggcaatcgcctcaactatggggcgatttttcaataccaatcaactttgtggcacagggtcaatttttcagaaaaaacattggttttgttttttttttctagtggctactcaaccagtggcatgcatattacagaagcactacttggtgataaacttgacaacaaagtcaattcattcttttatttcaggaaaactttgcaccttgttgcgcctatgtccaattgacctaccatcagtcaagccaaacacaaataacacagtatctacgccaaagtgaggtgattattcagttttcctgaacgggatagagagcacattcacaggagcaagaataatgactgctattatgtgacatcacaattccagacacaggcgacaataccgaattgcagatgaaggtatctatgcagcacttgaacatgatttacattattgtcgctaaattatatcgatccaagtattaggaacatgtgaccgtacaaaacctgctaggactgacaacgaatatcatatccgacttggtaatacttgggaaatatagttagccatcttaaaactcacgaaaatcaccaggaatggcgctcttgtgatctccatggtcaaattacatgatcatccatcagtggggcgacagttctgccatcaataagcacacaaaagacaattagtcagcagaatatgcaaacggaaccctgctacaccaaaatcaggccaaatctcaattcttaaaacatctaactcaaatgaaggacacgcatgttggcaaaaattcgcttacaggaagtgatatagtcattctatagtatgtatccaggaaacaaaaccaacttcttaattaatactagtcagatgtggatacaaacagccagcaagtaaataactctgggacaaaaatacaactccatgaagaaacatcaggaaaatacacaaatacagattcaccacccagcatcctaagaaaaattaggactacaaattaagcaaactgttattaatttcttaagatattttggatctttccaagtccatcaatgagtttccattctcaattgcagactctaatgtaacaacattgcaataaaaaatgggttgacctccctgactacttgttcatttacgtaaaatgaagagctataccctgcacaatttagttggtcaggaaaaagtgcatcatatataatctttcacaagttcattccatgcttctcaaacagacaaaactaaaaatacggcaaagcaaataaactataactacagatgtagccagtaatgaattttatagaacttaggccaaacatattcaacttatgtcttctcttttacaaatggagcacgcacttgcaaaaggacttctcagcatatgattaaaaccatcaattagttgaaaggtaacaattcaaagccatacatttaacaacacagtcaataatttatataaaagtattgagcaaaaagactgcacctagcttggaaccttctaagtgggccaactgtgttggtaatttgatatttcaatttattggttcaggtatgttttccatatggttgttgctaatttcaaaagtgatatgtaactcaagctaaaaagtactataccatgtagtatgcacacattaatactaccatcagacaagttgaataaatgaataggagctcaaaatttagttctagtatttctgatatgagtaataatggtcctaacttctaagctatggatgttcaaagcataaattagtcaaacccgctaaaacagatagagactaatattagaaacaacattcaatatttaggacagtttatcaagcagttaaaggaacattaattgtcacggagcgaataaaaggcattcagaaaaagcaagctactggaaataacatgattttgctacatgtacaacggaaaaggcatgggaagcaattacctttagtataaaaactagtgaatggatgatagattagactcattctttgggaaacactcttaaattcctttgactccagatggatcatggagacaccaatatacgtgcacacaaaagccacattatgttcctcagagaagcccagaagcatcggtgccgttttctgaggccctggttccaaagaaaggagcctgtccagttcaatagttttctccagcacccatccagcgacaccatcagcattggtctcactcttccatacattgagagtataatgtgtgacaacaaggaaaagaagcccgccgttctctgcaggcgcaaatctgcagattgtatccccaaatctgtggtggccattcccatcaggatgcatatcgggtggaacatcgatctgagctgttatctgtttatccaaatcgaactgaaagaagctggtcctctgctcacctaggagcaaacagtaaagggaattcccaaccaaggtagtaaaattgcatatgcaatccccaaaattaactgcggctgagatgacattgccccagatgccggtctccgatgagtaaacacaagcgaacgcgtgtgtccgattcttattagtgcctagtatgacaacctcaaagggactcgaatggcagccgccgtgcacgtggcccgggtcgccgtcgccggcgacgcagcgcacctccccggcgcggacgaccacccccctgtcacggaacccgccgggaatagccacggcgcggcggtcgccggcgacggggtcccacacgatgagcctgcgctgagaatagcggcaggtgttgacgtggacaagggcgcggccgtggcggactcccagcaagtcgttgaggtcgtggcggttgtcgagccgccaggagaagcgcgcggcggggatccggtccggcgggtccagcgcgggggcgaagatggggtaggcgcagacctggatgacgccgaggaggggaggcttgcggtggcgggcgcggaagcggcggaggaagccgcggtcggagacgaggcggcgccagcgggtgcagacgagggaggcgcgggggagggaggatggcagcggcgggaggcggaggaggatctcggagaggaggtcgtcgttgtccagcggcggcgccggcgaggtggggcggtggcggcggcggatcatctccgcgctcgctgtgttgtaattttcgatgcaatctagtcgacgtggggttttttcctcttcatatatatttttttttcagttttcaagtaacgttcgctgcaactttggctgaattttcgggggcagtttttctttgatttaccacacttaatgcttgtaaaatcacgtttcacaaaccaaaaatttattaggagttattcaatccaccgtaaaatgtgattttaggtgtttttaattattctttcaattatttacaggggtttgaggatagaaaaaaggtgtgcaccatctgggttgcacagagaaaacattcattattagaaagaaacgaggatattttcggtgtgtctgattgctttactattaaatgtgcatgattagaaagagactagaacactttcggcgtgtctgattgcttcactgttaaatatgcatgattagaaagagacaaggacactttcggtacgtctgattgcttccctgttaaatgtgtatgattagaaagagacgaagacactttcggcgtgtctgatcgcttcatggttaaactagccatgtaagccacgcgttgcatggctcttttaagacccgttcgaaagatatgtaaaaatatgtatatatgggtgaggccaacagtgccccgttattgagttctcgttgatgggcaaaattttaaaggttcggtaaaaaaaacaaaagatatatatttatgacaaaagagagtgcattattatatgataaataaatactaacgtgtttctctatctattctaaaatatatatggcattcttattttgaggaaaatcaaaacttaaaaatttgactaatgaatggactaaaagtttaggagtatatgattagtgctatgtatgtcgatttttatttgatttttatatcactatatgataagggagtgccgtcaggtttctatttaaatctttttatgtaacgttgatttcgtagttatcgataataaacgaaagaaattagtagtagttaaagtataatgttaaaatttccctaaaaaaagtataatgttaaaagattgtgtaaaaaggtaacactgtatctaagtacattttagaataaagggagtaattagtacatatgcatataagtacttaactaaattatttatttaaaagaatacttgctacactatttacatatgcatattaaaacacacatcctgcctatagcctttttctctgcatttaacagggtcacatatgtacaggacatgctgatgatggatgcactacgggctgtttgaggttttatcaatttttgtcatgccaaattttggcaagctaaaattgtgtttgaatcgaaatcaaaataacctaagttaactattgaaatggcctttttttaaggcatgctaaaatttaatttcaaaccaaataaacactaaatattattgaaattataaaaattggtaagattaatttagatctcaaaccaatctagccctagacgttttcctacagtcaaaaaaaatttaaccgtccagtcctcatcattatcgtccctactcatttattcattgtttcccttttgcatctgactctgggttctgggatacacagaccaaccacgactccacgagtaggaccgcatcttgtccccttcgtctctgctataggtagcctgtagctcgacctttgctgccgtggatttgcactgaaaaggaggagaatgtctgaaggatgaggctggcttcactgaggagtgaggagtgatctcctcaacctagccccctttcgtcgatcttttctaaagatgagttttcggcggccagcagcatggtagcgcatcgagggcttctatcttgtgctgcctgcactgacttggtcccaatagggagatggtgagttggtgtggtgaagatcaaggaagcgttgcgttttttttcgtcagttttctcaattctcttctgctagttgcctagttctcctattgaagaactgtactacgtatctacgtaacttacgtgtggaatttgacaaaaactctagatccttccgttcag

SEQ ID NO: 23222 - DNA, 592 bp, Oryza sativa
tctttcagaagaagttcttgtatatcccgtgaaacagttttctcaaccaaaataacattaggactacatatttccatcattttactaatagccctctccagatggtctttttcctaccatagagacgcaaaaaggaaactattaaccttcaagccaacaaaaatgggatttaatttaatatctgcatgcatgtatatgtagtggcaaacctgcccattgaattgaatgatgacaaaccaacatcagaatgcccaaggactcctttgagaagcagcagtctaggattgtggcaactggtcggcatgtgcttgtgagcagcatttttcttgaagactaaccccttgatcacctcactgcaatcaacattgcaaaatgaaggggggggggggggtataatttgaaacataaaaaaaaattcaatgttttcaaagaattttcttcagtaaggaacaaattatgtttcacctttgccgacgagtaccagatgctatgcacttgaccttgatgtaagatccagggtccatttcctttcccttgctagcatctggtttgatcagtagtgcagcttcccacgatagggaggtaaggatat

SEQ ID NO: 23223 - DNA, 10886 bp, Oryza sativa
ttcttccttcactccgaaggtggtgaactccaaaccactcacaaacggtgccgggcctcctccacaatctcctcggagaggtcaccgggcaacacctccacaagccgtctaggaggcggcaacctccaagagtaacaagtctaggatgcttgccgaggatgatcaagtgccacactagctataacaatgaagcaatgcacttggattggcttaactcactctctaacacctcactagataaactaagtgcacaagggtgtgagagctcttgcaaggggggttcaagataatgcaatggagtgccaaaaccttacccttgctgctggggagtgggtatatatacccccaaccaccaaaactagccgttggaaccgaaatccccaactttgtgctctgccggtcagaccgccgttgtgaggccggtcagaccggactactttgtaacggctagaaaactagccgttacagggcaatcattgagcccactcaacctggccggtctgaccgcagtgtagtggccggtcagaccgtccacggctcggtcagaccgccgtcggctcggtctgaccggttgcggctctggcagctctgtatcgccaccaaaaaccagaccagtgcaacaaaccagtggggccggtcagaccggccttaccacgccggtcagaccggctaacagacccggtcagaccggcctaatgcccacggtcagaccgcaggtcacttttcagctcaaccgaccgttagtaaaacggcgatatctcttgactcgggtctcggaatttggcgttcttggactctatggaaagcttattcaaagggccatccaacccatgaaaaatccatccaagaaacacaacttaagtcaaggataaagggctcacactccaaaggatatccaccggacatacccacaagatgtcactcactcctattggacatgcccacttctctcttggtttaggacttgagaaaactcatcacacttggttagacaagcccacaaaatgcacctacatgcatatgaactaatatggcacaagatcatccacaagctcgcttcatagacccctcttgatagtacgacgtctatctagcaaatccggtctacaccaaacaccaagaccgggaaaagactaagaaaacattcttagctacattatacctttgccttgcgccatccatcttggggtcaagcttgagccgagatcaacacttgtgaccatccggttgaaccatgtttatgctgaggtcttgtccatcctttgtcaagactttattctcatcacaagcttgacttcattcttgttaacatgacgatgtccttggcttgatgaccactaacccatggtgtcattcattagcctcatcatagtgggacctattccttttcacacctcaaaggagaacattagtctcaacaaatcggttgtcatccttcacttgaagaccaaccggttgcatatgaaagatatggatatgtttgttgagtattcattaacttcacaagtgtcatatactcgtatgcaagctcaagtgcaaagatccgatataaataataggtgaacaacatggatctagaacatgcacaataaatgtataggatttgctccccctaaatatatgcatacaaataaatatacaagagatgcaagtgtatgcataattagagaatgaccaatgggggtttatcctatacatatagagaaggcatatgtagtaatgatgtagaccaacataaaacttataccttcatgatctccatgttctcaatgtaaatgagactaaataagataacattcgagtaaacattagtctcacacttatatatcaataacatggaaatcatatatatgaacctatcaaaaagtaggagataagaagtggtacatatcgttttatctccatgcatttcatccttgtcatgattaaggtccatcacaaaagaatgcatgtcttccacatctcattatcgggaaataacctagtagacaacttatgcaaaagagaggttaatcccataaacatcggtttatcatctatcaccaaagtaacaattacacaaattgtttaatccaagatctttcaatcttttctctctttggtgatggataataacccgatataaacaatacagagagatgagatgaaaaatgatttcaaatcaagatagaaatcttataataaacaaaatatagaataagctccccctcaagatgtgcatacatatggatatgaaggaacacatatgcacataatcaataaagatcaaataggaagctcacactatattttggatccacaagagagaccaagttagaatatgtgaagtttaatacatacctctcatcatttttacttccatatccaaatgagactagtcaaagaaaggctcataaaaacgttagtctcatataattagatttgtcattaatcaccgaaaccaaattaaggcacttgaacttatagccggtttaggcatagttggttcttaaccagtagtatctccaggtagagctgggacttgggccctgctttctcgggccggtccaaggcacaatggcctagcacgagggaaagcacggcccagcacgacacggcaatgggccgggctagcacggcccgtagttgggccatgcttgggctagcccagcacgaaaaaggctcgtaggcccgaaggccggcccagcacgaaaaaggcccaaaggctggcccgagctctagcctagccgagcgcgcgaggagttaggagtgcgtgcaattcgggccggccgggaggagatcaggaggcaggagcgccgagccgccgagcgcgtgcgtgcgtggtgagacttcagtgatgcgttcagtaactgatgaggtcagccggcggctgcgctgaatactgatcagtaacttatgagcagtgctttcagtctttcagaattcagagagccgtgcatgcatggaaagcatgatttttttggctaattaattctgggatcacttaccattggcgattagtatcgtgtatatccactgtctagtcaattaaatttttgtttgtgttttttcaactttttaaatggctaattacctgtgtccttgtttactgcaatggtgcatgcatggaattatggaaagcatgttcatttgcgtggaagttcagagttcagacgcatcgaacggtcgaggtgtcgactgatgactgatcattggtcgatcagtattcagcacggaggagtcgtttagtcacgtgtcatgggctcatggcacggcatggccattggtcgatctgtcatcagtcaaggcgtcgagccgccgaggagtcgttcagagttcagacgcatcgccggctgataaccgaggaggcaagggagaggtgaagagcctggcgcccagccctagcataccctatataaaccatacccattttttttgatttcaacacacttcttcttctttcaacacatctccccaccgtatctatttttcatagaaaatatgcggaggtccaaaaagcgtcaacacgagtcaacaaccggtccatcccagaggtcggtcgatgcccgacagctatccctgggcatcgatgactacgggatgcatgatcgccacatggatggtctggagggcgacgacgatgatcagccatctcctagcgaggccaacttctccttcgacaccaacgccatgacgttgcccacaccaaattccaataaccagccatctgccagaagagcggagtgttggcagcacttcgaagtattcaccgagatggttgacggtaaaagtatacctcgtgctcaatgcaaatattgcgacaaaattttgtctgcagctacttcttcagggacaggccatctcaaccggcattacttggcgcatctcaagaacaaggcaccggcaggagcaagacagacacaattgtccttcggctctgacggttctgtaagtacatggatctatgatccaaaaatagctagagaagagattgctaagtttattattgctgaggatctaccaattagaatgggggaaagcaaacattttgagagaatgatccaaaaagctttttgcccacagtacaaaaaggtttctaggaaaaccaccaagaacgatattacagctatatatcattctaagttgagtgtgttgaagcaaactttcagtactactagtttttcatttgctgtgacatcggatatctggacatcccaacaccaaagaacatcttaccttagtgttgttcttcattatcttgacaacaatcggtcattaaataagagagtcatagggttccaactcatgacgtcacacacgggagatgccatagccacgacaatcctagaggtattgagagaattcaatttacaatctagggttgtttctattactcttgacaatgcatcagcaaacacaacggccatatcgattttggagtcggatctgcgaagttatgttggaggcttcgttattcatcagagattcatttgtcacatcatcaatctcatcgttcaaccaggtagtaatgttattaataatttattgattttagtgtatgcggcatattgcttatttattttaatgtatgcgacctatttgttttgcaggcataattgttccggataaattgttaaacaaaattcgtcattctgttcgtatcataggaggtaacacagtggtcaaagcgaggttccaggactactgtaaagcgaagaagaaacctggacggatgtttggcattgatgtcaaacataggtggaacaaaacatacctattgctgcgacagttaaaagggtaggaggagttaatttctgttttcatcaattagatgcatgtcagaatgaaggatacaactagacaattatccgagagtctgtccccctccccctcccccccccccgcatcgcccacgcgcaggcgacacggggggcaaaccctaccgccgccaccgccgctcccctctccccctccctctacctcaccaccgccggagctcaccgccggcaaagccgactggcaagctaggatggcggcggcagggcctcttccgcggcggcgccccctctctacgtgggggagttggcgttcgctggtgtcaaggagtgcagtcagggaggcctcccggttaggcagcggcagatccggcaccgctgtcatcggatctgggaaagctctggtggcagcatcgtggggtggcgcgatgcagcggtggccgctgcggcccgtggcggctcacggggcagcacgatgggtggtgaggcggcggtgttcacgcgtgtggtcagttgccggcgctcgcggtgccgttgcagcggctgccagctccggtggtcggcggcgcgtcggggtgaggcggcgtggctattgcagcgtgagggcttgtgcggcggcggtgttgcttgcatgtgggtggtggccggcatgtgggcggcagaggccgtctcttgtggggctgcggcggcagctggctcttgcggtcgcggcacatcgggtcatactggggggtgtgctagcgtctccggccacccccattcccctgaaaccaccctcttctctccttccttccctcctatctctcttcctctcgctgctgtctctcggcactagcagttgggggaggcatgcgtctccctttccttcctccttctttctctcttctctatttgccgcctcttggcacaagctattggggaggccgcccccctcctcttagttgtctaggagccttgctgatcaccccagtgcccctctctctgtgctggtggtgaagttggaggtggttgctgcagtcgaaaggttcatcccgcgaagcctggagctcctcaccggttacatggttgacaccgatgcccatttgccctgcttccagctctcagttcttccccaggcctgcctgcctcctttcctccttgttgctcctcccttcttttggtagtctgcttccagatccggccgtggagtctctcagtggttgaggagtttgtttgtccgtggggttggtccagtctgactgtaatcagggcttttgggcctcgccggtgcttcttgtgccctgtgaccgtgtgaacctgctgtatttccgagtttggaccggagtgcttacctctagggtgcgagagttcttgtgttaaggcggagtcggagctgctgcatcgggtcagctgatgagctgggcaacgataacactcaacactcttactttggcttcttggaggtcctgcaccttttgtgagagtgttgggtgtaagccttgcctggtctttcaggatcagcaacatcgactcctacgggtgccattccctccttggaggtgtttccttgtggactctctcccacctttgggtgaaaacccagtccaacttttgggcgggcgtcaacaatggctttggtcgttgttcacctccttggaggcttcgccttaaaggtcatgctcttccctcggtctctttagtggttcgtagttttgttacaggcttttttgtgtcttctgtgtaagggtttgccagtttccccttagcaaaccatgcagttgtaaggcccggttttccttataaacagggtcaactctcttcttctaatatatccggtagatctcctaccgtctactgtttcaaaaatatgaatgaaggataccgatgacaacggcgatggtgagattgtgattctcaccaatcatgagtgggagatcgctacacgtgtgcataaatttctgaagcccttttataatgctatagctcaattatcaggaatttactatcctacatcttgtttggtgcttgagtggatttggaagctggcacttgtttttgatgaaaaccgttctgatcgtattgtcttccattgttaaacccatggaagaaaaatttctcaaatacttcaccgctatacctcacctttattgctttgctttgatacttgatcctcgcaaaagttggaaaccgccaaggttgccatgaactcaataggtgatgcagtggggcttgattattctgaagcttttcaacatgtcaatgatgagctctatagggttttccgtctataccgaaccaagcttggtggtactccccgagttcctgagcagacctcacaaaagaaagcaagcaagtcaagtgcagtaaatttgtggatgcagtatataggcaacgaccaagcctctccatcctcagagaacaaatcaacatggaacccggattcagagcttaaccactacctcgccaccaatcatactgagcatgatccgacgcttgatggccacgatgtcgatctccttgggtggtggaaagagaaagagcgaactcttcctgtgttagctcactttgctcgagatattcttctggttccagcctcctccgtctcttccgagcaagcattcaacgttactggaagaattattgaagaacaatggtcatgcctgacacccgagacggttaagtcaatattttgtcttaaagactggatggaagcagacgaactaacgcaacactgtctacatgatcaagagtttgccgatgcaatggaagacgcattggcggaaatttgccttaccaaagatgatggtggtgttgatctggagtaattgatggtataatgtaaaatagttgttgtactcttttttccttacggggaaccctactttagggcgtaaggtttttaacgaggcaacaactatatattcaaattattaacatatatattttcccccaattttattgtctcaagttatttacgatattatgtcaattctaattgtgttcattaagccatgtacattattatctcattgttttttcatttcccctctcttattttttccctcccttatttcagtttcctctctcatttaccctgatttttcccctgttattatttcatttatcaatcagcatcgggcaaagcacatggtcagaggcaaaaaccctaggcacccggggcgtcgggagtcggtcctcggcggcagcggctctcagcgtcggcagccctcggtgcgggccgcacggcgtggcgacagcggctatgcgcggctgcgcgatgtcggtcctcggcggcggcggcggctctcggcgtaggaagccctcggcgcgggccgcgcggcgcgacgacagcggctatgtgcggccgcacgacgtcggtcctttgcggcggctctcggcgtcggcggctggcacgggcagcgccgcagggagcaggcggcggcggcggcgggtcggcgcggccgcgcgggccccggcgaaaaccctaggcacgacacgactcctcaggtaattctgggccgtgcttgggccggcacggctcgaagaggcccgacatgtctttgggccgtgcttgggccttgtcttctccacctcggcctagcatggcccggcacgattagcaggccgtgctgggccagcacggcccattctagcacgaagcacgatgggtcgggccgggccgtgctagcccggcacggcccaagtcccagctctatctcaaggtcagcaaatggtgttgtcaagcacagcagggagttctgctcaaagcacgaagacgaagacagtcaccctgtgtacaacaagtacaacccaacaatccatggcccaaaaaaaaaccaagaacaaggtatgtgcaaatctttctcccttgcaaagtttacttgtaatcactacaagttcaacatatgcaaatatatttgactgcaggcaccaatggagacccaggagctggtcagggttaaatgccaaggctaaagtttctatagaacatggtggttcagctagagttgatatgcaagccatagttccccattcctagagctctacaacttcatatgtgagactcacatttggcaaagcatctgtttgtgtctcaactcaagaacctacacaaaccaagaaaaagaagaaatctggtggggcacttcttcttctgcccccatgggaaactaacaagctctgaatatggcacgtttactactgttagagtaatggaagtacttgttttatgatgtaatggcaagcaaattagcccagtatttcagctttcttcgtagtgaggccagactatttgggttaatattccaactatgtgtgatgtaatgtcagacctattagcctagaacttctgctatgtttgttgtgatgccagacaatttggctaactatgccacctatctgagatgtaatgtcagacaatttcagttgcttttgtatgaatgatggagaaaaatatttcagttccattatgcaatatcatccaatctttctgcttgtttgcaaataccaaaagtgccttgtttgcaactagctgaaacatatgccattgtcatgttcaaaaattgaacatttggtgtattatttaggtttgctgcacaaattgcacatataaaccattcattcacaacattcattccaaatggttaccacaactcaggatacatatagttcatgaaaaacatgttgtttccaatgcataccaaacacacgatcttgttcacaaattatagaccacacatcaaataatctcagttcttcccaaacaacaacacaaacaccacaaacagacatgacaaaacacaaattacaagcacatttctctcattatctagcttttggttcctggccttcaaacttctaatttcttctttgttcagagcaaccacactccttacatcatctaccgctttcctctgttcttccccctatgccctactctgttgaacctccttccacagcacttcgttttccctcctcaacgaagtcacagcgtctcgcaagtcacccgaacctagaaatcaccccccccccccccaaagcaacaagaaaccctacattcaaccccgaagaacaccgactgcgtatatgcaacttcatctcaaaatcagccaaaatccatcatttactcgaccgttttgacacttataataccaccgcgcagggttgtcgatgctctacaagatccaccctcaccgccttggctgggcaacgacatcgacacattaccgcaggttggtaatccagaggaccaacccgacaaggcacgggagaggccttcgactgacagggaagaggctacccaatctcacatcatcaacacggtacaactgcagctaatccgtgggagaggtaagaaacatgttccttgatatggtcaatagcacaatagcttagccaagctgtaatcctaatgacaaagcttataggaattcttcaacaagacgaaacctgcacttaagatgccattctggtaaacaagtgcaaacacaattaaatatcagaaattgcaccgtggcacagagggtgaaatagggtcctaggccccaaatcaaagctacaatggcatacaagtaatcatgtaaccaacaatgtagtaacacttcaattaagcaatgcaaggtaggttgtccaatcaatcctaaacccataattaagtaacaaaatcaatgccaaaaatatatggaaactcactgtattgttatggtgaatctcctcagggagtgaagtctgaagagatgggcagcagtcatgtaagtatagtgaaaccaataaatgatcattgtcagaacagtggcacaaaaaatactactatgtgcaagtaacagtgaagtatgtgagagagaactgaacgcactccagcatatatgtatacaattgtgaagctagcagatatacaaaaccaggctccaaacagggagattcttgttagaatgtccatttgagagaaaattagcaggattaagaaaacatagcttgtgaagagcattgatgccattggcagctttctagaaattatatccacaatcatggccgacaaaaatgatcctggcctctgtacttgaagaaagcagggcagcatttgttataaaaatgagaatcaaatgcagttatgcatcagaataattagtaacaaatggcaaaaaccgacctgct

SEQ ID NO: 23224 - DNA, 3392 bp, Oryza sativa
agaaattaatgtaccctttaatataaaaaagaaatatactataggtatctaattaagactgcgttcgttcttgagctgaacatctgagatggaaattggagcaagcaattaacatatgattaattaattaattattactataaatttgaaaaataaatttatttgatttttagtaacttttatatgattcttttatgaaatatattgtttagcagttcgggaattatgctaattaagaatgagatattaccttaagcctagatgccggaacaaaaacaacctaagtgtgtgttaaaggcgtgcacttatatggatgcgcatgctaataatagtgcacacacatattttccatgtaataaaattaggattcacccaaaaaaacacattatattcgcagcctgcgctaacctgcagggagccatatataaaatttcgttttttttttatcaaaagtgggcaatctgtaagaaatcgttagctcagcctatcgtgggctgaagtactaacagagagtaacaggctactgggctcatccccttgtccttaaccaagtttctaccggttctctcgcccaaaagacaatatcaacgcgcctcagctttgtccaatcatactcactagtcgccatatacagatgaaaaaaaaatgttccaaatattggtcgatgagaaatcgcgacatatcattatcgtttccgtcaagaacaagaactccgcatatacaaatggagtaatggaaacaggttgaatcgaatgatcgccgactcgctacagaacattactagcaatgattccccagattaagcggacggtctgagcaagtaaggtcgatgaatccgtcttcctcctccgattgtgaagatttgcgaggagtacacttgcatgaatacattctcggattaaaggatgaaccgcagtcgtagcaaaacacagtgccacatctgcaaacaaaatttatcacatgaatgtaagaaatttcatgccgacttaggaagcaccagtgatgtggtggtaaagtcgtgggtgtatgactctacccaccagagttcaaattaatgctggtgctcacaaatattacgcatatatatgtgaactttctaaaaaactttagtgagatcatgtatgtgctcctggtttctatttcttagagcatgtgttaggagacgtattcgcggagatgtgagtgttgtgttgcgtgtgtagtgttgtgtgtgcgtgtaagtttgccgtgtaatcgtaaaaaaatcaaagcataattccataactacgggtctacggctctatttgaatagctgaaagtggtttgatggatcatttattttttttctacagttatttcaaagcataaacaaatgaattataactactgcaaaattgaaagtagctttataaaagcattcaagatgtcacaccccaatccggcaccgccgtacaacagcacctgacaggagcgtgtcgtaggaaaaacggcgtgaaccgcttcctacgaaaccgcgatctcagtaccagtcccaggacatagcgctggtacccacggtgacaaatatgaatcattgcaatccttataataaatagaggacttatttaccttaacttaggttgcattttagaacagcccgagaatgcaaccgacgacacgaacgaggaaacaccaacagcagcagcagcagcggaaccaacggactaacacccaacaccacaggcgacggctgggaactaggacgaaaccctattcttcatttcacttcatcttcatttcaaggtgtaggaactatatatatatttatatagagcaagggtgagtactttcgtactcagcaagtcacgagaatttaggtgtttgatgcaagcttggaagagaggcaaggttgttttgcaaatcctttgttttgaaatcattttgaaattactaagtggtttacttctttctaagtttgggccgaaaagagacttgtgtcttgattcgactttaagagatgtttttcaataactcaattggtaatgtaccgacccccgggtcagatcattacttctcggctcccagagccatttcacttgattaagcggctcccagagccttttcattttctcggactcccagagtccaactgcccagcagcacaacaatccgcttcaactcgggaagcctagtctatgatgcccgtagacatcccgaatcacacagattcgtttcttgaccactcaggtcatccatctgccacataggctgattctggtaacgattcccaaaccacaacaacttttcacaaagcacaggcaaacaaatctacgctacaggaaacacctcacatccgcccatgaccgtgggtacggctgttcgaacagttagttaacctctgcagagggggtacactttacccacacgacattactaacccggatcacccagtccgtgagatcagccatgtcgggagaccctaaggttttcatgacaaggcatttcgaaagccgacacagggttgccatatgccaacgagaggggtcccagaccgacaacaggttaggtcccagaccatattgtgccaggaagcccgagggttctacctgacaccagcccgttgaatccacatgtctcatggcatcatggctcctccgattagctaattactcagccaggggcgtcccattgcacccgtgtggtcgcacttattatatgctcggatgaatttcccacaggaatcggtccttatatgcgaatacaggacagtaccacataggcacaacccccgcatcgcgagttttcacaatctattttgttttcaaacacaccgatgccatatgtcgggttttcaaggctctcaaacacaccgatacaaacaatggtgtatgtggaatagttggtatatgtgctcagagagcacggataccgaagtaccacaaaggtggaacgacaaggaatcagggtagtacaacctacaaaaattagtgcgactactgggtaggtctgtcggtttggcacgcaaaccgaggccaagcaagttaagtgtgtgattctactaatgcaagttgcaaacaaaataataatgattttccaattataggagcaattggtcaaagggtgatttgtcttgctcaaggtcttcacgaagcttcacgtatcttcgagaaaacccacgatcgatgaaaatccggtgaccgcaactatacgcaaacaatcaaaaacctaaacaaaagaccaagaaaaaatatcctatttagactaaataatagtaccattagatagatcacaattttacagaattactggaagtggaacggggtcaatcggatgagcggttgagaagatatggattttcgaagtttattggattttctaatcaaaggaaaaacgatttaataatttattaaaccctttttggaaagaaattaaag

SEQ ID NO: 23225 - DNA, 41387 bp, Oryza sativa
ggtaggagtggcgcacggattggtgcaccgggtggaccgaaggatggcaggcccacgcgcagccgttaggctctccgtggaccgcgcgcactgagagagagaggagggagcggacccgccttgactcggtcttcaccgaggtggcgctgacgtggcgcctccgtggcatgccacgcaggccggcgagaggaggaagaaagaggccggccgagatggacggcgggcggcgggggtctcaccggagcatggcgcgacggtcttcggccaagggggagcacaccggagtgaagaggggcacgagaggaggcgagccagtggctcggattcgccggaggaagatcgacgacggcggattgcggcgacgcacgccggcggtgagaaaaaagggggaaacggcggaggggcgacaaggattcaactcaaggtggtgggagtatctctgggagtcggggattctgtttccggcgccggatagggtggaggagcaccgaggagggctagcgtcgacggcggcctctaggagctgacggtaatggcggcgaggccatgccaggcgacggcattgctatggaatggtttggggaggccctagggagttcaaggacggtgttggctagggtggtcgacgagctggggcccgacgacggcgcgcgactgtgtgccgcggctgaaaaagcgcaacggcgaggcgcgcggcgcattgtgcggcaggaggaggaatacggtggggagctcaccggtgagggaggagcggtgttggcgacgcggagggagtcgcggcgaggtggtcgcgacggcggggcggcgcggaaccgagagggcgcggccgagaaaaggagggaggcagcgaggccgaaaggatgatgagtgtgtgcacacgctcttggccacggcagtgcggcaccgagcttgacgaggccgacgccgaggctcacgcggccattggcacaacgcggcagcgaggaggcagtcgcggaggggcgggggcgagcagctggcggccggcaacaatggcgcgggtggttcgagcgaggtgaagacgaaacgagaggggagggcgcgggctttataggcgaggaggagaggtcggtttggaggagggaaaccgacattggcggtcaagggagctcggttggtgttcacgggcggcagcggcggtttcgttggcagtgcgaaagcggcgacggtgtggatgtgttgggcggcgaaggcggtggatcgagcggcggaaattgaaccgcgagcgcgggctggcgcggcttggcgtggtcaaagtgggggcggcgaactggcgcgcggcgtcagcggcgttctgcctccgcgcgcaatggcatgggcgtgagagagaggtcgagtctgagagggaaaaaggggaaaagagggagaaaaaggggaggcttgtccatgccgttctgggaggaagagtgagaggggagcgcgagcgctggctcccgtctttggagggtagcggcaatgggcatcgggagagaggagagagaacgagagagagaaaagagagctctctctctctcggccatggcgcacgcgcgagcggcgctcgagggaaggggagagcggctgggagagggaagtgggctgaggggaaaatggcccacaacacccgagggaggcaaaataaacttctgcatagagatttgagttgggaggatattgggattggaatttggattggagagaatttgagaaggattttggaatttaaccttgatacttggcctctaggaacataaggtggagtcaagggaaggattcgaggtgggatttgaataattttggattcgaagaagtatttggcgaggattcaaggaaggatttgaatttcgaagacttgaattggaatagaaatcttgaggtggacgattttgatggcgatgagagggaacaaggacggatttgaattgagatccatggcacgacttagactcgcacataaagaaaagaaatttttgcaatcaggattttgccgaattagtttttaacgtcttgctaaaagcgcggcgttacaatattttagtaagaaaacttttacacaaaatgcattggttagcagtttgagaaacaagcaaatatttctttaaaaaagattttattttctccataaataatggtcagttaccgctaagatatttctctcccttttcagcgtccacttcgcgagggaagttcagtacgtgttcggtcaagtcaacaacggttagtcaaaactaacgaatggaatacgtgtttcagatgagtggcgaaaatttcgccccgatttcgaagtttggaagcaaagtttagagatttgagtctagcgatcgaaattaaagattgaatcgaagaggaggatcggagtagtggtgaatcgatgagtttacctgcatgtcatgcgcttgcacccatcgatcttgtcgatcatggcgcggcagctggggcagcgccgccactcgcgccccttggcgagctgggtcagcgcgcaccgtgcgccgccgtcgccgccgccgccgccgccatggcggtcgtcccacggctcctcgcactgcaggcagaacgcgcgggaacaggtcgggcaggacgccttggacgccgcggcgcgcaggggcagggccgcggccgccgcctcgccctcgagcgccgccatctcgccgcagtcgcggtaggggcaccgcgcgcgcgcggggccgacggcgcgctcgcagagcgcgacgcaccaccggtcgaacacgtcgatgtcgagcagcttcttgcagcgctccgggtgcatgacgccgccgccggagcagccgcccccgcccgccaggaggcacggcacgggcacgctccccgccgcgacgcgggcctcgatgtggccgacgacgcaggcgacgcagaacgcgtgggggcagccgtcggagacgcggaaccggtcgaacaccagcttccactccatgcagacctcgcagtagaaccgcccgatctcgtcgtcggtgagcggccgcacgcggcccgcgcgggacgacgacgacgacggcgggtccagcatggagccccggatcagctcctgcaggtactgctcccggtcgagctcctgcgccgccgacgccgacgccgacgccgcggcgctcgccatgggagggggacgacgcgtacttggcgctaattcttcggcgagaaggaactaggaagtggatggagtggacttgggctagtgcgggtcgtcgtcgtcgttggtcgcgatccctttagcctttaggtgggtgtgtgcgctttttaaagttgggcaggtacagggtacgattggaacggttagagatgagctagatacacaacaatattatgcttaaaggcacaatatttgctaacattacgtatcatgctgtgagtatatttaggatatttaggttgtctataacttccatatacttaaatcaatcaagtgagatcattatttgtaagagttttgtaaaaaaaagtacgtgtagcaggactcttttttttaattattattattattatgcatgtgcacacactactatactcgtaatcccatacttacgcacccaccaattctcgatatcttggcaaattcattacaatccgcatcaaccataatgctaaatttcaacaaatcgtgaagaaaacaacaaattttggttgtgatcgtgatgaaagtcttgaattttctttgtaatagtttcctcagttaaagttatgatagtagtcataacccatgctttactcaattactgaggaatgactcgggcagtgacccatgccacggtgccactccactttcctccctcccacctcctcgccaccatcagagccatccgtcggaaatcttgcggtgacaaggatgttagtggtgtggggccttttctcccatgagctcccagaggttgcgagcacaaggtgatagatttggaggatggatctggccatgatagtgactgtgatggcggcaacgcggttgaagcgacgacaactatgaccaatggtgttgaagacagttccagtagtggatctagcgctggtgatgctagatccagtagcttcgaggctagatctacgtgaccaacgcgtggtagaggaatgctcgcaaggcatagcaatggcgacactgggcaatggtgagaccgcctgcgtggaggtacggggatgggtgtgagcagttgctgtggcaaccccctcgtgccgacaggatgcggtattggtagcagacacggcgataggaggaaggtgggggttgaccacctttgtgtagaggtgttggcgacaactctcctcttctcgtgcttggtagtcggcgacgggatggcgtctgtgtcgttggctactgcgcagatgagagaccacctgtaaacatagttatacttagctagaatcaacttcaaatacacatgccatatatccggtgtgcactagttaagttatatataggaaagccactatgcatgtgacatgggtttttttttggtaagtgaacaaaatttaaaattttcactactatttgcatatttgcattgcatttgaggtgtaactgtgcagaggaataatattaccaccccttttatttgaatggcttttattggaggataagatgcagttctccttttagaaaatctgcacagtgctttaatctgtatattgcatttattcatggttagatgctaaaaacatgatacttttatgtacagagaagacaagtgtcctcatgtatagtgatccatgtgttcggtgctcatgggtcaccatccactaattaatctttcggtccgcacaaattactacttcctccgtttcatattataagactttctaacgttactcacattcatatatatgttaatgaatctagacatatatgtgtgcctagatttataaacatatatatgaatatgggcaatgttagaaagtcttataacctgaaacggagagagtactactagtctctccatttcaaaataaatgatatgcccatattattagtagagattaagatgtaagaagaaaataatatagcgtttcttattaaatatgatgtactaattgttggtgaaagggtggttaaagataatataatgataaatttaataacaagtaattgatgggaccaatactacttaaaatagcactatttttttaaaaaaattaaatcctaaataaacaccaattttggggctgaaagagtagacacagcatagaaaagaaaacgaacttttcaattgctaatcaatggttgaaccgaaggggaatttttttttaaaaaagttgtccgatctgtttcgttgcaacatccagaatttatcagctactaaagactaaagagtaaccaacattgttggtttcttatcgtaactcatcctaacttattgattaaatatggagaacacacattttttaaataaaaactactaacactatcagcctacacacaaacccctataacacattttttttccaagggactcctaaaatgttgagaacatatatactcccaccattctcttttatgtgacctccaactccaaactaaaaaaacataggtataaatcagcagctaagatagataaagcacacacacataacagaatccaacacatctaataaatgtctcaattcaaagatgatacaatccgaaaccatccaaccatctatgtctttctttccaacttttcccagcaacccgctggaagcgaaaagaagcaaattgcacagatccacacatcattcaaccacgatcgatgaattaaaccgctaagaaatccaggtaaattcgattaagtaatctagtcgaccgacggatcaaactttaaattaaggaaatagtttggtttagcgaccagtaaacgcatgcagaatctgctgggggcagcagctaatgttcgacattgtccatgcatgcatcagcctccagcttagctccttcttcctcggcgccggcgacggcgagatcgattctgcaggtgatcagggcaccagaacgacgccgagattgtcgaggcactggcatttctccttcccctccagcaccgctcctatctggagcccacaaaggtagcagaagaccatgcggcaccttcaaaataaaccgcttgttaattaaataaaaaatgtatgatatgtgtgttagccacactaatacacacacaaacatatacacaaatctgaattatgataacgcatatacataaaagtctattgctccatgtaatctggcaaaatcgtattcccattaaatatataaacatacacctctgtaaaaatcttcacagcaagtttttgaattcaatgtgcttccatatcttggttcatattcaaatctacgccattgaacccccactaaagccattgaacgccagtttacttactacaattaccactcaaaagttcatttaacctggagaaacatcctaatgtgtacgctaaaaccatatcaaaccaaaactatcaagtataatgaaacggattgagagttggagggagtaaatatatatacaccactgtacaaagatgtaattatcattaaacacgagttataccaaacttctaccatggtaaaaatgtttcccaagcatttaatggtgcaaacggaaaaacaaaggaaccaaatatggattagacacaaactaaagcatgtcctaccttgcaatgtaacccaatatatgttgttaacactttctccctacgaaaatgttggataacgaatctacagacaagttcaaacatgaaaaaacaaatgtcccccctataaaaagttagaggacgaatctacaaacacattcaaagatgatacaatcagatgctttgttttttaaaaaccagatgagtgatgtgcaccaaaccgtatacgctatatattactccctccgttttaaaatgtttgacaccgttgactttttagcacatgtttgaccgttcgtcttatattaaaaaaaattgtgaaatatgtaaaactatatgtgtacatgaaagtatatttaacaatgaatcaaattatatgaaaaaaataaataattacttaaattttttgaataagacaaatggtcaaatacgtactgaaaagtcaacggtgtcaaacattttgaaacggagggagtaacaaaacttctgccaacaacatactactttaaaaaaagcgccttgacaaccaaagaaaaacttgacgtcgaataattaagaagaataattaaaaccatatatttgtgctctctatgctatctagcacatagtactaaccacgtattttaactccctatgctatcgaacgcatctcaaactatatgtgggagatacattttctccaaattatgtactacattttcctcaaaaaaaattgtgtaactacatttgaaatgctcgtgatggattaaatagagtaatgaagcaaatgcaagaacctatgaaatgctcatgatggatcataataaatagtagaataatgaagcaaatgcaacaacacaagaagtgaaatgaagtagacagggaggtgagcacagtagtgaagtgagttgagtacctgcaactcatgaccctgcagccggctgtcctctcaaccagcatcctgcatttggggcacgccttccaccgccgctcgtcggcgagcttcttcaccatggcggcctcgggccccttggagcagtcccggtggtcggcgtcgtccgccgtgctccactccccgccgcacgtcgcgcacagcaggtgctggcacgccgggcacgccgccatggccggctccgcctcgccgctggtctccagcaggatcccgcaccggcggttggggcagtacgcccgccggtcgtgcggcacggcgccctcggcgagccggagcccccagtcggtgaacgcggcgaagtcgatggccttcttgcacccctccgggtggagcacgccggcgccgccgtcgccgccgtcggcgcactccgggtccgggcacgccaccggcacggccccctccctcaccttgccgtcgatgtaggtggtcatgcactcgaggcagtacttgtggtcgcaggggaggccgcggaagaggtcgagcatcggcaaggtgtcgaagcagatgccgcagtcgaacgtcgggaggtcgccgtcggcgagggggagcaccctcggccgcctcgtcgacgggccggcctcgtcggggtcgaggtcggatgggcggaggccccacttcttgtagaagtttggcatggagaattcaccttcttcttcttcttcttctccggcgatggcggcggcggtggcgcggggtggtggttgcgccacgacgggcgattttgtgaggtattgcaccgggagaggcccatggagctctgggtcctcttgcagctcggcgatcacggcgtcgcggatgacggagtcgtaccagtcgttgtcgtggccgtcttccatgccggcgaagacggccggcgtgtccctgtcggcgagtagggcctgcctcttcgaggaaaccgagtcgttctcgttcgcgacgttgcggtgaacctcttcttcttcttccatgccgccggcggcgcctcctttgccggcggagatggccggggttctgtgttgcccacacttgccggcagagacggcaggggcggcgtggctcccttctcccgtggtggcggtgacggccgccggggtgtcggcggcggcggcggcggcggtgagctggcggtcggcggcggcaatgcgagtccatatccggccgaactgcgcgacgtttgggcgagggtttgcttgcaatgctgccatgaggttttctgccctagcccaacggccattgccggcgccacgggcatggccggtgccgggagcggcacgagccgccatacgggcggcaggacgtctcccgccgtggcggggagcggcggcgccgccagcgatgaggccgccggggcggagtgagagttcagtagacggcgccatggcagcaggtaggccctgtggtaaggtggcggtagagctcgtgccgatgtcggcggtggcggcgccgcccggcggccgcgggaggaaggccgtcgctgatcttgccggtgccggctgctgtctcgtcgccacggtgcggcgcccaccggatcgtaacggaggcggcacgtacagttggacggtccgcgccgccgccgccgccgccggcgcgtcatcatcatcatcgatgacgatgggttgggccctgctcccggcggcgccggcggcgagggaagacgtcgatcctacgcgatccatcggcggcgcgaagctgctccagtcgtcgtcgcccagctccatcagctgcgacacgtacaggtcacgcgcgaacgcctcgtcgacggcgacatcggcggcggcggcggcggcggcgtggtggctgctcgatgctcctcctccagtcgcagcagggtggggttttcctccttccatggcgaattggcgcgatcgatcgacttcgattctctcagagattttctagggtattagggagtcgatcgatcgatcgatcttgaatttcttgacctgcatgagaagaaagaagatgcgaattagggggggatttcttgtttctactcagaaaattaatgtacagatccgaggctgactgtactatctgaatttctatgtgttcagctcataaattgtactattggcgcctatatatatatgctgaataacaggaggtagatcaaagtttattcgggagtagaattgcatatatttccaaaaacacgtgtgcatgcgacttcatcggttaatattgatgaatatatactactcttgctttttgttcaaatattgttgtattttgttctcacttatattaagcaaaatcggcccttgtacaaatggtgtgcacataaataatctgataaaaatgataaacccacaaatacaatgaaatagatcgggatgtggatttagagtggttcctacatattatacacatagttttgcaaatatgtaaatatgcaaatagttgtcttgcgcaagcataaatacggtgaatgcaagtacataatacacatatattgaattgaaagtgtgattaatcagccatggtaagaaatgtcggttaggccaagaattcagtagagaatgatggagcagtggcaatggatctagtctgatctacgatgatgagaaaaaccgagaaaacatgaaggtaacttactagtgactatgaagaactaagggaggaggaagacacagttgccaccggtagacgagccacgccaaaagttgttgagagactagcggtcctcaccggtgtttgtggatggaccgatgggcctcgtcggcaatcacggagaagccgataggcttcaccggtgtttggcggcgataaaggggtagggcggcggatcgggattgggaggcgttagggtttgagggagaaatctataagcttcaatgggagtatatccgattgattgagatccgacagccacgatttatttggtttatgccaaaatctcttggatatatctattagtaccccataaattgtctcttccaacctcctattttaatatctcacccacctacttatttgacttttctcctactcattcactcctattcaacttttgatttctttgaagttaaaaagaaattaaaatctactaaaaaagctatcaacaattttctactcatctacccgtctattttcactcaaacatagaaacctatgcatcttgattcaatagaaagaataattgtttgaacaacgacgatcatttactaagaggttgtgaggaaaagatttagagacaatgaataatgctaggaggtggaagacaagtttccaaagggagaaactagcatgaggtttgtagtagcggtgaaggtcatgtacgccaagattttggtagagaatgatggggggagtggaagttagaagcaacatggaagtaagggcataggaattcacgatggatctaacttgatctacgattatgagaaaaaccgagtcgacgtgaggggaacttaccagtgattatgttgaacgcaagaggaggaagacggttgtcggaggctgtcgagagattggcggccttgccggtggttgcgaagggaccgacgggtcttgccggtggttgtggagagactggcacgcctcgccgatgttggcggagataccgaggcggcgggatgtgggaagacggcggcgggtcgggattggggaggtgttagggtttagggagggaggaatttatatgatcttcgatgggaggagatgcggttgattgagatccgacggccacgatttatttggtataaggaaacttctctagtgtatatccattaatgccccataaatgttctcttccaacctcctattttaattcctcatccacctacttttttaacttatcctactccttcagtcatattcaacttctattttttttatttttttgaaaataaaatcagctaaaaatttatcaacaattgtctactttttcacgaacacagagagcatttgcatgttgattcaataggcagaataattgattaacaactacgatcattggtcaggaggtggtgaggaaaatatttagagataacaattaacgttgggaggacaaagacaagttgccaaagggagaaactagcatgaggtttgtagtggttagcatcacttgctaatgttttggaggaggttagggggcctcagcaagagttggaggtgatgccaattcctaagtgagttggaaagggaaaacggcgggtggatcgctatggttttggcaactgcctctaaactagtagacatcgattaacaccaacataattccctttccaccttgtatgttaatttcttcccaacatacttgtttaacttctcatagtccttcattcttctacaacttctaaaatattcattattctaagaaatcaaaatcaactaagatgcaagctttgcatgtttaccatgtttggctactcttacatctttttattttttacaaacatgcaagctttgcatgtttacctaattcctctatttcacattataagatgttttggatttttaataagttcatatatggatccatgtatgtgcttcatatatgcgtcaaaatttatatgtatattagtgaatctagactaatgatggagaagccaaaatgtcttataatgtggaacggagggagtactatattagtagagcttgaaaaagaggctgcacattagatcttgtaaaaactccgactttaatcgaagacaaaaagaaagatattgaccatccgatcatggtagacctaaattatgatggtgtagatcgattgatatggtcatatagaaaataagattttacctatgaagctaagtgttgtatatgaaaggcttgttcactttgttgccactttcaaccctaccaaatttgacatgactaaattttggtaagacaacaaaccaaacggatccttaccaatgctaccttatcaaactttgttaattctagaagttttcactgttcaaaattctaccaaactttagtatggctttaaactaaacacaaccaatgctaccaaaattttggtagcgtcaaaatgtgtcaaaatatggtattaccaaattttggtaggattgaaagtaacaacaaagtaaacaagcccaaaatccaattattcttttgaaaaccacactccatagaaaattaaaatttatttatggaaacataggctaatgagtgtatatgaaacccaactcttttaaaatcttgctggtgaaatatccactagtacaataaataaaataagtgtcgtggtgccaaccaaaatgtggttagtgagatttctagtgctcccacacgccttttatttcaaatctcctgacaaattctcggaccttgaacctttctagataattttgaaatttggtgaggaaacaacatggaaccccccccctccccacgtgaagttttttgaattgtagagttctttctctgctttagggcagttgttatcccctctctgtattatgagcccaagctacatagtcctacatgccatgcaatctccatccattctatatcctagtttgattgttcgcatcagacaataccttgtggtggttgcaccaatcaaaccaaagacaacaatatttgattattaaaaatgtgtcgcacgatttaggtgctgtgtaactaaattagcaaaaatcgtatggtatggaaccaaaatttccttttgaagtttggctagatgcaaactccttggacctgatggtgttcatgcacgaactaatttctgtttccctagtcgcattgcctatatataacttattataccgtttatcccccatttgtagcacagtctagccagcctactacttatctttttgcctctctcagtagatttatcagcttagcttattaacgtagccaaaattggaatcttagagttagtttaggttttttttttcatagttttctattctttattagccttagcttttggaccactaagaatagaagtataaactttttactgtaaaagtatctttggtagcttcttttctttttctagactttatcacccgtagctcaacaccagatcgacctctacttcttactcctttgcttccatgccgcttctaacttccattgctccatcgctctctaccaaattcttgtcatggtgaccttcgttgacatggctgaccaacccttttattcaatatatgtttgttatgtccttgcattcaccatatttatatttatgattgcacacaacaactatttacatatttgtaaacactacaagtatatgtagaaaccgcatccaaattgtcgatcgaaagaagtcacctcgtagacgatgtgcccgttcatgtaacactgatgagtggagcccatttactatatgatgctcagtgcatattcggaaacatagattttgtaaagttgaacattgtaaaaactacaaattcatgagctttatgataacaatgctagaattatgcttgtttgatatttttcggcatactcaccgccatgggtgtgtgtgggttgagtatttgattatgtgcgcgcgtgtgtctttcacataattataacaaaaaaaaggtgaatttgttgtgcaactttatgtgtattgcacatatattctgttttagaaatttttttacccatcagtacatgcaacatggtgatcatcagtttttcatttgacaatggggacagtacataggaagaattgaatcactacaagaattcgtaattttcttgatggtcaaaaacctccaattataacatgaaaactgccaaggtggttatttattcatcggccgaccgccaaagaaatcagttggccgccaagaaaattatggattcttgtagcgaataaacttcattatttgtgaaatctagttctaaaactaagcatccatgccggattaagttagtcacctgcctgctcttccaagtgatcctccatcttctccatgaaggagaagctcaaaattcatacaaacttttcaaggaaagaataaaggcgactcgatggtatttgcacgagtcttgcgactatggagaaggagaagcccaccaccgcttttcccgcggttttcctttctctttggtgcaatgcaaagttgcaaatggcaacatatatattcgtctcactctgctgattccatggcttcttctatgatctctctctctcactagctatagctagctagccatggattctaccagcagcggcaggagaggtcgtcagagttgcgaggagagctgcaacaatggcgctcactggccgccgcctcagtcggcgagatgtctctgcctctacctcgccctctcggtcgtcttcttcgcgctcgtcgccgccgtgctgctcgtcgtgttcgtcgcgaggctcaagaagccgacgttcttgctgcagtccgtgcagatggacaggtcgttcagcctgatccagtcgtcgctgtcgtcgtcggcgtcggcgaacggcaccggcggcggcggcgcgaacgcgaacgggacggcgtgctcggtggcaacgctggtgttcgcggcgcagaacgccaacggcatcgggatcaggtacggcgcggcggcgctcggcgtcgcgtacgcgaacgagtcggtcggcgccgtgggcgtgccggagttctaccagccgccgcggagcgccaacgtgacggtgcccgtgcacgccgtgttctcgcagcccgacgtgacccggctcgtcgtcggcgagctctcggcgcagcgcaagtacttggagatacggatcgccgggagcatcgatgcgcgcacgcacatcatgaacttcgctctgcccaagattcaggttcaacctctcattatctgcttattagcttatatcagtcatagctaaaacttaaattttaaattttaatgttagatttaatctttttggttttattttcatcgtaatatattttctagcattagcttttgaaacactaatatcacacgtaaaaaagtttattctactgatagttgaaaaaagatcttcagatttcagacttgctctaaatcatttacttgcttgctgtaatttcaggagattggatcactaaatttgcaaactttcaacatgtttttgggtgcagttttcgattgattgcaggataggaactaactacaccgacatagtgcaccgggaagggatcgagtctgtaattacacgcaaggtattcactgaaacttgtattatgatattcttcagaccttcagtctctcaggctattgaccactgattctttctgcaggctctcctcgtatctgaactgcctcacgtttcacagaagtgctccatcaagattgacctgagatcaaggggaaagaggacaagtcttgacgagttaggatgctgatttaatttaagccggagattctttacctgtgtagcacgtacatacggctattttaccttggggaattttttattcgaaacccgacttgtgaaatgtaaatatactaggtttcttcagtagcaactgttgatctgtatattgtgggaaatgatttattgcactagagatagatagatggatagataaaagatcgattgattgtaatttgacacaatatgtcttatactcttaacatttttgcatttgttgctgaaaatgtgagaaatgtacttgagatataaatttacagtcatcacgcatgcatctgcgaatgcatggatcctttcaatacatgcttaagagatacaaagccccctttgctattgatcgatgagacttcataatcctgttcttttcagctagtctattggattatttgctcgatatttctaaaaaaatatatatttttctaagaaaaactttctcctactgttgatgcgaaaaacacacactggcctggaagatttgcttaactccagtgtaggtccaaagaattgcttttggtttctgagcatgccagttggtttgatccttaaaccaacaagaaagaaaagaaacatagttaaatctacaaacgatagccgatcggctgtattgccgatgacatatcgttcaatattgggccgatgtgaagtgaaccagatcagcaataaagaaagaagcaagataaaattaaatctacccgatcggctgtagatatcaatgatatataatctatttctaaaaatatgtttaaactaagtgattgtgatagatcggacagtctgccgagacaatataaatcacttatgtttaaaagtacttcaagattgagattatatatattcatagcatagccgatgaagtaaatcttagatgtatcggctaatactccgacactgctctatcctaagatgttaaaacagacaaaatatactaaacaacgagcttaatatattttaatgcaataagatcttaatataaatggcagatttagcatatcgagtaaacatgtaaggaacaagataactaaaccagataagatcggctgaaaccccgatactatctctatcgataatcataaaacaagctagatattatggttctagatgttacttaatagatcgaacatgactgatgcagcattaagtacaaagagaaacataagatctaaacaagtcgatgaaaacctctttgagatggtagatatactatataatctagatcaacattgatgtttaaccctatcggctaccctctgatgatagatgctagcctatttaaggttagataacgatattgaaaaagattatataacatatatgataactcgacgatttacataaacaagattagagtatcataaagatgtaagcactaatcccgagaacacaagccaccatgacaagttttacctcttgctggagatcgaactcgttgcaacccaacttgaaagcaagaactcgtcgaaaacaatgaaagtagaaaaggtggcgattgaactgtcgttaatttgtttacaaggtcttgggtcatatttatacccaaaatatataatatgtccttgccggacacgactcccaatctgttacaactctaagatataaaagtcttttaggtagaatcttaccgaaaatatctctaaaaaaactaccagaaaatcctaattaatagatacaattgccttcttaggactcaatccatatgtggcaatacttgtgcagcacatcaatcgatcccgaagatgattctagaaccaccttactagatcggctacattggttgttctttgtccggtccaatatcagccgatgcagacattaaccgatgctctcgtagccgatacgcactctgtttctgggaacgatctcccgccaaatccgcttcgactttagcttcgaatttgatgcatgatttaccaaatttggtcgtcaacacctactatattgcttaaatcctttgttctaaactattatttcacaatatttgatttaaatttataatcgtgtagaaaatcaaatacaataatccggtagataatctattttaaactagagtggtacaaacgcaagcgctcataatgttatcttgagattgacgaagtcaccacgaagtcacgaacgtcttgttgtatgtcacctaccactgaatacaattaaccataaatgtgagtatccgcgtcgagtctaggacttaaattcagatggattagttctatcataaggaatctaaccagtagagttacactcacacagttgagttacactcttttcactagcgtgaaacttttgcttactagtaatatgcccccacgttgttgcagtatttttagttaaaatctactaaaaattaaacgtttggactgcttgcttgaaaaatataatatataatatgtagtgaaagttgtatcggacaacctgaaatgaaacatcacatgaaccgttggatttttactcgttgcaacgcaagggtattttttctagtattgtataaaattcctttgtatttgctcaaaacataatcttaaagaaattctaacataagctctatgttcaaagaaaaaaaatccgttgtgtctatatctctcatctaattagtgagttttcgctctgtgcttcatccaaacggtatttcctacagttatagtgcattttttcggtccatgggattcaagttgctatggcattttaatcctgcgtagtttttatttccgtgttttgagaatcatgggttccaaagtaaccataagaagaataggggtatgacaaaaattaaaggttgttgcttatgggttgtgggattactaggttgtgggctgaagagattggctgaagatttagtttggccgatttaaaacttcagtgtgcataagtgtcggaagacatgtgtgagtgatgtcattctacgtggtgcattctttttgactggtttgcaccgaactcccatacatcgaatacgtatacttcctccgtttcataatataaatctttttactattatctatatttatatatagatattaacaaatctaaatatatatatgtgtgtgtagattcattaatatctacattaatatagaagaacaataatataaagtcttatattataaaatgaaaggagtagttttttcccatccgcaaaagtttgataacagaatgttgcttcatcacgcgtaattgcgtgtattcaataattcaattcccgccaggttatctccttttcacacggaagttcggagttagcaaaaaaacgattttatattgcacgtgttagttcatgataaggctgttccttccagctaataattcccttaagcgtacagcaatcttattttattttatccatttatttgcaacggtccattccatcggaacattcccgaacaatgtgaaaggtatcaaatggaatatatcagcgctatgtacgtttggcaaaatttgttctgggaaattcaaattttgcataatttattgataaatatcataaaaacgtatcattgctaaaagacatttaaatttgataatttactgcaaaacatttttggctcgagtagagagaaaaattcttcaggaaaaacaagaacacattaaattcttcagaaaaatttttggtcaaaagcttttggttctaaggatattatcgtcttccttaagaatttatctatctaattgagccagaattgtcctctaccaaattatcagtttttacggtatctttcaaccgtgacatatttttacgatgtccatcagcgaattacattaaatttgggtatcctacagcaaaatttacccttttaaataggagatgtccaacaaatttcaaaatttgtagccattaatatataaatatataaatatattaatggctacatattttgaactatataaaaaatatattaaaactcttttaatatagcttttaacagtaaggatgtcgaatatatatcgcaccactaatttttttttcatatggccaaaacctatttttgtgtgtatctgcgaaaatcactatttttttcatgcggacagcgcacctgcacaggaaaatcgtgcgcgtgcttatgtcgtccgcacgcaaaaacaaaaatacgaaaaaaataaaaaatcccaaaaaatcaatctcaaaaccttagcaaggtctcatgccggcgacagcgtcccgcagtctgccattgctcgtcgtcatcgccattgccatcactgagtcccgtagctcgtcgtcgtcgtcaccgtcaccgaggccgtcgtcgctcctccccgcactgcattgcccctctaccgccggatccgcacgggggagcgtggggtagggccgccgcctgtagatccgtgtggggaagcaccggggagggccccactgctgctgccatcaacacgtgcctcctccgctgggctcctcacaccacattctatcggagtcacagtaggaagagaggaaaggagaggagaggagaggagaggggtgagaggagaggagaggatcgcctaaacacaagagatatgctgcacggaacgaatctcagtgtcaactcgggagccaactgtgtactcctactttgcaacacttctatgccagaagactccaaccacacgtttttcacctgctcattcacaaatcaatgcaggatttttcttggttttcgttgggaaacgaattaagatgtcatgaacatgatgattaaaaaaaaggaattttggtcacccattctttattgaagtaattgctatagctctttggaacatttggaaacgaaaaaatgacttaatattcaacaacattcaaccttctttcaaccttaatttggaagcttcatttcagggaagattttactctacttttgaatagggtaaaaatacatgatcgaccaatctggcaaacatggcttgataatttctaataatccctcgtgcttcgccttctagagtacataaactctctgccctttaatataccgtagtagtaggagcctctcctactgttttctcgtcaaaaagaaaaggaagagagaagaggctaagcgaggagtggggagagagtgaggagtggacgtaggaagttagatatttgaaggtgggcctcttaaatggggttgcttgtgaaaatatacttatttttatatttgggtatatatgttaagaggtcagtctctgaaaattgatttttttttcatacggatcttttaaaggagcttatgcgaaaatgtaagttgatttttacgggcgcaatcagttacaatccatgtgtaaactataggggttctcgtaccgtttcggtagtagtgtcagttgttgatttattcggtgatacttattaactgttacatcgaaggaggactgtctatatgggattcatatgattttttaggcttccatcatgcagtgtttcaccaaataaatcgaaaatgttttaattttttaaaaaagttggaacacaatcaaatcactccatgaaacattttgctacgatgtatgaaacaacggttcagaatatatatatattctgaaatatgaaacaaatccaaatacatcaagaaaaagtctatatgggattcacattattttttaggcttccatcatgcatattttgaaactaatcgggcgttgtttcaccaagtggatcgaaaatatttcaccaagtagattgaaaatgttttaatattttaaaaagctaaaacacaatcaaatcacctcatgaaacatttttctacaacgtataaaacaacggttctgaatatattgaaacatgaatgatttagctatcaaaaatcattcgacagccatttagccttccgataaaaatatacttttgtgcgtgtagggttgatcagttgggtatgcacacgtctaccagcattacatctcttgcgatgtttgaatacgtgaagcatcttttgttccgagtactagcagatgtttcgtctctttgttgcaacaatatgtctgtactatactgtattacttaatatcatctactttgtttaataacaaaaacaaaaaacatgtgcctctcggagactatatgggtgttcaaaatgtgaaaacaaaacggaaacaacatgatatattatttaaaaagagaatgaatggattatatgatgcatgaaacgtgtcattcgttgttcttaatttatagcgtttcgtgatttcgtcaagactcaacaacttaagcactcctctaatatataagaacccccatcaaccacacatgcaaaaagcatcctcaggcaaaatcaataatttagcttgcaagcaaattcatctcagtgcagcatgagcagtacaaacaagagctcgccagctcgaaatgagagcggcggcgacggcgacggcgacatcgccgtcgacctcttcccgttcctacgcgtgtacaaggacggccgcatcaagaagttcgtgcgccacgccaccgtgccagcgtcgcccgtcgagaggagcccgagtggcgtcgtgacgaaggacgtcgtcgccgtcgacgacgagaccggcgtgtccgtccgcctcttcctccccgtcgacgcggccgcggccgcggtcgccgccggcaggaggctgcctctggtggtctacgtccatggtggcgccttctgctccgggagcgcctccgccccgccgttccaccgctacgccgagtccctcgccgcgcgcgccgccgcggtcgtcgtctccgtggactaccgcctcgcccccgagcaccccatgccggcgggttacgacgacgcgtgggcggcgctccggtgggcggcgtcttcccgccactccgacccttgggtgtccaactacgccgacaccgcgtgcgtgttcctcgccggcgagagcgccggcgccaacatcgtgcacaacgtggcgttacgtgccgccgccgccgccgccgccggcgaggacgacgacgacggcggcggcggcatcgacatcgaggggataatactcctgcagccatgcttctggggcaccgagcgactaccctgcgagagaccggccgcctggaggcgcgccgcgccgccgatgttcctgccggagaggctcgacgcgctctggccgttcgccacggcgggcgccgccggcaacggcgacccccggatcgatccccccgccgaggcggtggcgtcgctgccgtgccgccgggcgctggtgtccgtggccacggaggacgtcctgcgcggccgcgggcggcggtacgcggcggcgctgatgcgcggcggcgcgtggggcggcgaggcgacgctggtggagtccggcggcgaggaccactgcttccacctctcgccaaggcctaaccccaacgccgcggcgctcatggaccacgtcgccgagttcatcgccaagggcaacacctccacgtcgtcgccgatggcgaagcggcggcgtcgccgtcgccggtgcacgttgcatggcgcgggcgcggagaaaacgacgtcaatgcatgcgttgcgaggccaaactgcgccgaaagttcaacatgccggatcaggaataatggccaataaggccgacaagtatgtggtcaggagttgtctctgaagaacaaaatggaaaatgttgggccttgtgtttcctgaacttccttttgcccaatcactatgataaagtacaatatacctatgttgcaaaatgaagtatgtcgatgtgggggacagatgtatgcttaataaatagtttaatgtttttgtgctgctaatttttaaaaaatccatatcatcccttacactgatttctttgttactccctcttgtcattaatatacgacgtttatcaccaaaattagtgttaatacatcatatcatatattaatatttggagggagtaaatagttattatttctaaaatttaataaaaagtggaaaatgatatctgtgatttattgaaataggaagaatgctagaaacattcatgcatagtgtttcttagggtttaccttttccttgtggaattgaaaaccactccttattggttaatcgaaaactggccagaaacctgaaagaacgacgacttcaaggcaatgccacaagtaaaccagctcaaaccgatcggtttccgcaaactgaccaccagcgatttgccgattattacatgaaaaccgaacgattttggtgaaaagcgatgttctgttaactcgatctagtgtccttatttggccgacaacaacacctcaccttgtgctaatatccgccaatatcaaggatgcaaatgggttgatctacgagcccgtttatatatcacttttctatggctgtcttgtttatcgacatgtaaaaggtaacttaaaatttttaagcgagtttgttggggaaactcttttaatcaactatatggatgtccactcgtctattacatgtcaaccaaatagttgtgaaattttttaattttttttaacaaacatacacgattaaattcaacttctataagttataacaaaaataaaaaaatagtatacggatatgcacaactaaatttattttttttacaacatgtagaaatcaaatttgattttgtatgtttaccaagtgatatcatatattacaccttaatctatcttgtttaatcttgtaaaataattataagtatttaaataatataataaacgggtgatcgttcaactgattacaatccatctccggactcgtcggccgacccagacatttttttcctctcaactataggatgcaacagcgttgacgttgacctctatgcatgtaccctcgtctctcgttgcagctaagctagctaggcattgccgtatggctaaccacactgacaccctcatctagtcttcttctcctcttccacgtcgaggcctagtgttgctagttgataaacacacgccgaggctgggcattattgccgcatcagatcatcagtgtcattttaattgctttctgcaagtatatcaacttattatattgtattggggttaatcctaatgtatgtttacatatatcaatccacgcaagtaaccacctagtctatccgtttcagaatatagtaacctaaaatcggatgaaatgtacctgtccaaattcgtagtactacgctacgttctatccgattctagattgatatattcaaggacgaagggagtagctatgataatcattgccattatgttgatctggtaatgttaatcactacctaaaaaaataattttctcatgtgaccaaaatgaatttttgtatgcgggcgcaacaaccgctgcctccaactgtatgtaaaaatcggattttttttttcaaacggacaacacaactgtgtgggaaaatgaggtttctgcaagcggacacgttatgccacctgactgcaaaaagaaattttgccaacttttttcccaaaatccctagttcataagaaaccgctgccgtccactgtcgacaccacatctattccctgaaaaatggctgtcgctgaccttgcctttgacatccccgaccttcccaccgccgaattcacccctcccgaggctggcaccatcattgttatttctcccgaggcctctgtggtatacgtcatcgccactcctatgctcgtcattggcagatccacccctcccaaggcacacagcgacagatttggtgcccccgaaagggtgggtgtgggggggaggacggggtgtcatcgccgctctagaggttgacgtggtcatcgtcgcagctcccatgcttgtcagcaacagatccactgctgctgaggccacaaccatcgccgttgctactcccgaggctgccggactgataaaaagaatgaagagattgagctgagagcaaaggagaaaaaggaacaaatgagcagaggcaggggcgtgtcctttgattttaatatagctcttcggtccatggtggaattgtgtgactgaatcgactcaaaaccaccaactgggaaaataggtctattttgacgagcagacctactaagacaaccttaaccggaggagtcttatgtatttttaaaagcgggtcttcctttagcctattcgtaaaaatgttgggttatctaaaaaatggttttatagtagtgaattggatttccctgtccacctattctcctccttttttgcagatgcaaaacttcataaacaatatcgatcggcgccattgcttcagcaaacacgccttcctcccagtcccaggttctctctccttctcccagagggtccatggataatgattttattttatgtggcatgtcttaattaattcatgagataaggttgctccagcaaactgcccttctacgaaaatgtaccggccagaacaatattggtgcatgcatgaggatgtgaaaggtatcagcctacatgttttttaagaatggaaacatggatcagtattggttttttaatacgtatggcatctctcctctttgtttttcctatgcaagaacttcataacatttaatgcttatatataaatcatatatcttcctttcccagataagttcatcaacaacaattttgtattaattcacgagaaatttgttcctggcttcctgcgaatctatatattcccttctacggaatgtttatatgtcttttcaaatggaacgcgtatgcttgcaagatcgagagaaatgggaacgcgcatcgatcgatcagttagttgtgttctgagaattaatcaatcaattaaggtctcctaaaaaaactaattaaggggttaatttagagaacttcaccagcacggcacctctctactccctatatataagaacccgcttaattcccattccatgcaagccatcgtgcaagagcgagctacagttgcagcatgagaacaagcagcaagagctcgccgtcgccggcgccggcgccggcgcgcggcaacatcgccgtcgacctccggccgtttcttgtcgagttcaacgacggccgcaggtggatcttggtgcgccacgagagacaagacgaggagcgggaacggcgtcgcgacgaaggacgtcgtcatcgacgacgagaccggcgtgtcggtccgcgtgttcctccccgtcgacgcggccgcggcggccgcggcggccgggaggaggctcccccttgtcgtctacgtccacggcggcgccttctgcacggggagcgcctccgccaggatgttccacgactacgccgagtcgctctccgctcgcgccgcggcggtcgtcgtgtccgtggattaccgcctcgcgccggcgcaccccgtgcccgcggcttacaacgacgcgtgggcggcgctccggtgggcggcttcccgccgcctctccgacgacacctgggtcggcgactacgccgacctctcgtgcgtgttcctcgccggcgagagcgtcggcgccaacatcgtgcacaacgtggcagtacgtgccggcgccgccacccgcaacgctggcgaggtgttcgacgacgacgacgacatcgacatcgagggcatgatactgctgcagccatacttctggggcaccgagcggctgccgtgcgagacgcgcacgcgcgagccgccgccgatgctgctgccggagaggatcgacgccctctggccgtacgtgacggcgggcaacaacaacaacggcggcgacgatccccggatcgaccctcccgccgaggcgatagcgtcgctgccgtgccgccgcgcgctggtgagcgtggccacggaggacgtccttcgcgaccgcgggcggcggtacgcggcggcgctgcgcggcggcgcgtggggcggcgaggcgacgctggtggagtccaggtgcgtggaacactgcttccacctcttgccggagttcggctcccacgcggagaccggcgtgctcatggatcgcgtcgccatgttcatcgccaagggcaagacaccaccaccgatcagcatgctgatggaggaggagcgcgccactaagaaaacgaggtcaagtgcggtggtgccagcttgttggagagttccccgcgggccgaggtgtacggcccaagctgtggttgggcttcgacgtgccgggtttggggtgggcaacatgatcaggcttcccagtaaggcccagaagtatcatcgtgttcctgcaattgctctacggagtgtgctccagagttattatctctgagactctgatgactaatggaaacagttgtgttactgccttggatgtttcacggactagttgttattattatgtgtgtattattgtggtacgaagataatctttttaataatggaatttatttgggctattgcttcgaaataactagccccaagtattatagagttggcagttcaaaacaactatattttttaaaaaaacaaaacatacagtttgagaaacgtccaagaatattccggctagctccacaaggtaatgggctagacgatttgggttcgaaacccactccttctcattatttgatatcagatctttccctaatattcgcgtattttaaaaacataaagtttaaatacagacgatctgtaacacaagtctaaatacagaaagtgagatgacaacctactccattcgttgttggcaaaaatatgcataatctgcatataagtcctcctccttagattaggggtgaaaacggtatggaaacggacagaagccatctttattattttcgatttcattttttttcggaatcggaatcggaatcggaattgaaaaccctggatacgaaaacgaatcgaatattatataaaccaaaaacggagcgaaaacgaactggcgcaaatacggtacgaaaatttatcggaataaaaaacccctcaaactgataaatccaatggaataaattatctatgtttaagaaagtaatgttgttgataaatcctaatgcaggaaaaataatattcttatgtaattttagatttgcataacaattttttaaaaaaaatagcaggtaaacaccatgttattcactattcagtgcttaaaaaaaatctagggtatttcagtcacaaaatttctggtaattccgagaaaatttccggaaagtttccgactgattccgagttccgacgaaaactgcccttatcattttcgattccgtttccgacaaaatatttccgaattcgtttccgtttttgaaaaattctaaccgatagattctgttttaaaaaataggtctggaatctgaaaagttttcgtaccgttttcaccactaccttaaacctttgtcgtggattcccaaagaatttgaactcgaatttgcaaatactcgtcgtaatcatcggctgatcagatcacctcacacacatcaccgctgattattacagtcgaaccaagcaaaagataggggaaagtaactgaactgtaaatccatatgtctctatcttcaccagtgatggagagttgagaccgtcaccaacacgacacggaggacgaatatgcaacacacaaaaccgacaacaacaaaggagctaggttacgacggtaagataactgcatcgaagaagctataagccttcaaccaactaacaactcgaggtgaagccgtcttggactggtgatgttgcagaggagctcgagcacggacgcgggaaggaccagcatcacatgaacacaaacaagatcacatcgccgtcgacctcttcccgttcctacgcgcgaacgtacaaggacggcctcgtcaggaagtatacgtgcgccacacctccgtgccagcatcgtcgtccgacgagatcagaagcccaaatggcgttgtgacgatccccggcgtgtccgttcgcctcttcctccctgccgccgccgcatgcaggaggctccctttggtttgtctacgtccatggcggcgcgttctgtaccgcgagcgcctccgcgcgccccgttgttccaccgctacgcggagtcactcgccgcgcgcgccgcggcagtcgccgtctccttcgactaccgcgtcgcgccggagcacccctgtgcccgcggcttacgacgacgcgtgggcggcgctccggtgggtggcttcccgtcacaccgtccagtacccttaggtggccaaccacgccacatgttcctcgccggcgagagcgccggcgccaacatcgtgcacaacttgaaggtacggctcggcgcctcccgcagtggcgccggcggcggcgaggacgaaggcatcgacatcgaaggtgggctggggcaccgaccggttaccgtccgagacaccggccgcctggcgcgccacggcgctgaagctgcggcgcccggagatgcgcgacggcgcgtggggcggcggggcgacgctggtggagtccgacggcgaggaccactgcttccacctctcgtcgaagtttaacaacccgaacgccgtggcgctcctggatcacgtcgtcgccgagttcatcgccatgaaggggtggatccagcctgagggcggcgaggtctcgtgcccccactactggcgtgaagactataagagcctccacgaaaatcctattaaaattttctatatgtaaataggagggggaactttaactctatatagtttgttcagaccccactactatatcttcctgatccgccacttatcgccatggagacaacgcgctccagtgagcatcttgcatgcatagcgatgaagcagctacgttgcatggcacggagtacactgcagaagtggcgtcaagtgcggtgccaacttggagagcttctgacgggccaaattggatcacacagccaattgcatttatcgttgagattttcctaaatcttggttgattcttttcttaaaaccagggtttgaatttctggtacttgatatctcggctgaaattttcggtttttcgcaatttttggtgaatttggttaaattttattcaaattcagttaaattgtgtcaaaatttcagaaaaattcggtccaaaaaatgctgaaatttctgaaattttgaaatggccaaaattttagccaaaatcaaaatttaaaaccctacttaaaactttgagttctaatgtatagaaaaaagttctcaaaatatctatcctataataattaaggttgcaaatgagtcgatttttttaatccaatcagtatttttagttaaaaatgagaaaactttggaaaaattccttataaatactattactatgcaacacaaaaatttgttaaacagaagttgtatttatgtgaacttagcactaaaagccaaatcaaataactaaaactagtaaaaagaaatatttttttatgttttgttgccacaggataccttactttacaaccatatatgccattgatatggaacgtcataataatattatgttgctgatcgatattataactttataagattgtatagtttttatatgtactggctatggacttcaaacttttcgattgttgctataatgttttcagttgtgtactacatattatgttacatcactgtcaatccttgtaaaaagagtcctatatttttccctttatttcctgattttctcgatcacttttattattttaatacagaagcaatcagttttcgacgaaaattcatggctttcaattatatcggtgttcctactctcagtattcaacaagatttctgggcagtttaaaagggaattcacgttctcgttcacttgagatatatacctataggcgatcaggggcggatccaggaaagattaccaggagggtctgaacaaaccatataaaattataggcccctcttctaatagatgtatgacagaaaattttagtggggtctttatggggtcattacaatacgggtagcggggtctcgagaccccagagaccccatggtggatccgccactgtaggcgatctagaggcgcctgcacggaattccaattttggtttgtgagttttgtagcaaaccagtgggttttctcgtggaaaccatcaattcaacggggtttgaattccggtgttgtattaaatctgtaaacactgatgctaagtggcattcacttggtgactggtgtacacattaaggtagaaaaaacacaaaaatattcttcttcgtaggaaagatttaataaaagaaaactggatgaagctagtgtggtgttggaggtaaagatataagggagtaacccataacccatgaatatatttatagattaaaacaaattgtaatacagcttatattttaacttataattgaaagggtccttcgattgagccggcctgagtgcgaatctatattttaacagggtccttcgattaaaacaaattgtaatatagcttagggtctattttagttggtgaaataaaaatttttaggtgtcacatcggacgtttgaccggatatcgaaaagagtttctggacacgaatgaaaaaactaatctcataactcgcctgaaaactgcgatgtgaatcttttgagtctaattaatccgtcattagaatatgtgggttagtgtagcacttatggctaatcatggattagactcaaaagattcatctcgcgatttacatgcaaactgtgtaattaatttttctttttatttatatttaatactacatacatatattccaagatttgatctgatgttttttgaaaagttttaggcgaactaaataggcccttatatatattttaacagattcaaagagtgagggattaattaatttggggttcctttctagcgctgcggctcatgcactcatggtgcagtgttgcctttcctttttactctcgcttcaacaattaatttgcgtcagctcatcattgcagatcggcgcgtagctgcggcgaatcagtgatccgtgtgcactgaactcaaccatgagttaatgttttttagtcgtcagaacttttggcattcaatggcgtgagatcttttgcggcaattttggtccaagtgcgacccgtcaaatctttagtttcgtgatttgatctgaacagtagtacgtcacttcatccgtagtagcactacctccgtattcaataggctactacctccgtattcaacgaggtaatattcaatatttgattgtccatcttattcgaaaaacttataaacaagtttttaaaaagtagtcacacataatgtactttcaccgtcctaaaatatacgtatttttttatcctgacatggcctccgagatactactctgaccaacaatacctataaaaataaaatatcttaaataaaaagaattacatattataatagtttttttaatgataaatcttgtaatatcaaatttatatgattgatcttttttatatttctgctattagtggtcaaacttaaaaatgtttaacttatcactatgataaaaatgcttatattggatggagggagtactattcatgtttatcattttataacaataaaaatactatttataaaactttttaaaataagacgaacgatcaaatgttggatataaatagtgtaaaattgcaatctttctaggatggaggtagtaaaatggtactccctccgtcccaaaattgtcctaggatgtacagatacattgttctaagatgagtctcatcccatattaggttgctatattttgggatggatggactatttgacacatccttaaataacaaaactaaaagagagtaaagcaacatgcaaagaattagtaataaacctcaaatcttatagttctctgcatacagaaaaaaacaagagataagtagtgtcatattttggctgaaagcattagctctataaattcttctgaatatctgatcccctccatccaagaatttaattttagattcttgtatcaactgaacttgcctcctttctttccctcaatgtgaagagaatttacatgttagttagcaagaaaaacacacagaaaaatatataagaatgaacacagcggctcgggaaggcagcccctgaacctgtagggttttttccaccgtcaccttcgaccttcgtccttcggtccccctcctcctccgctatccggtccaataaatttatagggtttcttccaaataaagtctttagagaggtttaaatctatatatgtagagtctaggttttatcttccatggtgttaccgagttagctagatttgtctagagctagttagctttttcttgttcgcggttactactttcacggacttttcaataaaaatttaggagtatataatatagtaccttatattttttattaactagaaaaagtacccgtgcgttgcaacggatgaaatttattttaatcttattattgttatatggtttagttaagatgaaattcactgtgggagttcgcttggatatatatttttttagaaaatcatgagctgcagttagaactccgatcgtctcaagttagcatgcgagtttttttaaacagaattcttatatgattccctctgtattaccaaaagtgaacgatcttgaaaaccgactcaaatacggatatgcatttctagaagcaaatgaacttaaaaaccgactcatacacggatgacgcaccaaaatacctacaaaaacatcttcaatttttataatagtagggatagagatatgctcagtcttttttaaataaaaatctacagtgtaattatccttttggctgaatttaattgatttgcgtcttttttttttttttgcccttgtagtctgattcctttgaagggaccttctggttttacaagtatttactccgtatcctgtaggaagatatgcatccaagtacgaaggggccatggaaagactcaaaagaaagaagataatgctatagcatatgcattgatcaagcatgacgtgcacaccccatcaggcaatcactggccgagcctcctttcgctacccccacaggccacagtaatacagagttacacaagaacggaaagctacatctgatcgatctatatctcagtacgtacaggagtacacataagctaagctagctagggcaacttacgtacgttatggcgtatatatgtatccctgaagaaggggcttttcgcgtcgcttcgctcgtcaaagcaagctagcagtgaagaattgaattcaagtacaggctatcttgcatgtgtgttactcgaaacaaaaaaaaatttctcctcttttgacagggacatagagagagaagtgagcatagttaggttccttgtgatagaactagtatcatccaggtttaaattctagatttaacactgatgctcatatttacggcttattatttttttcaatggtaagcgacgtaccccttgagagtgaggcacccgtggttacttcgtcaaccttaagatataccagccgagtctttcggaggtactaatagagatagagtgtacatgcgtacattcatagaaataagtgtacgcgtgttgtgagcgtctatgtttgcaccgtgtttctcaaaagagagtacacagctggactgtatagtgttgtgtgtgttgtgcaggttgtgcatatatgagagaatttattattggcgcatgcattaataagctagctagccgatcgatggatcgatcgagttcactactgtagtttctactactccatctatttatatagccgatcgtcgagcaaaagaaagctccagctagatagccctcctcttgctcaccgtacctcgctcgcaatcgatcgatctctcctgcatatatgcttgatctgatctctccttaattataagctacacaaggtatgtacgtacgccgatcgacttattaacgcgcgattttaatttcattattattattattattattattattattattattattattattattattattattattattattattattgtacagcagcatttcaagctttaacttgttgcatgcatatgcatgattttctctgtgctataattaagtgagatatatgctataggctatagcttgcttttggtgaagactatagaacgttagaagacttagatgtgtgttttcgcacaatgatcatgcgctgcattggatatgcttgcatgcacatcaccaaatactgagaaatgccttgtactttattcaaatgtgtgtgtacacttggatttcaaagtccagattaaactccttagcaaaggcatctctttcataatttgactcctcgagaaaaggatagacttattttgtttcccttccgaatatatataaacctgattgtacactggtctcattattaattgtcttagtttgaccgagctagaaagcttggtgcacttgtaaaagacgaatattagggaataacctaatataaaataattagaatgagtgaggtttcgaatctatattgtctagcccaccaccttgtgaagctagccgaaagaccctgacacagctatagcttagctagggaaggcatcatcgaacatacgctttactgtttatgtgcatgcatcgttctcttctccttcttaatttgttgattaattacttaattaattaatacttgcaggcaatattgtactaattaagtagccgatcgaccaaggcagtacgtgttggcgtttgctgataatccttggaaatggcggcagcggaagcagcagcgcccatccacgatgagtacgtacgcgtccttgtgattttaggccctgcgctaatcaatcaactaattataattaataatgcatatatggatttgacaccgtcggcgttggatgatatattatggcatttggattgatttagatgggtgctcataattttttattaaaaaatgtttagagaaacgtctctccctttaattttttttcattttttgaaaatttggctgattttgcacgggttgggattttctgccaaaaaaaacaagagtgatggtttgggccaactgggcctcccaagcggaggggccatcaatcaatttgtaggctgtcctcgtttttatggcgtggactaaacaaatatgggacaaccattcattagtagacgtaccggccggccgtaatgactgtcgatcgatcggtaaatttcaagatacgtacttttagtttgaacgcattagtatgatatgcgtgtgcagatttttcttaaaagttactacgtggagtactttgttaaattttgtaaaagtatatatggtacaaaatgtagaaaaagttaaaacatactttaatgtatgaccccgttaactttttatccaacgtttgaccattcgtcttattcaaaaaatttatacaattgttatttattttattgtgactagattcaccatcaaatattctttaagcatgatatagatattttcatatttgcacgaaaattttaaataaaacgaatggtcaaacattagtcgaaaagtcaacggtgttatacattaaaatacggagagagtattataatagtacaatatatttttttaagactggcaagaccatcacactctaggtggagtcctgaacacaatcgataacgtaaaggacacatataacatattctctctgtcttataaaaaatgtttttgcaaacacccattttataaaaaaaattaaactagtactcgttagaatgtgtctctatattcgtttttttaagcaggagggagtaatatggatgcgtgtagtggtattgtatttaatttaatttaatccgtttcgtgcatgcagggctgaggacgacttaccgtacgagacaattgtgacgaggaagataaaggccaaccacaggaagtccgttgtgaagctgctgatcccagttatgaacaagctgggaaagcccgggacggtgggtggcacggggtacatcgtgtacaacgccgggcgcaagttcctgatactgacctgctcgcacgggctggacacgtggatctgcccggagcctatcagggtcttgttcgacaacctggtcagttaagaccattcacaatgcgccaccaaaatatggtgttcctcatttaccaccgagaaagaaaaaacatctacgaactataagatagctacatattactccctcaattctaaaatataaggcataatcacctctaacctaaagaccaagaaataattattatcatcttgtagtttggatcatcctaataaatacaatgcatgcatctaatagaattagagaacatgagaatgtaggattttaaaaagtaataatttaatggagaatggatcatggttaattgcctacatgcatacatgccttatattatggaacatctaaaaaaatggttgtgccttatattatggaatagagggagtactccacaatgcatactggtggtactactccagtgggtcacaccattgtttctcatctctacatactagtactactctctacttctttccccctcaatgacgacgtgtcccaccattctttcccatctatgcatactagtactactcatctcttcttctttcctcctcattgacgacgcgtcactccattgtggaccccacctgcaaaattgatgaggaacggggagctcaagttggctccgagcgcttgagcaggccacacggtttgtctacgtggctaggaatacttgttcttttgctacgaggctgaacgccacgtccttgcactgggaataccctaatactacctccatccgacgagataccgtagttttacatcgtttatattcagcatttaaccgtttattttattttttaaattttcataattagtatttttttattgatattatatgatagaacatgaaaagtattttatgtgtgactatttttttaaaaaaaattcttaaaattttcaaataagacggacggttaaacgttatacacagaaacctataattaattagatataataattagtatggtactctatgtaattaataacttgggggtaattttttgtacgttgtgggttaaattttgccactaattaaatgaaaataatcaggtggtggcgcaggcgctggtgaaggtgtgtgagcggaagaaggaggtggccatcctgtccgtggatgtgtccctgaagcaccgggagctcaccgacgcgggcgagtaccctcccgtggcgttcgaccaccagccagtcaggaaaggggacccacttgtgctcctaggctacccttggccttccagcaagactggctccactaacctgggaagtttcttcggctctgtcacgtaagtgtgtttatagctagcttcttcgtttgtgtttttgtgtttttttttgttaaatttagttatgcatgcaagcagggtacgttggcaaacaattaatcgctttcgctaatataacatttatatatgtggcacaaattgagggtataaatcatactactaattaattaattaaactgctttccatcgagcatgaggagtatataaataatgttgcttaattaattacatgctgcttcacttcacatatattgtaatagtactaattgctggttaaagtcttttgtcccaacgaaataaaatagtacatcctatatttttaaaatgtagcctatatataataatatatagcttaattattggtcaaaatagttatctctagcgttagctgttcattctagtagtactaattaacataaaatgcatgtagtatttgtgcttaatcaattatctctagctagcttttcattcattctagtactaattattttgattttgatgttgtggtcacttactactccatactatatatttatgtacatgtatgtatgtatgtatgtatgtagcaacgaggcagctcttgtcggaaaactgaaagacacccctcccgaagaacacatgatgactgtcaacgctgattactccggtgcaggcgggtcatcaggcgcacctgtttttagaggcgaaaatggcaaggttgtgggcactaatgttcacggtggcaaagaggtcttgtgctttgtcacggtgagctggattcaggatacactgaggaatttacaggaggtcaaaaagtccggagtaagtacccggccctctaatacagtcgccgtgtattagttaattacataattaaacaagctagttttatttatatacgtatgtcccataataattatcacaatagagtattaatgatcctcattaattacttctcatccaaatttcttctctattttagtctcaactacccttttatctttatctataaaccatttaataaatagtatcacagtcttttttttcaaaccttagtatatactccctccatcccataatataaaatgtacacgtatttcaatattcaacctttaaaacatttaacaaacatttaatataatatgaaatgaattttatttgttaaaaattatatcattagattgacatttaaatttactttcatataattataattttgttgctgtaaaccttataacatatgagaaattataagttaaagattagttttagaaaccgtgtaacttttaccatgccttatattatgtgatggtgagaggactaaataacttagaattataatcaatttgggacggagttactatttttttactctccatatgcatatgcaagcaatgtatctcgcttaacaattaattactctcctaattatataattaactacactgtactgtactctgatccatctctgcttggatgctatagcttggaccgaatgcaaccattgaggagattctggaatcatgcttcgctttgcttaaaagcgacgaagctggcccatcatcaaggatcaccaggtactcgatcgatctctccccggccggttgtaaacacattatcgttgtttttttcccctgtaagttataaaatggttgattaattgtcattaaattttaaaatattagttagtcaaaaaaacataaaaaaattagtatggtacgtacaatatttatgcatgcatatagaaaaaaaaaacacgtacttacatatcctcaaggatatatatttttttattaatgaaatagtgcaccttttagatcatagccacatacacgcattaaatcatgctgaaatctctacacagttatatatgtgttatatggttattaattaaggggcaaggctagagggctatgtataattaagctactatacatacgtacatttaattccatagttctttttcgttgtacacaaggactggactaattcgattttttcctttttttttcttttagtccgtcgtcctagtgtatctaatgcatgcgacttcaggcaaagtgcaacctttaatatttatgcatgacgagacgtgcggttctctatacctctccggtgataagcagtgaagggaattgggttaaatggattatgcacttatgccatatgtggcctgatgatatttatatttatatatatgtaccaggagattttatttagaatgtatcagagattcagagtacgtagttcccgaacatatatatgagggagctcaattaatcagcgcagctcaagcctgcctctatctatttaattagacgattgagaactgagaatatatatgtttgttatgccctcaatttatttaagaatgcaggagactgtagcaagtaccaaagatacaatttttcaatatcgtgcaaatctaaagtccctcataaccaaaaagaaaaaaaaagatggattggtgtttcatgaaaagaaaatggtcttaatattcattttgcattttggaaaaaacatgctcgactagttgaatatattggacccttcactgtatatactctttcaccaatcttgaatcattgatttattattactccctccgtttcgaaatgtttgacacccgttgactttttaccacatgtttaaccg

SEQ ID NO: 23226 - DNA, 33129 bp, Oryza sativa
  unsure (1)..(33129): unsure at all n locations
catttcgaaacggagggagtattaagcaatactagctacaaaggtatcaaatgcatgacatgccttggttcactttgattggctcggccggtatacgcgtatgtatcctaccatagaagtgcatgcaacacggtacgtatatgattggttcacttaatttgttggtttgctttgcatgcataaatgaatgagaatcatatgcacctaattaacatgcatctcttgatcaacctgtatatgtactgctagccaccaaatatgttcgtacaacgctgtatatgtatacaggtttttcacacagagatagcctacgtacaacactgggtgtgtttagttccaattttttttccaaacttccaactttccatcacatcaaacctttcatacacacacaactttttagtcacatcgtctccaatttcaaccaaattctaaactttgggccaatccaaacacagccactgtctatcacaaaacaactccagctttcagctagatcatctttccctcaaagtcttcctttatccctccagacgcgttccatccttgctgtccatccatggtcggcattgaagatctcacttgccacttagccgagcagcttgagactattgagatgcaggcattaaagcagagatatgttgttgcttctcattagacaaaaatagtagataaaggggggaaaaaacgctatgcaaagatagacaggagaaagggcacatgatgaactgcctgtagtcttccatgtgtgatgacatctgagttaaaaggtgtggcagactcctctaaaggctaacaatatagccacagatatgacaaatattctccaatttggatccgaatatttgtaacccaaaaacaaactagttcaaaccttttccgaatcagcccaaaccgcctaagcccatctccatcaaaacaaagcctgtccaaacatataaccaatccattaagcccatttcagtctaacccattagcatacctatggtgaacaatagaaaactgtggcacacacctcttttatatcgctcttgacgaagaactgccacccgcctttctcttcgctggtaaacttgacatttgcgaactggcaacacccctctcccttcttgacgaagaactgccacccgcctttctcttcactggtgaccttgacatttgcgaactgctaacaccccttccctttctcttcttcgatgcactcgttttttcagaatcgtacttctcaataagagctgacatctataaaatattatcatgaagttaaaaatctgtaaatttctgagccttttacgacctaaaacagcaaaagctattactcgggctttaggttttgtacaaaaggtagtacctcataatcttcattctgtaatagttttgccaattcaacctttaattgactattgttcagggcaaaattaattgataaacacagtgctgtccgagcaacattcattccaaaaacttttccgaatcgactacatataggtgctcccatcaacccatccccaatcggacaggtatgcacaaatgtgctaacctgttgttctcctctcagttccttttcaaattcgcatacactggcatgcattaaataactgttattaagaaggacatacttaaagaataaataattaagaataaaataccaacattccataaagtgttgtccagatctctaaactttcaaactgcaaatttaagccagcaaacttatttaatttatcatcaaatgtctaagagcttatgatgcatgtcaacaagcaagcagctggtgtggcatgtgggagaatgtgagaattgagattgacgtggatggaaatatatgcaaaatcaacttggtgttcactatcaatcccaattgctcataacataatcaccaaacaacctgctgatcattcatctcatcgatgaccaggaatcaatggcatgccaggagaagccaactcattgcaattgaaaatggctagcttgtcctaccatttcgtcgattatagaccgatggtgttgtgaacgggagacgacataatttggggattacagcatgagtaaagtggaacaagagtaaagagcatatcgattttaggaggttccatgcatatattctaatccatggcaagttcacgtgctcccacataccaagttcactccatgttagcatgccacatctattccctaaggagtatgttcacctttgaacctatgatggtacattaaccaagtttgaaggcctaaatttgcaatttgaaagttcagtggcctgcattttcctctcaattatcttccgtcaaatcttataagcactttaaacataaactaaaacaaaatataatacaaggggaatgaaatgcaacaaaagtaacagtacaaaacaaaaatatccatgaattgtcatcaagaatagatggatacctgattattcccgcagtcattatctgctctttcacaatgctaaaacatccaatacaaaaaacaacatctgcctctggtaagtcgccttcatgaaacgatgtaggaatgcaaggtatggcctgaacattacatcctcgcacaaccaacgcagaaagtaatgaacttgttctgacaacttctgtctccaaatcttcttgatcaccaaatctcgcaacgactctgaaaccatctttcggatcacaactgatagatgtgattaccccaatataattgggtgtcacacataataccaatccagtaccaagatggcatggtatttgggtactttttgcattgaaaactgccagttgcacaattgaaggagctacactttgatgcagttgccttaaaaaagcatcatcataacttctcacctacagattttcaagttaacttgtattttgattttttttgtttattcaattttttataaagcaatctatattataaagtgctatgtaatgccacacactaaaaaaagcacaaactataccatacaacataaacatttcataaaatactactaagtctagaacagcaacacaatttatagaacattttccaaagcaataagccccacaaaacatttttggagtctacataaatgataacttaccgctgacattatttgcaaagcaccaattacaaattagccaatgtaatgaagaagtgcacgttcataacttgcatgctgcattcatagctaatgagagtagccctgggagtataatgaagggaatatcatgtcatcttctaatagtaaaaagggaaaatcaatgtagaataaatgcatcagattgatgcatatccataaaaaaaatgctttatgaaactcaactatcaatatgtaaaagaaacttttattgtgtaaaaggaactatcttttgtacatattgggtccagctaagtgaatcaagcaagcacctttactgttaaaagcccaaaaggtaagaacaatagaaatggtgtggatgcaacaaagaagaaagaaatcacagttgtgtaaggaccattgttctcaatatgttgattatgtttctagtaccaaataaatgccagatcataagccataccaaaattttgacagtttgacccttttaaaaaacttattccacaaataaaccatggcaaaaagccaaaaactataacaaaaaatggatattgtggtccatttttggttgtggcgaaatagattaaaatggtaatagggccatatagtattgaacgtgtagtgtgatggtaaatatacgcaaacccaagatagagccccgggttcgaaccccactgctgcatcctttttattccttttttctctcagaaagttgtgtgggtgcgcacggagggggaaaaaagaagggggttgtgggagtgggaatcgaacacaagatctttggatctagaggggagtacatttaccattaggctacttgatgtttatgagaaagagtagattttaatgtttttaacaaagtacaaaactcaagggtgagaggtcagcaccatgggcctaagcgccagggcccatggcaccgggattccggtccaattttgcaataagtttttgacgtagtctattcttcaaataagtttttctaaaaaggtcaaattgtcaaaatttcggtaagccatagccattttaaaatgcaaggagtggaggtatgtttgtcattctccctatatgtttatagatggccataagacccgaggtccggcccaagcacgacacggcatgactggtgtcgggcccgtgccggtctggcccgacaattgggccgtgcctgagctgatgccttggcacggtaggccggcccagcactgcacggtcaaagaaaactagttgagggatccaaaatagacttaattcagccttataaagtactgtccaaagagaagagggatacaaaatagacttattccagccatataacacacagcccaaagagatgaggtaggaaaaatcaacttattctatggagaagcatgatgggttgtcgtgcctttgggctagcccggcacggcctgagtcttattgggtcgtgtctgggccgtgggtgcagcccgtgggcaagcacggcccggcatgtaggtcgggccatgccggctcgactgactttggcctaggcccgatcatgcctgggacgtgccaggccgagcggcccattcgggcatctatatatatatatatatatatatatatatttgttcactgccaagagaagaaagccttactaaaatattgcctttgattttttttttaaaaaaatcagcatgccatgtacatatgtcttagaagaatcaacgcatgtgagagcatgtttatctgagtagaccattgttgattcccaatttcccatgattgcatcataatatgcagcaaggattgctaaagtgattattgctctaaaactgaattttatcctcaccattacccccaaaaggtggaaattgaagccatacattgtttttttagagcagagacactaattggctaatactccctcagttccacattataagacgttttgatccctccacctcgtgtctagattcactaacattcatatgaatctagacatatatatgaagcatatacatgaatctatttaaacccaagacgtcttataatgtgaaaagaggaagtatacacgaagcaaggcagaacgatttcactaaataggggggaaaaaagaagtacaggcaaacaattgatttgagcactaatgctaagtacatgcgcacctgaggagcaggagcagaacaaaggccgtaccttgcagcagtactgatcggagcacctcaggacaaagactgtgtcatggagcggtagagagaaagagaactgttacccggctatgtaacatcagttgggagtaaacctgagccacattagatgaaccaaagagtatcaaacaacaaacatacaccgacggaaaagcaaagattagccatcggcgaggtggagaatatgatcttgtggaaaacggacactgcctgtggagtctgtggactgtgaaagccggacacagcctatggaccgttcaccaaccctgcaagtgaagcatggatattggatagcataagacaaaaacgcacaaccccgatgagaaaatttgataaggcaaaattaggcacgtcgggaccaggaacaattagagcaataaagctaaaattaagcaatcaataaggcaacggcaacgcacggaggcaaaaaaaaaaaaaacactttttttgaatgaagccgagccagcaattggtggtgtttgtattaagctggaataaaaatcatgtatacatgtttccaccaccaaatggtgtgcacaggaaaagaaaaacagctaaggagatattatcgctatatatcctttgccccacacatgctccaaagcttaacttcgtcttttattttgggctaaagaactaactagaatttctaatcatcaagaaagtgcaaaggagcagttgaaggataagttcaccggtggcgcggcggcgtcttctccggcgatggccgatggcggcggcgcgggcgccccgccgaatgttaggtcttccggttgagggtaggggtgggaccgcgtggaggagacgtcgccttcagagggaagtcgcggggatcggagcggaagcccggcggtggcgccgcctcggccgcgggagaggaggagggcgttgggccggagtcggttgcgggggaggctagttggagtggctacgaggtgggttggggccggcgccggcggctccggctgagttcctgagctggcggcgaggtggtcgcgtgaggagttcgggagaagggagtgtagtgattataaatttataatcatttaaaataactgtgaatttcaaggtcacaggatgattatccgatggctagggacagaggtggtgtacttttgcacttaaccgcccgccaatccccagcgcccttgcctggttttttgcaaatccaccccccttaaggccctaatccgccagcgcacgccgcccacgtcatttcgttgggcctcatcgtttggcttttctcgtaataagccaaaatgtattattagaaaataaaaataaatttgtaggtaaaacttttatatatgtgttctcggtgacttaaaagccaatgctgaaaaagaaattacgttgaaaatatctcaaaattaatgtcaaaattaagtttgaaaattcaaattttggttttttctttggctgaataggccatccgatgggagccgttttctcgctgccgcccgcgcccgccgcccctttgccgccccgccccatggagtgctcctccaccctccgcaggaacgcctcgtccttcccggccaagaacagctctgggcacacaggccccgacgccaccacgttcgcggttgtgctgctgtccagggtttacgatttcgacgaaattaggtcggatttcgcgaaatttcgacattccgacgaggctcgaaagtagaaaccgtttgagatttcgaggagtttcatctaaattcaaatttaaattgataaaaaaagaaataatgaaataaaatcttataaatattatgatattcatagaacttattgggatataaatttccgaaaaaaatgatatattgtgtgtatttactaaaacttacatcatgaaaaaaaagaatttcagcaaattacctccattacaaattactgatcgaaatttcattaatttcgatcggaatttcgccaaaactgaccggttttcgagaacttatcggcaacttaaggaatttgtattcaaattttagtttatgaaatttgttcggaatttaccggttttccaccggatttcgcgaaatttcgaattccgccagtgcccgaaacggaagggcctatcggaatcgtaaaccctgctgctgtctgctgtttgttctctgcagttatcttcagtgcatgtgcataaaaaaatagcaggttatgtctagtggcaatatagatgttgcaggacccagcatcatcttcagacacttctcaaagctgagaagaggtccaatgatatggagtcattagttattcaactcactttgctgctgtaaggaggaaaaaagaggagattttgtactgcagaaaatctcaatcgttgagtgtattgccttgctcaactctttttcttgggcaatgtatgacgattcagtaatgagggcaatgtatgcagtgcaatatacttgttcctcacaacaaatacaagctatgattttaaatttacaacccagaatataaatgtgcctaacaacagatacatacatatgcacagggaaaggacgtcgcgcgcgggtggcggcgaatcgcggcgaagagcgggcgccggaggcgaattgtgggcggcagcgagaaaacgaaacgatgtgggcggcgtgcgctgccggattagggcattaagggggtggatttgcaaaaaaccaggcaagggcgctgggattggcaggcggttaagtgcaaaagtaccccatctctggccctagccatcggatgagcacatcatgtgatcttgattgagagtttccaaggttgcacagcttgcctggttttcacatgatacgctgccgaatctactaccccacttacttctattataaaatatttatatttcattaacactcatgattatttttataaattgatgtttgttgactcaaagtatacatctctcatctattttaacttttttcttcaattctgcgcggcacaaaaacttaacataatactaatcggtaataacatgataatcgattcaatatacatataaatggtcaaaccataatgattagcacttgttgaaaagcatctacatggataaataaataaattattatagataaataaattattatagataaaagtatattagttaaatggatgatataaacttgtattcgggttatatgaaacattttacccataaatataagaatttataaaacaaattgaaaagacaaattttgctccagaacatcgtgacttcgcagttgtgactgtaggataccgcacgaagtgacttctggaggaagacattcaataagcataagaatttaccaacggacaccgcacccattaaaataataattttcagttgaagagaagagaaaaatcgtgtgaaatatctaaaatacccttggacccatatgttagctctcccacctcacttctctctatcccctccgtcggcgtcgtgggggccattgctgccgacgtgaagcagcgcagattggcaagagagggaggcatcacgtgccaaccagccatggcggcacttaaaaacaataaaaacaaatcataatgattgaggaggtcactggcgtgaggagagtagcaccaccatggagagggtgttgccgctgaggggcaagcgtcacgtgttgtagtcttcggagaaaaatagcgaggggggagtgagccaagagtgggtgccgccgcagagaggtgagggagcgtcatcacacgtcaccgccaaggtgctgaatcatgagagtgagagcgaggggaaggtggggagaatgtgagagatgataaggatggggactggggaggaggataaggatgaagggatgaccgtgtgaggctcaactcagcttggtgatttagggtgtcggtttcacctattagagcatctctagcagcctctttaaatctgactcttcaaatatttatttggccagcttgccaaaacaaatgcatagttaaatttatcttcactccaacaccatctccattacactatccaatctaattgtagatcctacatatcagcatctctactatttcactccttcaacccccccccccccctctcctctctctcttctcccctcttctctgccgcaccatcagtggaatccacgcgtggacggcggtggtggaggccgcgcaggagcagggaggtggcgctagtcagcatcgccaccgccgtcctcgtcgtcacgggcataggaggtggagtccgtgcgcactttgtcgctgaaaacaactttatcaaattttggcaacaccaacttttgacaagttttagagttaccaaatttgacagcgtttaatgtgtttaatttgatgccattttaaaattttgtattgttttagtgagagagaagtttcagaactaccaaattttagtaggatagcattgatgccatcattgtttgttggtatattaccaaaatttgatggcaataaaatgaacaagccctacgtcacaactaatgctacttttcacttttcagaacgatgagaacagactctgagtatgccagctggatgcttagacctttggtgaaataaaccagacaacagcattcaataaataacgcagctgtacaacaatggtcagtggctcggtgcatacaatacgaacttccgacacacctctgcatctacccctccacccctccgtcaaaaaaaaaaaaaccaatcttagctacgaacatagacatatgcgtgttcaagttcgtagctagggtttgtctttttttgaggcggagtagtacatcacagcattgacaaagttaatgagattacagaggagcccttgcaggctaagaggacatagaggaaaggagtgaagaggccttttcatgtcaacacatgcctgaaatggatcaagaatccccttgaaagttctcatcttcacagctgaaaattaaaaccataagcaatctgtctgaggaggttttatcctacccattaatgccacagtgcatgtgtgttgtgttggattgggatacttctggtttaagaaattcggaggaaagccgaggcttcaaagacaaatggcagataggttngcatgttacccccccccccccccccctctctctccccaaaaaaaaaaaagggtcagccttcatcagttcaaatatttatcaccaaaatattgcttctttcactgcagtggccatctacaaatagcaaatctccatgaatcatcaataagataagaacatgatttagagtgtttcgaatgaaaacctgttattgaagcaattgttgtgttcaccagaagcaattcctatattcagctttgcaacaaacttagtgttatctctgggccttcgtatttcagcctatattccaaagagaaaagaaaggtttttaatacagtgacaaaaggatgattactaatatggttgccaactaacctggacagtcactttatcctgcgtgggcattgcagccgccattttatcaagaaatatcgaagtaagctgagagtaggaaatcaaacatgagtatgaactccaaatagttgggtcaagtaacagttatattaaagaccacaatgtttctcagactgaaggactttttctgcctgcagtgtcttccgttaaaaagaaaagagaaaaaaagatagtacaaaatatagcaattcaccaaccagaatggaggatagaaatgaggtgtggttgagagaagataggatcatagaacttgcagaaaaaaacaggtggggatacatggatggggattcctttttactatggaagagtaattctcagatgaaccagcaatagttggtgctaacatatttttttcacatgtttagcaatgcaattgaaaaccaaatagctcagcatcaggaaataaagttcttttttttgcctttcaactggaacttctcggactcaaagcactttgatattctcaataaaataactcatcaaagcttttcaaattcatataggatctgcatccaattcatttttcatgatcctatgataatccacccacagctctaactgcgcaaatggcaaacagaagtgctacagacaaacatcaataataatacctgagacagagagtagagaacaatgtcatcaacactacagatgatatcaccagcctcaatgctgctacaattttctggtaacacttctgatatctaaaaaaaatgtagttaagtcaatggaatgcaagaacagagaacatgctataagggcttgtttggtttgatgccaattttcgccttaccaaaattttggtaactttaatagtggtaaatgtacatttggtttggtaccaaattttgcctataatagttcagagtcaatactacaaaatttggtagtgccaaaaggcccaaaacttgccaaggttttggcactaccaatattttggtaggacaaaaattggcttcaaaccaaacaagccctaagttaatttcttgaagagggtactctggctggagcaccgaccataatgctgctcttgtgagggggagtccaggtccaatagaggaataggtgaagtgctaatcagatggcattggtctggcttcaccaagttagcctgagggtcgataattaaatgaggtatagtttccctcgcctgaatccaaaagaggatagcagatgcctacagagtggtattttcccatatggcacaggcacacagcttttcactggtatttagatgaaccatgaccttttttagttttgttttcttctaaactgatgatcttgatgtcatagaaaagttttattaaatctacagaagaatggaaaattgagataaagtttccagttgtacttattttgtttctcctaacatgatgtatcaatatgaaacttgatattttaaagaatgccgcaaataacttttttttttcacaaatggaaaaatggtccgtcgctccaagtttgcaaaacgacctttgcatatccatatcaaaagtttcctccatttgagaactccccctatatgttgatttctgtcaattctaacataataaaaccccaataaaaatcagtggagcaatagtgtttgactttggcatatgtctaccccgtataatttgtttgttcagcttagcatgctcgagtttgcagataaaaacaattacgtttctattaaaatagagagaacgagcggaatcgcacgagttgtaactgacatatcataagttgtgggggtgcttcctagttcctaatagagtggtatgtagaagggcctatgcaatttccccaaaaagatttcagaattactcataatcatgcctacactatagcttggaacaaatatatgctgatcattctagtatttttcatcattatttgagcgaacttattatgatatttatgcctattctaatccagttatgacaaaaaaagtaaactgatactgatgcatattttaacacataaaaatgtagggccacaagaagcaaacgatactttcacatcatcacatggcaaattaacactcaaataagtagatactcttccatgtatatgcaaaaacaaacctcgctctaacttgtagtaatcaaacacagccctttctgattattattggcagtggttcatcatgctctagatgatagtaagtaaccttcaaaagtagagagagaagaaaaggaggggattggctaccttctctaccacaattccagaaccagaagacagctcaggatacatgtagcatattttttccaaattgcatatttccaacttgtgaatagcttgtccccttatgcaaagagatggttgtttgagtgtcctacattcatagcgcatcacatctcttgcaaaagcattaaaacaagactccacaaatgcgtacagacatccataaatagcacaaaactttatcctacttctgttcctactactactagttattagcttcagcaatttatataataaaagcaggtaaaatttacttttaaaagatccaagagtgggtaaaatattatgcaaatatgtacttttttctaataacactggacagaatactagggaaatatttctgtggaaagacagaataaattacatagttaccaaggtcaaagagaataatagccagagaaaaccatgtcaaacaatgaaagaagagatggtactcaaggaagaaagtggtaaacacaaattcaacacgggcactgtggttatactatagcttgaaggatgctaaaacattagctaagttatcagaaaagaaaggcacccattgaacaaggatgtagttgcacccccttccgtaaatattttgtttgtttttttaaaaaaatctctagagatgtaataatatataatgttatgtgcacacaaaattttgaagaagcaacctttcaaaaccagaaaaataacaccctgaaccatatttcatgttagttttgatcgaacggagtggcttctcaccaacatgttcagtcaggtaagtttcattgttgtggacctattaagtatcatctacagtagcaaaatatgcataacaagagtacaaaccaggaaaaccaagtccacttaaaacaaaccactaagaaagtatgtctagggtgttatttgtccgattttgaaagttggggccttgggggtaaaaataactggttttgtagttgtgtgaaataatggacttcgagcaaagttcaagggccaaaaatgtacttcaccgaaaaaagaaaggaaagttgtctttctttgacttacttatcttccctttcacaatgcacatgtaatcatttttttgttcatttgcgtgtgtgaacatatttttaacatgccctacatgtatatggtttttccgaagtacgtgaatcgtataagtgcaaatttcaaatgggcatagccgcagagcggtttaacagattgagacaacaaaaattactcgcaggactaatgatagtggatcatagaacttaacaactagaaaaaacattgtctcaaactagatttaaaactaattcagaagaatccagattgctcaggtatgcaaaaaatgtacatgtgtgtggggatgacagtattacagactggcaaagtgcatatcatatcattaaaacccaaagagaaagcatacctgaaattcttgaagtgttccaagcatctcaccgcaatctcaataggcaagaatggaacagtatccttgtcgtaaaaagtgatgccgagaatcctcctttccaaatccatgacaaggcccccaatgaaaacctagaacaagataacaatatagtgaaatgaatgtcccttttaacgatgacaatgtccacacagcagcatatcgtaatgatctaactcagttgattaacctgcaatacagccacttacagagagctgttgaaaaaatatatacgtgcatgccaaaatgagtaatcattatctggaaattaatcggaactggacaaacaatcaatggatcataataataggcgcacaaacattcacaattaagtgcgagtaaataatttaaaggtatcaccatgacaaaaaaaaaacagtgcttattactaattcactgaattatcataataataggcacaaacattcacaattaagtgtgagaaaacaatttaaaggtatcaccatgacaaaaaaaaagctaacaatgcttattactaattctctgaattaataattagtagattagttggaccaacaatctaaaatacccccattaatgcatcagaagcaaatagatagtttcttaatattcagcgaaatatacatgacagtttcttaatattcagtgaaatacacatgacagcttaccatctataacaactaaccgaattaacagtatatttaaacagtccggtcttcactattgattttctagatattgataatctgtttaccttactaacaggacaagtgcagaccaaaagctcatcgcagtccaattcgctacgttcacgggtcatctccccacatctcactagtaaagtctttgacttaaagttacgagctacagctatcacaggccgacacagcatggaataacagacaggaacgtcatgaagtttcaccaaaggaagatcaaattgtggctcaatggtgacaacagctatattgtactgcagactgcacattgctaagaacccctcagtgattgttttgttgtgcagaagtacttcaatctgcagtcaataaactaaaacctagttacacatcaaattgaaagagaatgtatcaaaacaaacatgaaactgttgttatattgaccttaacatcaccctcttgataagcatcatagtcattgtcacatttcctaaccagagtagcagaggtgagtatccaagttgcagaacccacatgatcaaccattgtccctgagcaagtaaatagaacctttccatctgcggaaagcaactagtaggatcaatagctgctggtatgcgaattttgtaaaaaaaaaaaaaaagcatcaaggctacagacgatcagtaagattaccaacagaagagataagggacacgatggatttggatatgcttaaggccacctcttttgcactcaggccttcctctgtgaaatcctcttcatcactagagccatccttgtttattgcccccttcaaatcgctagcatcatatttgtcgacatccgcttcagaatcactaggatcatcaccgaacaataaactctccacatacaaagcagcatctgaggaattaaacaaacaagtaaaggattcatgctaaacataaacaaaaagatagtatattgttgaataataaagccttcacagctagaatcatctaaaaagggaagagattaggaatatgcatatagaagcaaaaaaaaaaaaaaaaaaggtttgcgataccttctgcacttctcttcttcttgttcggcataatatctgcaatctgcaatgaaataaaaccaggttgacagtgagtttcaagcaaaacagaattgactaggtaacttagccctaataaacacagatactacaatgactcccgactcaggactatctggaattcagagcagatgcggttgcgtgccaaatcaggccccaaggaaggatgtgtgtgagagagaaataccttcaccgccgaggagggaggtgaccgcgctgaggaagccccttgaggtagccaaccgcgggggaaggagacgccgaggggaggcggcggcagccggcagcagcgcccgggaccgcgtccagtctgcctcgcgacgaagggggagttacttgcttgggctaaacttgttgggggcttaatgggcctatgtgggccgactcggcctctggagcctgaggacggagaaagttcactttaggtccctcatttgtcaccgagttcgaaattcatcccttcaccgcaaaaaccagatacaacacatcccctaacttgcaaaaccatgcaaacaaaatcccttggcagtatttaacccagtttttggctgatgtggcgcctacgtggctcctttgactaggtcttcgtcccacgtggcgcttacgtagtaattcgatccgaaaaaataataaaacctgtgaggttcacatgtcagttttacacacgaaataataaaaaatggtggacccatgtgacctcacgtgtcattagggctgtcgacgagttgagctcgagcgagctcgtctgcctaggctcgagctcaatacaagctcgagccgagcctataaaatgttcaagcttttcaacaggcttggctcgagctcgactaccgagcttgatttttaagtaaaacaatatatatttcaaagataatctttaaaataataattaatttctaattcatcatactaatataagaggaaaaaataataaaataaatatatgatgtcaatataaggcatacaaataacatatttgatctcctaatttattaaataacaacaaaaattatatactgctaggctcgttggaagctcgagctcggctcgacaaggctcgcgagcttaggaagaggctcgggcttgacagccctacatgtcatactcactactctctcctctccatccccctctctctatatcctctctctcccctcttctctctatccccccctctctctctggccaagggagcggggtagacggcggctggatcaggcgacgggaagggcagagcggccctcgaccaccgctcccgggtcgacaacatcaccgccaccaccgcaatgacctggctaggggaatgggggtaggcggtggccgaatcgggcgaggggaggggcggagcggcccgctgccaccatgacctcactgtcgcttgcctcaccgtccttgtcgctgcaactgaagcatctaggctcccggtgttaattttggtaattaatgacaagcgctaattgtggactaactgttgtctttgagctatatattttaagttaggaccacgtcatatgtgcgcatcgatgattatcgatggattaaaattgacggcgcaaagcaaagggaaagaagacggtaaaactagcgatttaatttagaattgatcgaggtgtagggcgatcaaatttgctagtttatttttagtttcgccgtactattaagaggggtaatgacctagcaaagagatgattttaattgccacattaggtcattatgcatttagacttgagctctcatttctcacacacacacctttgcctttcactgggttcggcctgaccaggggcggtcagaccggccacatagtagcggtctgaccggcgtgccctggccagtctgaccggccccaagagggcggtctgaccggcgcataaggccgatctgaccggcggcgcatgcgcggtcagaccggccccctggaggccgggatggtgctgctcggggtggccgatacagagccgacgaagccgtattcggtcagactgagccgatggcggtctgaccgagccaaggccggtctgaccgcccgctcaacgccagtctgatcggccatgccgatggggccctctgacagcactacaacggctagttttctagccgttgcagagtagcacggtccgaccggccacatacctccggtcagaccgacagagcacagagttgggggatttcgcccccaacggctagttttcatgggtgggagtataaatactcccccaccagcagcacgggggttctcttggcacccaattcaattgcatacaccccttgcacctctctcacacccacttaagctttgtgttcatccatctagtgtgttagagggttgattagccaagagtcaagtgcattgcttccattatagagctagtgtggcacttgattgatcatctccacgccgggtcattgcttgttactcttggaggttgccgcctcctagacggcttgtggaggagttgcccggtgacctctccgagaagattgtggaggaggcccggcgccggtttgtgagtggtttggagttcaccaccttcggagtgaaggaagaactaccctagtgatcgaggcttgggtagtcctctccgtgggccggctcccgccttgcccaccccttgacgaaggggacgtgtggtggcttcgtggttgagctgtggagttgggctcgcctcaacgggaagtaggaaaccggcgagtttccgaacctcggtgaaaaaatctcttgtctccttgtctcatttgattgttgcatttacatttgtgcaatttacatttctagagacatacttgagattatatcaccctaggattgctaaacattgacataggagtgtgatttactttcctagagatataattgaaccactatcaccctaggtttgcaaaacataacttagttgcttagttagagttgaccctcaccaagcctagcaacttaggttagttttgattaggtgtcatttagttttaaatcgcctattcacccccctctagtcgacatctcgatcctacagcaactcccctgtgcaggaggcactggggttgctgtcgcgtggagtcggcggggctgcaagtggcgctcgctcctctccactcaccggccaatggctatggctcgagaaacgcacttcctcctcttcctccccttactcctcatctcctccttgctcacgcccgccactatggtggccgcattcgtcagcttcaaatcatttcacgatgggggaactagagatagtggcggcgggcgagctcctgttacgctaggggtgaaaacgggtcgggttcggtttgatctcacccttcccatattctaacccatattttataatcggaatcgggtcggacacatatagtgccgaatatggatacaaactcggataatgtcgggcaaaaatacgaaacaaatatgtaccaaaatgcatacgtacactatcggttacgaatatttatttggatatcaagttgaagcaacaatcttatatatcatatagacaataaccatttaacaatttcatatatccataatacgatatattaggctattaggaccttatgaaaaaaatatggtacaatacaaaatagtagaatcaatacatagtaccagatagtggctcacagaaaataatacgagtaatatccgtataattatccgggtaatatccggattttttaccggataatccgtatctatcgcatactaagttcctgaacccgatctcgtatgctcaaataagacccgtattcggacccgatatgcgtgaaaagtcccgggtacctaaatttgtcccgaaataatgtggccgagctggcgggcggtaaatacccaccccgttttcacccctatgctatggtttccaagccatccaaattgccatgggacctatattgcaccggttttaatagttgagagacccgttgaatgtggtgtttcggttgaaagacgaaaatcagatttgttgacaagttaaaggacctcggatgaactttcccctgtggaccaaccgactgggcctcgcgctcgcgggatcgatcgatatcgataccaccatcctctcctaccgggaaacgccgcgagcagcgccgccgtcgcgtcgcgccgatctccacatcaccggcggcgacttgcgagcaccgtgccgggcgcctactgcttccggcgcgtactcgactccttgcgccaaagtcaatctcccctcgcaccgtcttctcggcctcagactcccttctccgactcgctagttcgccccgccccgccgcgcctcgccctcgcctcgccgcctgcgccggtttccatccatcccgcgacggacgggagcatccgtcgggtgccgtcgtcctgctgcctccgcctccggtgagcacccgtgccgaaacgcacacgcacctcctccctttcgaatttgcctgttaacttctgttctagatctggaaactaggttaggacaggttttcctctttgtcttgaaccttaattattagtatagcagttttcccccgccaaaataatctggggggtttcaactgtaacccccatgaccaacgttaggtccgcacctgttgcagaaccttgttttcttgctgacttcaatttgtgggttaggtttaatgcatgatgctgcagcatctatgcacacgatttcctatgccccactttgtagtgcaatcagttgagaaaaaaaaccatggcgtagaaaatgcgtgttgataatcacagttattttaatatatatttttacttcaaattgcagttggaatgcctgcctgcgtgcatatgatagtcatcggctcttatatatttttatgtcatctcaagtaagcggtacaattacagcattctcatgggaattctgtagacagttggtacttataatgtagtaatatgagcataatatatgcaatcagtagcaagtattttgttattttcaagttcattcagtcggcacataagaactgtgctttattaaaagaaaggaaagctatgccatcatgtactatgggtataggagaatatgagagatgggattgagaggagttgctgcattactcctcaatttacagaaaagagattggctgtggattttaaactccaaacatacaacgatataccatagcttctattgcatctgatcattggatagtataagatgttatgatatcttcataagctatagtatatgatctaataaactcaaaaatgcaccaaattattaaacaggtcattactcattaccatgttaagtactatcaggtactactccctccgttccacattaaaagaggttttggcctctccatcccttgtctagattcaccaatatccacatgaatttggacacatatatgaagcacatacattgaatcatgcatgaatctattcaaaacccaaaatgttttttaaggtgaaacagaggaagtacactgtttagatggccttttataaattataacaacatctcgaattgttttggctcttatccatgaaaggttcggaagatgatgagaaacaaccaaaacacacaagtagaaggagcaagcgcaactaagaagcggaagacctcatactctaactccaacagagaaggtgaacaaagtgcaatcacttcgggctcttattcttttctacactaattccaattagtgttaatactctttgttgttcattatttgcagattcgtcaccagttgtggatggttagttttattttggcacatttcatctatcttcttgtatatggctttttattattaattgtgtcaccttttcaccctgttgcaccaggcctcacacgcatattgcgcagaaatcttctcccccgtggttatcctatgccatctgagttcactggcaagtacttgtgttttgatccttcacttcctttctttattttgatatatgtttcttggaattagttacataacacatgttatcccgtgtttctttgactagatggtatgcacatggtgaataactttgaagaatcttttggagacttggatgactgcaatgaagaatacagcaaagttaatttagttgctctaagaatatctcagtccgttgtctcacttgcttcgtttaagggtaataattcactgtctcagcatagacaccaatcaagacaaacagggtaacctacacagagggtaggggataaggagttcccatctgtgtagttccatcacaaattggtaatttaaatgttagtcctgtacagggcgaacgagactgtttgcatgcacgggtacaattatggagtatggaccatctaaaatgagcattctgacttccgctagtttggttagatgcactaaagatgaaaacaagacagatgaaaaattaaaggtcagcattcagccatattttctcttctgttacttctttatggtcttagcttcatgagatgatattgttgtcacttggttgtagattaaggtgcgcctacccaatggcaagcttaccgaaggaaaactgtggaactatgatttatattataatattgctgttgtcaaaatcaagtatttcccagaacttagtacagcacagatacataatcaagggcaatctaatgttaaattatctcaaagtaaactggtcgctgttggacgtggctatgaatctggagaactaatggctacaggtgggacactgctgtacaaacctagcaaacttgactgcaaggaactcatgacctccacttgtaagatcacaaaggtattacctctcatttatttagtactatggatagattatgattgcggttggtttatattgttaatatgcatattattcacgttgaaccgccttttaaaaaaagatcatatggaaagacattaatagtgcagtttaaaatggaatctgttatgcagcagttgttcaccatcattttattttgttacaggctgggattggtggtccccttgttgggtttgatggaaactttgttggcatgaacttttgtgataagaaggaaactcctttcttaccaatcaatataattcggaaatgtttaaagcactttgatatgtttgggtatgttttctagttcttattaatgtacttccaataatcttcacttgcaatcatgtgtgctaatggacaaatttgttctccttgaccgtccactctttgaacactagcttgattgtggagagattatgtcaggactcgtgatggaaatacttgttggcttgtttagttgatacttagactggtagtttattgcttaaataatttggataggtcaaaactcaaaaccaacattctaagatgagtcatcatatcctgatcaatcaaatttgcattgccattttcttttaagcgagttgtagtgaatgcaaaaaaattgtattggataaatgctgtgagctcctcagtttcctttcaactgtcagaaccatttttactaagcaagaattatgaattactatgcagtatgactcaaaagctgaccaaccttagtttcatggcttcatctttcccctgagatccatccacccttgagtcattgccatctggcactactcagtgcaatgtttatgcctattatgaattagaccattttggttggtacttggtctgaaagatgaaatatttacaaataccatcgcatgtgtcattgacatgtgggccctggtccaaagtgtcattctcacatgcaatggtatttacatctttgtgatggtacaaacctatttttctcaatgaatgattttcataacatttggtatctgagcagttgattcatggcatttggtatctgagcagttgatcctgcacgccttgtactgctaattatccctttgataaagcattggctgtatgcagaatacccaaatggccgtgccattgctgccaatatgttgggatttgaggattcctgagtttgacttattgcatgtctcgatttcctttaacgtgccaataagttatatacaacattaagatgaatttacacaatagcatgaataaacaaagacaagcttctataagttttggccacatatggtcgaattcggcaaccaaagtttacatgttttcctatatgtcatggaatatggttcagtatatttttcctgtgaaattcctactaaatgaaaccaatcagggcttcaggactaatagaaaccccaagtgtgttacagaagagcatgaataaataaatacaaatttctgtaaaatttggccagatatggtcgaatttggcaacaaagttcatatgttatcctagatgtcatggtacacagttcactatttttctttttgtaaagtttctactagttgaaaccaatcagggtttcaggactcagagagtactccagtgtgttaaatccttcagtaagctttaagcaagtgagatgtctcatattatttcctttttaactttggctagaaattcgatttatcatgacaggagctgatttttttatcttgtttcattgattatcaaatgtataaaatgtgatattgcttgtgcattacatgctttctctggtggatgtaccaagattttttttatggtacaacttttgcattgttgcggtgcaattgtacagccctgtgagatgccaccccatggtttgacttggacaatgctgttcagtggttcatttgttgggtgtaaaatagaatggctcagttagtgataggtgatccatcgcatcacaattcacaacaagcaggacatatagatataattttcctgctacctcagttttccctttgtgatggctgctacctcagttttccctttgtgatgggatctacatccataaacatcagcagcacactgctctgccaccttctcggatgttcagcagtgccacaatcgctgcatagcaggctcgttggactgccaactactgagaagaggaccgacaatactcataatctccataattacattctattaatctgagccgccagactcagctgtttctccaagccattagcagtcatcaagtgtagttgcagtccccatactgagcaaatcactgttcctccagcagtccgctagtcccaaaactgcttagcctggttctttacttatgcgggtcatttgcacaaaatctatttgatgtgttgaacctatatgcaattttgtatagttatgttttctgtattgctagtttattttaaaattattcaatgtagtccgagtgcctcagtctaaatatttcaatcatctgctaaattttgagatatatgcaggagagttgttcagccatggcttggcctgaggattggatcactgaaacatgaaaaactggatatccgtgaacaaatacatggaagcttctccaacacaggtggcatttatgtaaaagaggtgaatatccattcaatatattcgacatacaccagtttgctgcatttttgttataatatttctttttttgtcctattttcttcattacactgcttattgggaccaaaattcaatttctcagaaaggaacctttagtgtaggtgatccagcccaggactcggttgataagaattggctgtattccaattactcgcttttacttaaattatatctcaagtctaatccatagcaatagcaaaatacatttttataaggcatgattaacgcaagcaagaaccatcagtaagcatcgataaaaaatcattaattaaataactagggcaccatggtgcctctgtacacagaaagtaggtatttttttttcctaggtatcatgctatagaaatttgtttcttttttggttctgggtataaagtttaacctgtttagaagttagttcaagcaagtttgatatgaactttagaactatatataacgctttcttttagtgagtgttggtttgtaagtatatgctgatttctttataaaaacaatgaattcttgaaaactctttcaattgaactgttgtacccaaggttgtcatgtcctaaagtctagttgagtcagccctctacagacttgcctaactatcaaagactagttgttgaatgacttgtcttgggctaaatactacatatgtaccagttgcctctattaatatgatgtcctctcctcacctttccaccaggcctctcccaagtgaggcccagtttgctccttagtggctcattgtttctgcctttgctccatagcgtcttctgctgtcaacagtggcggagccatcgggggtgccggagggggccagcacccccctatccgaccccccctcctctacgtataagaccaggtataaagtgtcagttagcccattagcaaatctagaaaaaacgtcagccaagcaagaaacatgatctataaaattaattaatgagagagattagagaagcagcgaatgcctcatgttcatcacttcagttttgcacccgtatgcgacagcgatgcacgcacgtctccgtcctcccatcctgtcttgccgttgagcacgcaccgatggctgtggcctgaggtctgatctctcttacaatatagcaatacctaaatacatgacctttagtttatttcctatccctaatccatagattgtagtcagactgagtactcagtttgtgatttctcatcttttcaaaataaaatagaagatgcttatttgtgagattcttggtagtttacgttgaaacgatttagcaataactaaggactagtttcaaactgccagtgatattattaaagagctaaaatttaagttttttttaaaaggactagtttacgcgttgattgttatcgacagtgaatatttggcctcatttgctatcgacacttgttaggtcctatggcttattcctcaacacatcccccccccccttcacatcctggcttcgccactggctgccaacaagtcaagttgcggccctcaagttgtgcctccctggctgtgtgtataccctaacaaagagaaatctaaaagttatagtcaaatcttagttgaatgtgcacatttgatgtcatgttgccaccttcagctttcttgtattccataatccagacaacgacaattcatgggccattaaaagacttcttcctttcttgcttacaaggtaccatggcggcccatgtctcttagtcctatgcgtctctgaaatcactatctactattcattggttcctatttttggcttagagaatggacaagtatcccagtagtttcgttccagcaacatttcagtctaaggtacctacaagtgggaacatgcttactagtggatttagggagttgtgatattggcatggttagctgtaaactttaatccttaaaagagggttaacttgagatgagatgaaccttcaaggggagatctgttaatggtgaataatttcatgcttgcattccaggcctgaggaagggatgtaacacatatgattgacatagtttctgatatatttaggagtatgggagttgttaccctgtttgtctcgattggtgtctatgctgagacagtgagacataaaagatgaattttgctatggtgtgcaactatctgaactaggagtgatactcctggggtcgctgtagttattttcttgtactaatatcactcacatccaatacatgaatgtggcattccatagaacacttgcataagatgaggcgatgagaagcagcatggtttatgaatgagtttgatattgattgataaaaaaatcaatgatagaaagttgggtcattgtactgatctggtgaggggatcgtgtggaaactggcagattacttgttttgaattcaatggattattttagtagtgaccagtcaatagccagcgaaccactacctggccttttgtgtgggcggtctggtttcatatataacactctggttggtactgttcaatgggttcccttatgtgtatctctttttttaggttcgcttttatctgagatcatagctgcaatgtggcagaaaacttttctgttttctgatgatggacggccattttttaactgctcctattggttctcatacaaatttcgatcatttatccaaatcatttttgttgttttcctcaagatggtatatttaatttaacttgcagaatctatttcgttggctatttaaacattcataactttcttggttaaatattagcttttcataactttgtttgaacaatgataaaatgaggtatccatgttagctttgatgccttgtcaagtgctatgctaaatcctacttgagttagaacaaaaaaaaggcttagcatctatcttgtccaaataagcgggttgactgtgaacataattagggcttctatattaattttttgtgtagtacttacttcaaaatttactcgataggtttttgatggatccccagcagcagattctggaatcaacgttggtgatgttattaccaagcttgatggagtcgatctattccatgcacaagaggttctgtttcaaaagttctttgcctggaaattctagtagttaatcttaaaattgttttggaaaatcaaactgatttttcattgtggttcttctgactaaaccatttgcattttgtcccaagcaaaatctactagccaaactgttatagtgctattacctgttccttccattttattattcacatccaataattttcactatgtgaaaactatactgttaagagttcactgtgataatatattgttttggtgaacatgtgaaagatataagttcttttcatgatgtgaagtttcactgttagtagatcgctgcaggattccaggatgtaacaaaatgaaaaaaatccagtgcatgtgtataatctgttgtagcataatgtttacttactgcagactagagttttcttttcagtgcatgcggtctttttgttggatattttcttcataattcaatttaatatgtttactttcacaagtgagttacaacttacaagttcagagtaaaacctagcatgatgacttagtgttttccatctttttgaaatagctcaattagtatctggtaccattgcaataatcttaatttgcatgtctgcattttttttgggtaccatttattttgtaatgtaggcaatagaagtcaaaatgtgttggtaagataaggtagtaacgatgtctttacttgctgtatgtatgcaaaacagaataatacatgtttgcatagtttccctttttgatggatttcagctctaatttttcttatcagttctatgagcttattttggggaaatcagaagatattttgcgacgtgatgaagagatgcttttcaaggttagctgcagtgcatgttctaaggatttgttaattgttataacatgcgtacattaattattttttatgacattctattgcatatatggaataggtgtctattctaaggccaagtaacggtttaaccttccgtgcaattgtcaatgctgaagtggttgacatgagtaggaagaacaggtttatcctaacgctctacagctagtcttgcaaatttatgttctaatgtttgtattatgtctcttaattgacagatggcctgtacctaaggcggagtggctatatccatgtacggacgatagatgtgatgaaattgtcgcgcctgatccgatagttattcgaacctgtgaagatagctattatttacgtaaggatcttatttcttacttttcactatattataatagattaatgaactaaaatgcgtcaaatatataacattgatatggcctctgtcaatttgaatgaatttagtctgtactgcagcttataaagctgtcccatactatcagtctaaactgcatgaaaaccacactctgtttctaacattttttcttgttacatgacgttaatgttttacaatgtgtttaaacactatttttttgccatatctttcagccgcccttgatgagtctgaactaagactatattacggtgaagaatgaggtggagaaatcttgcattaatcgagaagaaatcttgcattaatcgagaagatatgctgagatacttaatggaacatgcaccgcaagtttttgttgacattcatatttggcaactgaatagggctacaggagtgaaaaaaaattgcatgtctactaatattagcaaattgcatcctttgccagctgagtaatatgaattgtgttaatgcggagttgttccagcaagatgttttgtttggcttttctgtttttaacaagtttatgaaagcttgggtagtatagcatgatttataaattataagccttgtgacttgtgagacgcaagtcctatcgcatacgcaaaaccctagccgcctccgcccgcatggccgcatcccctcctccctcgtctcgccctctccctctctcgccgccgccgccgcctccgcttcgcgccgtcgctatcgtcgtccgcatcgcctcgcgcctcagcctccgcctccgtcttcccctagcgccgccgcctccacctccgccgccgtcgacgtcgccgttgccgtctctgagcgcctccacctccttctccctcgcgtcgccgtcgtcgccgagcgcggacttcgaggcagacgcggagaaagcgacgaggcgaacgctcctctcctcttccactctcgtctctcctttgcctacgaggagctgtgcctcgccgccatcgtcatcgtcgtcaacctgccgccgtcgtcgtcaactggccggcctagccgctcgccgccatcgcagtggccagatctgatggcacgaactcaaggccgcctgatctgatggcggtgagctcgtggctgccgatggttaggcggttggtggagcaaccattgtcctcccaccaaccggcttcaccctttccgccgccatcgacaccttgtcgctgtgttggacgaggggctccgcctcttcacgcgcagccagccgctgcgtccgatagaatcctcctcacgcgccgcgaaccatcgatggaccagctgaaggagctcgggtgggccaagcggtggagctcgcagccatacgtgtcgtgccgcacggtaagtgctatatcttctcaagcaccaagcgcttcgaatttgtagttgcagagagcattctgacctgcttctattgtcaggcgtcaggtagagttttgggtcaatgcgattgcattggagcttgaattgattggtgttttatttatgaactgtgacagacatctctgcaagagctcaccaggcttgggataaagcacgtggagaacctggtgattccgagtgtcagaaatgatgtaaggcctgctaagcttaaaaatgtatttgtagctttgtttagttatttggaaattgcaatggtgcaacagagcgtgatgatttgatggggattctggaatcaagcattgcaaaattgcaaatgcagaagaatagtagtgccataatttgttcagaagcatagtcccccattttccttcttgtgatcacgcaggcagcattttttttcactgttgtcggttcaaccggattcctacccattcgtgcaggccagcttagtagggtttttccttgctacctcctctttgtgctactctggattgataaaaataatcttttttcccttacaagataagtgcattaggcttcggtcacaggttcctgcaaaataatttttctgttgatattaataaacatcctgtgatatataattttagcttttcaaaattctctatctcaggattggggctttttggttccttacttgattggaagcatctcattgatagtattagctatcggaagcatttcaccagggtatgtgtttgttgtctctgctaataagcctgtgaaagttgggaagagccggcatcaaacaatccagatgtctgacatattctaagattctttaaatggatattcaagcagcaaaacttatcagcttaattaatttaatgttatgtcactcaacatagactacttatggcatgacaaataacactatctgttttatgaatgctcaatgaaaatatgttgcaactttatcaaggatatattgtaattttccattccatcatcacagtcttctgcaagcagcaattggcgcatttttaactgtttttcctgactatcaagacagagttgctaggcatgaagctgctcattttttgggtatgtctccagttctgcaataggagtatgtctgaaaataggttttttactgactatagtttattgaatattgaagtgccttaacaaccaatcgtgacaacagttctggagcagttttagtataatggttaatgatgatattgtcattgtaaagaattatgctgaactagccatctaggtaaaggtaaataacattgatcggaagaatcacttgaaatatctgaagctaacttgagtagaactaaagagcaatacaaaaatattttttgaagctaagctaatggttagatgagctggatatgaactaaggctgtcaattggatcactccattagatgcaagacaatcatactgacctttcagattaattaagttgtatattctcagatttttcaggcccatagacagttgacagccagtcagccactgaaaaagtacactattactagcttagtttttcttttcctacttctacttgacagattaagtcttgttttttactatatgcttttaacatctatttttggaataatagttagctgccttaggatgtaagccactagtagttttccttaggatgtaagccactcctagtttcttaggatgtaagccactagcctataccttatggtgtaagccactagcctatatatatgtttccaaccagccatggttgatagagtggagaatagaaattaaaactagccccaaacctgtgttccttttgctaacactacttggtcagtgtactacttaacatttttatataaataatatcgtggttgtgattgggcatctactggaaaagaactggtaggtcaatgaatccattacggtgcttgtgttgcagggatagttctctcgtgttgcactccaggtgtttgtagttttgccttacggaagagtagtttcagttctgctccatggcttgcagtggttgattactaggggttgatcactagaggtgtgattcatgcttgtcagtactggtaagaaaattcacatattcctgtcatcctgtgtttagtgaggacttcttcttcatctattacttccactgatcagtcttcaattttgg

SEQ ID NO: 23227 - DNA, 2341 bp, Oryza sativa
tcctgcacccacattaattttgtatcataaggcgttgatacttgatgcctcgaaattttgtccagatgcgttttgttgcgacatctttgattggagggagcattgacacagcgcaaatgtacattgtgtttgttcatgtcaattcatgtaaatgatccatcaaactgatgatgtaactaataatattcatgcgacatatttgtggcaattagtgcttgcacacatatatttttcgttgatgagatctccatgtcttctagatatgacacctcgatcgacctcttcatgtaaatcatatcgaggatgaacacgagcatatcataaccttgtcagcaacaaaggcggcgtgaggaaggttatctatttgtgagcaactgttttttttttaaaaaaaaaggattataaagcccagttcaaatatcatcctgagtttgagtttgagaaaggctacctatttgccgagcaacacacgggtgcttgtttatcacacacgcttggtgatctgaagatatatagattcaaaatgttaattaatacatgcaaaaatatatagatatacttgccctcataaaaaaaatctatgacattcaaagtgtcatatattactgatcgaagagagtatttatcccctacatatggtgcgtcctgtttcgtacaaccttttgatttttattttcaagtcaaacttactattttttaaaaaaaatagcattatgcgtagcattaaatattttgttccattaaatccaatatgagatatagtttgataatatatttgttttgtcttccaaaacttgataatatatttagtttgaaatagaaaaaaaatcaaaatatccgagaagcttgtagctaccaacgtttataattttggtgaaaaccaaaatttctgatatttcagtagtaaccggaatttcaaatattttgggaatttatttttttaacgaaattatttaaaaatttaataaatttgactaaatgtgaataaattttaaccaaattcttacataaaaatatgaaaaaccaaaaattccgtacaagatatttgcttgccggtgtgagttcgcagggatttccgaaattactgaaattaatttcagatatttcgaactgaaattttaaacctggtagcaacaaactaagggggtgtttgggaactagggacaaaaatttagtccctgtcacaccggatgtttggacgcaaatttagagtattaaacatagattaattataaaatacatttcataaccttggactaattcgcgagacaaatcttttgagcctaattaatacatgattagcctatgtgatgctacagtaaagatttgctaattatggattaattaggcttaaaaaattcgcctcctggattagttctcatttatgaaattagttttttttattagtatatgtttaatactctaaattaatgtctaaacatccgatgtgacatggactaaaaaattttaaccccatctaaacaccccctaataagaaatactttctccgtttcaggttataagacgttttgactttagtcaaagttaaactgttttaagtttgaccaggtttgtagaaaaaagtagcaacattttcaactcaagacaaattcaatatgaaaatatattcaattattaatttggtgaaactaatttagtattataaatattactatatttatctgtaaacttagtcaaatttaaagcagtttgatattgacaaaggtcaaaaacatcctaaaacggagggagtcctaaaactaattaatcaagtctctgctcggcgagctgctacgtcgccgccacctccatcttcccggcgtcgagcaccaccagctccgccgtgcccgccgcctcgtcgtggaccatcaccaccacgtgcccgtcgtcctccctgcctccggtgccggtgccggacgtcgccgacgtcgccggcacgaacgtgggctcgccgctgaaccgtccctcgccgtactcgtgcacggccgcgagctcgccggtgccaaggtccaccttggccacgccgcggcaccgcggccacggctcggcgacggcgaggtaggtgaagcgagtgcggcggccgagcagcgaccggttcaccgtgccggcctcgaggttgagccctggcacgagctcgcgccggctgtaccgccccgtccggaggtcgagccggacctcggacaggacggcgcgcacggaggacaagagcgcgtcgggcggcgtgatacaggagcagacgatgacgacggcgggttcgtcccaggcgttccagatgtggaagcagaagcagcccggcacgtcgaaccacctcattctagagacggcggcgcttggccggaaa

SEQ ID NO: 23228 - DNA, 2515 bp, Oryza sativa
acaggtgggccccacctgtcagcgacaaccaaagaaggagggacacaaaatggactagagggcccgaggcccaatggagagggaggaagcaggccgggaggagacaggatgggacgagcctgagggataggaaacgaacttgggccaaaaatggcccaaagacaaagaaggtgatttttattttttttagatttaattatgattaaatgaactttgtgcttttaaaattatcttttgagctccgaaaattcacgggggattccagagagtatattaaggcatggagaatattacaaaaatatttctagctatgattttttaaaggaaatatttaattcactcattaatttcacttgataaattgcatttaattttaatttaatttctagaaaatatattatttaatgatttttaatcccgaacgaaaatcgaggtgtgacaagaggattggtagtattatgaatctgatgaaaagagaggatgcggaaaacgagaaggatgttggagatgcatcgtctgacgaggatattcccatggtttgcaacaaggatttttcttgcctgattatttcagatggccatcacatgccatgggagtataaggagaatgaggtcgtgcaaggtgctcggtatgctagattggaggatttgaaggaggcggtgaaacattttgttatttctttgcagggagagtttagggtagggaagtcttgcaaaactatgtatgaggttaggtgtgtgacggaggtggactgtccatggcaggttcacgcatacaagggtaaatggaaggattgctggcaattctcgattgttacgaagcatgtgtgccacttataaggagtggagaagtactaccgtaatattacatcagcatccatagcagctgaggtgtatggccatgttatgaagaacctaaactttgaaccaatgtcaatcattatgcacataaaagaaaaaaaaatacaagcacaccatcagctatgcaaaggcatatagggcaaaacagaaggctatagagacaaggtttggcacattcaaagcatcttatgataacttgctgaaattgctagcaataattcagtttaggaatccaggcacctgtatcgaccttcagcactattcatcagctaagaatgatgagggcaatgcaagcattctgcagaaagcattcttctcttttgcagcttgcatcctagcatttgtgcaccgttgcctcatcctttgcattgatggcacattcttaaccggcaaatatagagaccaaattttgacaaccataggtgttgatagcaacaaccaattgttaccagctgcttttgcattcgttgagagtgagaacactgataactagtattggttcctaagacgagtcaaggaacacgttgtgatgggaagaccatatgtttgcttgatacatgactgacacataggcatgacgtgggctattgatgatttgaagcatggtagctctgattacggtgcagccaagtggccagatgttaggaccagatggtgtatgaggcatatgggtgctaacatctacaaacaatttagcaacaagagagtgatggaccttttcaagaggttatgtttacaaaaccagcagaagaagtttaatgagttgtggtacaggttggacgacttgacagctaagcaaacagatgagaacagatcgaagccatagcctgaaggtgatgatgctccagaggcagttggtcatcttacaaatggtccaccacgaatgaagaggaggaaagcatcagaaatttctaaattttcagagtggattgagaaggaaccaaaggagaagtgggctttattgttcgataaggatggttcacgctacaatgtaatgactacaaacttggcagagctatacaactgggtcatgccagacacacgtgcgctcccatttattggcatcgttgagttcattttgcatggcacttgcaagtactttagggattggttgataacagctgggccttccatgttagacaatgggttgatatatgcccacaaagtaaaggagtacattgatgaggatataaagaaggctcggaatcatctaacaatgcctcatggtacgacgaagcatttgtatgatattcaatgtagggataaatcaaggcgtggtatcaactgtaagagagcgttgcaagagtgtgtcctgaaagctgatggaacatgttcgtgctcttgctaaaatccatatttacttcacaagacatgcacacttgtactcgccgctatagcacgcccaaatcaacgctggcggcatcgccagcttgcggcaggctcagtcagtgggacatctaagtaacagggatacaactccaccagattgctatatgctttatagtagtagaattccaattacgatatggacactcaccagcagtgcctgtcgacatcttgaaacaaggaaccacaagaaactaagttcatacagagaatagtaccagtaacaaagttaaaatcacaaactttatgccatgctgggctgcaggaat

SEQ ID NO: 23229 - DNA, 5489 bp, Oryza sativa
ccaatggtgggttgtgggtgcatggttttgctggttcgcgggacgccctggaagaacttatcgtacttaccacaagccaacgtgggcaacggctgggcttgtagtgtagctttcctctagccgacgctcccaggcaagggtgggcatgatggagcggggtgggccctgcgacggcttctgtcgcttccggattcacctaggcacgagaggggactgcccgttgcccgctggggacaagggtgaaacctgaggtgtggtgtgcttggctagagggggttatgcgaagggtcctgtcatggcctctttccggtatgtcgtggtggcatgtcggcgcacggaaacgtgtcatggggctgtgtcttgtgggtacagttgtacacctctgatcagattcacctctgtgtcttatgggcggtcaacctgattcaccgtgattagtctcagcctagcttagtctaatggaattgaatagttcaggtggttggttgggcctgttgcaacgtggtgtagtgttggacagtggatggttaatattgattaattactacaactgttttactattttcaactactgtttataaatgctagctttatgcaaatgatcccctttagccttcctttggttatatattgcatcatatcctccgttctggtatgacttgttgagtacagtggatagtactcagtcttgctctatctcccaaccctcaaagttcgtgtgtgcgtccgatggtggtttctctgaggagtgggcttcgtccgtgccatcgaggatgcctgtggggtggtgttccggcgacaatccaagtcaaggcttagctcctgttatctttaattttccgttgcattcatgtaagacttttataatgtttgtaagacgtggatctgtaagacagggattttaatgtacattctgcttagaattctattcgggaatttctgggcatgacaagggtcttgtatttatacccacagatgtccccttgtccaattagaaccaagtagacaaatatggatacgatccgagtagtccttgtagtttccaacttgaactttgctcctccctccttatccaaaacaccttccgtatatgaggcatgattccgtataagatttagtatattagaccgagcccaacccaagatcgtggggtatgccttatccataacactgacaagtatctttataagttgatgtgcatattgggatgctaccatgaacttggctaaggctgtccttccaagaaaagcgttgtatgtcgtgttgaaatcggccacatcgaaagtaatcttctcggtacggaagttactggcagagttatcttccctagcagttttgaagacgattcaggtgtgatcttgtggaagggttgttcagaaggctttagctcgcttctggggattcccattacgtcgagggcaccggtgaagagaaggttgattaagctgcccccgtcaattaagacacgtggaactttaatatttctaattgtgggctcaaccactataggatatcatacaggagtagtcttcatggtggggtgatcatcatctgaatttaatcttttgatctgaccaccgtagtttgacatttggcccctaggatatcaaacagacttcacgtttcacctttttgcattctcttttcgaagagtaaggagtgcaaccactgaagatatgagcaacgtggtgaaaggggtctagaaagttagcatcgtcctcggactatggatggctatcctccctctcaacaaacatactcgttggtctcgtgtgagcgccatctattttgccatcgccttctgaaaaacagagtagccagccaaagagtgagaacatgtcttgtttattgggcaccacttttttcctgaagcttcaccttgaatttcaaatcagcactgctgttgggggctcttggtcaatgacgagaacttcggcctcagccttgttctttttgttcctcttgaaggactgcttcgtcttcttgctagttccaggttcttccttctttgctggcaccttgtcatcggacactttctcattgccatcgtttcgtcggagagcttcgtcagcgtcagcacatctgtcaacgatctcgaatagattcataacagaatttattctctttgttgccagctctcttgtatgatataacgatctccgactctagatttgaatgccctgatgacagaagtgtctgtgatgtcagggatagtattacggtattcattgaatcaccgtataaaatccctgagaggttcacctttttttgtctcgtagcatgtagatcgtccttgacctcatgtcttttgtacataccttggaaatttatgacgaattgctttcagagatcgctccatgatccaatagacgacttgagaaggtgtataagccatgagcgggcataacctttcagcacagtcggcaagtaatttcccaacgtgctatcatctatgccagctccgtagaggacggttgaatagacatgaagtaactcctcaggatcggtgttaccgtcatacttctcaacgggtccggaagtttgtgggccatcggacttcccatagataaggcttgaaagctctgtagccacctccaggttagaaatctaatcgacgatcatcatctcgagaacatctccgtggatgtctacttgatgaacatgatgatgaagaagatggatcgctgggatcgggatcccggtgattattgccttcattacgtcgtgggggtgaccgggggtctcttcatccccggttctctcggcggttgcaatttttatggtaactggatgataccccgcgcgttgccgctggaattgaaggggaatcgaagtcaaatttctctaggttaatataaagatcagtatatttgtaaaacgtaacagtaaccaagagagaaagtactaagatatgaagagaatttggagctgtatttgcatggtgatacattagattaagtcatcaagttagttaaatggggaatatccatataacatttattcataaaatgtatatgtaatcgttgcattgtgctgtctggcaaaagtgaagtgatgcaatccaagtcagacatgcacgaagacctcttttatcttaattaatttgctcattatctttttgttgggcagtgtactgcacactgtagagcgtagacgctgagttcaggtatcaaattatcaatgcaagtttcttttaacttaattataagaaaaaaaatgactattgggactaatgaatctcagaacagcgtatgatcgagtagacaacaaagctcctctagcattcttatcatgcacaattagataggaaaaatattgactaatgattatgatcagaatcatatccaacaccaagtaacatttctaattcagaaaataggacagcaaaattttaatggcacgctgttagtagcaatacgtgaactaaaaacagccatagcttaggctgtatagaccctcacaaggtgtagaggccgggtttattataatccattatctaaaaaaacagccatagcccatagctaatgcagaataacggtcctagtaaagaatagatgcaaaattgaatttaccgagaaacgttaagtataaaattaatctagaaaaaaaaggcaaaatcaatcgaaagattaaatccatagcaaatgaagatgcgccaaaactttcagcatccacctaaggactcatttaaatctagcggacataacacacaacacacacatcacatgatagcgaaaatagtaagcgcacctgaggttctgcttgctagagagattagttgccatgcgtacgaatgacctcgctcactctgtggtatctagcgaagtgcaagactccagccgccgccggatgacggcagactcctctccttgcagtgaacctccgatcctacaaccgccggatgcatgtctgggatctggattttggaggcactgcggcacaggcatggcgattgcaggcacacatgcaatgaggatgaatccgactcgtagagatcgatggaatcatatagtaatcacgtagaagagtgcgaattaattaaggatattaattatccgacgctacatctacgtaactggtgaaagttgggaaaaagtgtattgctgttcggatgcatgagttacgcaggatgaagagatgaagcgacgcaacggcgaggcaccaccactggtggagaaaccctttgtagtcccggttcgtaacccccctttagtcccggtttccaaaccgggagtaccaatccgggactaaagatcgctatctttagtcccgggtgaaataaccgggagtaaagatcgatctttagtcccggttggtaacaccaaccgggactaaagatcgagctgaccttttttttttttttgcatggccctgttgctgcatggtttatatatatatatatatataaaccatgcatatatatgtttcaatacatatatatgcatacatatatatatgtatatatatatatatattatattatattatatgtatatacatgcataatatatatgtatttatacatatatatgttatgcaaatgcatatgtatatagatatatatatgaccaaaatatatttacattatagaaaatgtgtacacatgcatatagaaacatatgtagtcatgtattaattacaatccattatatgtcctagctagctacgatttcgacgtagtagtagtcgctgctagctcagaagataaggaccggtgaattgtgtttccgtcgtagtagaattcacccttgggatcaaggatttcttcgttgatgaatcccatgagttgttcttgaaccgctgcgataaatttcttgtgtgtgatcaggttatccctcatgcgaataaactatatgaatgtatgaaattgattagtaattaaacaagaaatcgttacgtaatgaaattttgaatttatttgtacgtacatcgagctctcttgtggtgatgatttggtctgcaaggcagtggcaatactcacacacgtagtagccgcacaagttagttccctgcttttgctttgcgcactacaaataaatgacaaattaacggcgtgagatctaattaatatactatacagttgtatgtattaatttgaatcggagaaatataaatgtagagcatgtgtactcacaggaaatttgaacttccgcctaagtctttctctccatttgccgcggaccaaatgacggaaccgataccaagcccaacatggagtttaaagctatgattcgtagtagcaattaacataacaagattttcttaattaacagaggaacttatgacggtacctgtctataagttcgaaaaccttgtcaaacgtagactcttttttatccattgagtcatatacgttgacggtgcaggccgacaggtcgaagagtaaaagcacccagtggaatctgcaatgtgcgtgggatgcattacatatgaaacacttaggaagttcgtacgggaatgaaatttggtatgtaggaagacagtaaaat

SEQ ID NO: 23230 - DNA, 2952 bp, Oryza sativa
tcctgcacccctatgaacgttttgtaatgctgcgccttcaggagatggacgagattgtcctctgtttcttgtggatattggtcgagcattgcgacgtttactctccgagggtcgatgaatccagtatcgaaaaccctccgccgtcgggccctttgaatctccattctacaacgataaaagggagtattttattttatatagtctacttatatacaaggacctaattaattaaaggagacgtatagtaagaaatctaactgaacgatatacttacaaaatccagcaactcataatagagacgtcgagggcgtccagctggtatagttcgtagattcccctgaaattgatccagagaatgtcatctccttgcaagaagtccgtgtccctgatcctcgctccgatcatctctctaccggtggcgctcatctccatgtacagctgatggaacttgtacatttgtgtgggtagggactgcagcagctcaggcttgacaagcggtttaccgagttcgtacatgtatttcacttccgccttttcgattggtgcgactcctagcaattgatccgtagttagaccggtgtcagtaataaattgttctatcgtcatttctttaccggtcaccaatggctcgatctcctggtttggttgctctccaagctgagggactggtttggactttccagaagatgctttcttcagcgttcgctcatagtccgatagcttgatggcctccttgacagatgcagacatacccctgaagaagttcctgacactggggtctataggaatcttcttttctggacttcgaggcttgaattgtctcttgacttctgatgcaacgtaaacgtcaagctcctcttgcgtgcaatcataccccgggtccttgttcttggcggcgtcaactttcgccttcttcgttgcccttgtgtgggcaggcgatggagctgggggggcccttgactttgaaggtgccggaagaggagcttgcggaggagtaggtgtaggagcccgaggaggagtcggtgcaggatcctgaggaggagtcggtgctggagcctgaggtggagacggtgctggcggagcatgaggaggagacggtgcaggatcctgaggaggagatggcggagccggaggagatggtgcacgaacgccgcttgtcgtccagggaggatgatgtaccacctgcgccatagaataatggcatggcttgtgtctcgtagatgcgtctcaccgtctcctccagggtaatccagctcgaggtcctcgtacgcgccttcgaccaactcaacttcgaccttcgagtatcctgctggaatcggcctgcagtggtaagtacctgaagggtccgttgggatggccatgcccgacgccaccttcatgttgtgagagattatttattagtaatcaacatatataagcagcaactagcggaatggctaaatcttacctttattgataagttcttgaaaggaatatgcagctcacatggtgtccgctgagtgatgtcatcaacgggataggtcgattcgtcctgtgtttgcatggcgtccatgctctgtgatcctacctgccccgttgaggcgcagctgctacggtttcctgacgggctcaccattgcaggaggaatggtcggctggggatcatgggaccgatgtgcggacatgcgttcatcaaccttccttgccacctcttcttgcatgttgagttcgtagctcgatacccggaactctaggtatgcaatcttcgcctcggtatctctcttgctcctcatccgactcctgtacgtgtggatgtcctccttgaaaccaatcttccaaggaatcacccctttccctcgtgttcgtcctggatgctctggagtctgcagggcgagtgtcagctcgtccctatctctgtctggtcggaacgtgccctgagaggaggcttccactgcatctgttagtcgtcgcgcagcctctcgtatctgatcgccgaagaccagtgagccatcagctgggttgagcgttccaccgtgagcatactaccagaacttcgatcgttccggccaattggctgttgccggttcgatacccctctcaatcaagctagcctccatctcctcccactttggcatcgcgacgctatagcctcctgaccccaagtggtgatggtacttcttcttggcggtattttctttgtttctttccatcatcgcctgcccttgttcacctgtcttatatgcaacgaactcgtcccagtgatcccttagctttgggaatgtgtcgaagttcggtgtatgccccttcagtatatacttctggtacagatctcccttgaagctctgaaactgttctgccattttcttcagagtccaccttttcactttgtcctctgtacccgcaggaagggtgaatgtctcgagcattgtggtccacagcatctctttctccgaatctgggacaaagctctcatgatctccacgtgcccttgttcttcgccagtacaccgtactgacaggcacgttatcccgcacaacccaaccgctgtgacgtacatagttcttggcggcttcggccggggcactaggacgtccatcttcttccacttccgttatgatgtgccgaccctcaagcttcttcgctgcacctcgttgcccgcgtgccctcttctgtccaacggagggttgactaccactagcctcctcctcctggttcccctccacatccctttccacgtgcccctgctggttcccctccgcatccctctccacgttcccttcctcgttcaagtactggtttggatcctcgttcccctcttcttcattccagtactggctgcttccctccgcgattatatcgtacaatatctgttcctcatcgcggtcagccatctgttgatacaacaaacatctgctaagtcacgagacatttatgttttaagactacaatagtcaattgctacttgtcgcaccaa

SEQ ID NO: 23231 - DNA, 2825 bp, Oryza sativa
tttaaaaatatattaaatttaatacttttaaaattctccagtcaattataattagcatatgaatgatagtaaattaaatgttaaaaactctaattaacatatgaaattgccacttgcgtgatttaaaacttttaaaaatcctctagtcaattataattagcatatgaatgctagtaaattaaatgttaaaaactctaattaacatacatatgaaattgccacctgtgtgatttaaaacttttaaaaattgtaagtatcacatataactagcatatacatgatttaaacttgttgaaacctctaataatcgtgcgtaattaacatatgccatacatcaattgatttatatggataatcaatacatccaaaatagtttacatcgtgtacacaataattacggcattacatcggcggtgatggttgaccgcacgtactttctcctcactattgttccctccttgtgatcgctgcgtgagtaaggggtgtcttcatttgataggaggatgctagggtcaatcgtcaccgtgaaagggggttgcccatccaactgatcgtaatcctcgtcagtcttgtcctcaactccgacgatttttcttttgcctgggagaaccacttgacgcttaggctcatcaggccctctgcccttctttcctttgctagacatgtctttcacgaaaaagacttgcgttacatcattggcaaggacaaaaggttcgtccgagtatccaaccttgttaaggtcaacagttgtcatcccactgtcatcaatcattacgcctccaccagtcaacctaacccattggcaccggaacagaggaaccttgagaggaccatagtcaagttcccatatgtcctcgatggcaccgtaatacgtggcagttgttccatcgtgtcccatggcatcgacatgaacagcgctgttttggttcgtgctcttcatgtcttgggctctcgtgtagaatgtgtacccattgatctcatatccctggaatgtcgcgatcgacccagacggtcccctcgccaggaaggcaagttgttggttgatcgactcgttacccatgagatgttgtcgtagccacgcggggaaagtatcaatgtgatgccgtgtaatccatgcatcggacttaccgatgttcctggcgcgaactagagccaagtgctcctcgatgtaaggagctaccaatgaagagtgttgcagaacagtgaaatgggctttacggaataaattgttgtctactgtcattattgctttccttccgagagttcccttttcccgtagtctcccttcatggcgtgattcaggtaccccgattgggcgaaggtcttcgataaattctacgcaaaattcgatgacctcctctgttccataacccttggcgatgcttgcctctggacaagcacggttacgaacatacttcttcagaacgcccatgtacctctcgaaaggaaacatgttgtgtaggtacataggcccgagaatacggatctctttcacaaggtgacaaagcagatgcgtcattatattgaaaaatgaaggtggaaatatcaacttaaaactgacgagacattgcaccacttcattctgaagggcttctaatctatccggatcgatgaccttctgcgaaattgcgttcatgaatgcacatagctttgttattgttgcccggacattgtctggaaggataccccttattacaactggtagcagttgtgtcatcaacacgtgacagtcatgagactttaggtttgtgaacttcttctccttcgtgcttattattcgcttgatattcgtggagtatccagacggtacctttatgctctccaagcattcaaacatactttccttctctgccttgctaagagtgtagctggctggactcgagtaatggcttcctttctcctttggttccgggtgaaggtcgccgcgttgttccatatgcttcagatcattacgtgcttccagtgtatctttcgactttccgtatacacctaggaagccaagaaggtttacgcaaaggttcttagtgaggtgcatcacgtcgattgcgtggcgtacgtccaagaattcccaatatggtaactcccaaaatatagagttctttttccacatcgccgcgtgaccatcttcgctctctatatgctggcttccaggcccctttccgaacactactttaagatctttaaccatagcaaacactgttttcccgctgtgatgtttaggcttcgtacggtggtcggccttacgttcgaagtgcttgcctttcttccgtaccgggtggtttgctgcaaggaatcgacgatgacccatgtatacaactttcctacagtgcttaagatacgtactttttgtttcatccatacagtgagtgcaagccttgtaccccttgttggactgtccggataggttgctaagtgcaggccaatcgttgatggttacgaacagcagcgctcgtaggttaaacttctcctgtttgtcctcgtcccacacggggacaccttccttcttccacaactgtttaagatcttcgaccagtggtcttaggtacacgtcgatgtcgttaccaggttgcttggggccttgaataataatcggcatcattatgtacttcctcttcatgcatagccagggggggaggttgtagatacacatcgtaacgggccaagtgctatggccgctgctcatctctccaaaaggattcatgccatccgtactcaaaccaaaccgtatgtttcgtgcgtcctttccaaattctttaaattttctgtcgatgtttcgccactgcgaaccatcggcggggtgtctcagcatcccgtcctgttgacgc

SEQ ID NO: 23232 - DNA, 8949 bp, Oryza sativa
aaccaaccgggactaaagatcccgggggggcctgacatgacctgacagcattcgaaccgggactaaagatgatctttagtcccggttggtaacacaaaccgggattaaagatcaaatatgcccgttacccttttgaaccgggactaaagatcatctttagccccggtttttattgcatccgggactattgtggaaatcggccgaccgacgaaagatggtttctccaccagtgcacaaacgaatagacggacgatgacgctcttggcctcttgggctctcggcttctcgggtcgccacgcgttagggttgggcgacgtcagaaggaataagttcacttcgtgaccctcaaaagtgatcgaaatctaatccgtgaccctaaaccacaaaatcggatatctcgacccccaactcttaaaaccgatacaatttgactccctcggtggtttcggagggcgatttcgctgacgtggcacctacgtggcagtattgactcggtcttttgtccacgtggcgtttgcgtggcacttaggtggtattagaaataaaaaatatgtgggacccatttatcattcaccaaaagtatgggtgggtcccactgacacgtggggctcatataaatcatatcctcccctctctttctctccgcgagtgtgggacgggggccaatggcgacggagacccaggagcggcactggagcggtgacggaggcgtgcgggtgagggccggagcggcggcggcggcggcggagatcgagaccgccgtggaaggttggccgtcggaaggaagaaaacgagccacgagaacggccgtgtcctcgccatcctcggccccgccaccgcactatccatcgctgcgctccacgccctctctgccggccacgacgcaccggcctccgccgttctcccgccgcgcccacgaacgcgtaagggtcgcctgcgtctcgccaccgcgactcgcgtcggcatcccctcgaagatggcggcatccggcggtggcttcttatgcacctgcgtcggcaaccactactacaaaaatcgtttttctgtacgagtgggtcggtagcttctatgcgggccgcttttggcggcgcctgcataaaccgccccccgggggtcggttgattagccgcatgcgaaaataggcccattatcgcatgcggctgatcttcgcatgcggctgtcctaagcagccgcatgcgataatggatcttcgcatgcggctggcttaagggaccgcatgcgatgatcggccatatatgctcctccaggcccgagcttgaccatttgaaaacgaagctttctctctcctaaagcaagcaccaattaggggggaggttttcaactcgaaatttttgcttgaactctatacgaaaggtgaagaactctctatcctccttcatttggctccatttttgttatatttcgttggtggaaagtggagtttttttaatattttgacaaggtttgttctaactaatttttgcaaaatctagcttcaaaatatatgttttgatgggcaaattttgcatgtaatcaattgtacatactagttacatgtattgttgtatttttttttggagacaaatgcatttaaacttttgtatgaaatacctgcggtctatttttttatttgtaacttttttgcctttatataattagatggatcagtcgtcatggatgtatgagatgtggagaacgcagccgatatttattaaggaagcatctaaatttattgatcaggctaaggcgcatgctttgagggagaatatgacaaagatcttttgtccgtgccgtcattgcaagaatcagaaattgttggtagatcctggtgaaatattgggtcacataatggagtacggattcaccgccaactacaaggtttgaacctatcacagggaattcgccaatccgaaagatgacgatgaagagttatgtttcgagatgaatgaggcagagaattttataatcgaagacatgtcgcgtgaaagaatggttgtcgatgtttccaccgatagtgatgatttcgatggtagttttgatttagaggatatgctacgccatgttaaaccagaggtgctagcgggcaggtcacgaggattggagaattggcaggcattagagaaggcatcgaaggatcttctttacgatgaaacgaagggatgtgataaggatttcacagtcttgcgttcagtgcttgaacttctaagattgaaggctaaacatggatggtcggacacaagttttaatgatctgatgagtttgttgcgtgtgttgcttcctaagcctaactttgtaccatcgaacacgtatcaagcgaagaaactcatatgtcctttatctcttggtgtagaaaagattcatgcttgtaagaatcactgcatattataccgtaaagaatatgcggaattggaatgttgcccaacgtgtggcacaagtcggtataaaatggggaatgggcccgtagattcagagtgtaccgatccagattctgataagggtaagcgcgggaagattccttcaatggtgatgtggtacctaccaattaaggaccgcctgaagcgtctgtactcaaacccgactgatgctgagttgatgagatggcatcaagagagccagaaaatagatggtatgattcgacatcccgccgacgctcgccagtggaagacatttgatgcaaaacacccagaatttgctaaggatcctaggaatgtaaggtttgcattgagcactgatggaatgaacccgtttggtgacataagcagctcgcacagcacatggccagtccttctcacaatgtataatcttccaacatgaatatgtcagaaacgaaagtacattctactcactatcctcatacaaggtccaaaccaacctggaatcgacatagatgttttccttgagcctttgatggaggacatggaggagctttggaaagaggggttacgactatgggatgagtttaagcgggagcacttcaatctacgtgcgatcatattcgttaccatcaatgacctacctgcaaacttttcattatctgggcagattaaagggaagactggatgtctgatatgtctggagaaaacttcatacagatacctgacgtcgtctttgaagacagtgtacatgcgacatcgacggttcctaccacaaagacataggtaccgtaagatggctagattgttcgataatacagtggagaatgacactgccccagtagcaagaggtggtacatacgtgtatgagataacaaagaagattaatgttgtatatggaaagggaaagaagaagacagtaaagaggaagaaagctgatggtgacaacggtactgcgtcgcctttcaagaagcactcaattttcttcaaatatttagattacaggaaggacctagagattcgacatgcaattgatgttatgcacctcgagaagaacgtgtttgatagcaccgttggcacattgctggacatcccgagtaaaacgaaggatggattgaagtcacgtaacaaccttgtatatttgtccatacggcatgaccttcacccagtagtgctgccaaatgggaagaccgagattcctcctgcttgttactcgttgacacttgaagagaaaaaagccttcagtaaatgtttacaaggggttagagtgcctactggtttcacatcgaacatcaggaagctagtatcaatgaaggatttgaccatttcgggatacaatgcgcatgactgtcataggttgctaacggtgttcctaccaattgctataagggcagtcaaaccagtccacacaaaggtggttataacaaagttgtgctactttttcaatcgaatttcgcagaaggtatttgatcctttggaattaggtccgcttcagacatttgccatcgagactgtatgacagcttgagatgtatttcccaccatcatttttagatatgatggagcatttgatcgttcacatcgtccctcagattattgaacttggtccattatacttacatcagatgtgggcctatgagcgttacatgtcgatcctcaaaggctatgtacgcaatcgcgctcatccggaaggatcattgatagaggaatacacaactgaagaggcagtcgagtgttgtatggactacataaaggatgctaatgccattggcattcctgttcatcgacatgaaggtagattgtctggaaggggtactgttggtaggaagcagttcttcaataatgattacaaaaaggtgtccgcggcacacaacagcgttcttcaacagctcgctatcgttgagccattcattgagcgacacctagaagaaatcaaagcctgcttcccagggcggtccaatgattggatatcaagagagcacaagcgtcgctttcctccgtggttgaaagatctaaacctgccagttggtgattctgtggaggaacttactttacaaagactggcatgtgggccttcaagtattgtcaattcatggcaaggttacgacatcaatggatttaccttgagtacgactacgaaggacatgaaaagcactgcacaaaacagtaggatccgtgtcgaagcgattgacacgagtggagaaaagaggtcgtattatgggaccattcaagaaataagggaactggactatggcctaaacatccagatccctgtgctccgttgtgaatgggttaaagacacaataggggtttccgttgatgactacgggctaacgatagtcgatcacagtaaaacaggccacaaggatgatccatgggttttagcagagcgtgtggctcaagtgttttatgtgaaggacccttcagatgaaagaaaaactattgtcatatccggaaagcaacagatcgtcggcatcgacaacatcgaagaccccaatgattacaaccagttcgacgatgtaccattgtttactgatcttcctatgcgaattaagaaggttgagagaacaatcgatgaagcaaatatgtcgtacgttcgagcagatggtgttgccaaggttattaagtcatagttatttcgtaacctttagttctcattgtgttccaaatgtacgtgcatgaatttaggtcccccttatgttgtaatcattagcatgtaacatttgattacgagttttgagcaattttcatgagttttcttagtgccaaaaacatttggaatggataattgtggcgaaatattgggaaaaaaatatatatggacagtttacttagagaaaaaaaatatgagtttttttggtaaaaagatctttccatgcggacgacttaagccagccggatggaaatatctttttcccatgcggccggctttatggcccgcacggaaatatctttttcgcatgcggctggcttaacagcccgcatggaaagatctttttcgcatgcggccggcttatgtcgaccgcatggaaagatattttttccatgcggtcccttaagccgcctgcatgcgatgatctgcgcctatatatagggagcgcggggagccaaaattttctaagtcccggctccagcgaaaccctagccgccaggctgccaaaatttcccaagtcgccgttgccgtcgtccccgccaccgccggctcctccccaaagtcgccccgccccacgccgtcgccgccgccgccgccaggacctctcccccctcgccgtcgccgtcgccgccgccaggtcgccgtcgccgccgcacggacctctcccccctcgccgttgttgccgtcgccgcagcacggacctctcccccctcgccgtcgccgtcaccaccgcacggacctctcccccctcgccgttgccgtcgccgccgccaggacctctcccccctcgccgtcgccgtcgccgccgcacggacctctcccccctcgccgttgccgtcgccgccgccaggtcgtccccgccgccaagtcgtccccgctaccgccggctcctccccgaagtcgccccgcccctcaccgtcgccgacgccgctgccaggacttctaccccctcgccgttgccgtcgctcggtaacatttacttttaaaaaaagaaatgtgaaatgtgcaattgtggattgtggattgtttaattgtgcatcgtggattgtgatatgtgcaattgtggattgtttaattttgagaaggtttaattgtggattgttaaatggagatttatgtttaaattgggacttatgttaaattgggatttatgtataattgggacttttgttaaattggcacctatgttaaattgggacttatgtttaaattgaaacttatgttaaattgagatttatgtatatttgggacttttgttaaattggcacctatgttaaattgtgacttatgtttaaattgagacttatgttatattgggatttatgtataattgggacttttgttaaattggcacctatgtcaaatggagatttctgtttaattgtgactgatgctaaattgggacctatgttaaattgtgacttatgtttaaattgggacttatgttaaattgagaattatgttaaattgggacttatgtgaaattaagttattgggacttatgtgaaaataagttaaattgtgacctatgttaaattgagatttatgtataattaggacttatgtttaattgagatttatgtataattgggacttatgttaaattgggacttatgtcaaattgagacttatgtgaaattgcgttaaattggtacttacgtaaaattgggacttatgtcaaattcttttacgtcaagttggaacatgtcgaacgaaaaggttccatcgaatgcaccaatagcgcctcaagaaggtaacgctcctcaaaattccggtagcaataagcagccagacgcttctagtgaagaaacgtggcgcacaccaagtgacccgtttccaatggaaataacacaagtcgccccccgcgatgatgatccggactacatacctatcgaacaggccgtaagtgttgaaaatcgttagccatgtattattccctaactatgatgtgacatgaacctaatggtgtatagagttacctattctttgcagatggtagtccgacgccgctcgaaacgtaaagccgagaggaacaggacagagcaagaagttgagatggacaccgctacgtctgcacctgaacgtacggagacatctacaagtgcaggcgggagtgggaaaaaaagatgtggtgagagaagcaagaataaattacccaaggaaacttacaacgtgattgctctcgatcaggatgggaagcccgtcgagccaccgatagtgcggtccaagttcagcaacgcatgtggcactctagtcaggacacgttgtcccattaatgtcaagttgtgggaaacagtggacgacaacatcaagacacttctctggaatgagttgcagaagtattttgtgttccctcctggatcagaggtcagggggagagattacgcacttaaaaagatgggagatcgatggcgacagtggaagtccgatctaaatcgggattatgttcagaagaatctcccaccgtttacggattatggacatatatcgcaggctgactgggacacgtttgttgcggatcatacaacagctgaagcattggctttgaggaaaaaaatgtcatacgctggtcacgtcgatcaatggcgggagatcgagcaaagatttgccgcggccggtaagcccctgctggtagaccccatggttgaacgtagcaagaactgggtttgggcgcgtagcacaggtcaagtctcggatgagggagacatactattcgagactccagacatagaagaagtgactactaatttgcagcagatagtcgagaaagaaagatcaggacagttcgtcccacggagggagcgagatcagcttactgcggcgttggggacggctgaacactctggacgtgtaaggggtttgtcctcaaagacaagttggaaggtcgggtttccacaagacgcaccaagttataagaagagagacaaatacaaagaacaactatcggacaagatctatgcgcaagtgaaggaacacttctactcgttggcagctgaaaacccgacagcctttccaaggttattccctgatagccaacaacccacacaatccgcacagcaaacaactaatgtacccagcagtgtaggctcagtgcagacaactaccttccctgtggatagtataactggaccacctccgtgcagtctcatcgtaccaatcggtcgcgctggaaagactaaggaggttgcaatgggttttgcaatacccggacgtcaattccacaacacggcaatccctgaggattacgcaaggatacaggtcgccaaggtccatagcaaccacgtttccttggaactagacatacctacacttgaggggattgaacttctcggtgatgcagtgaatcagtttatcttgtggcaccgcagagacataatcctgagcgcggcctttcctgcagcaggatcttcaaccccatcctcatcacaggcaatgactgctgccgctcctgcaccaccgtcgccttgtcacgaccggaaataacccaacgggcgttccttacgtgcgtgcattaatccttgtcccaggaggcaaggtacaccaaaagttgatacaattcagagtttaacaagcggaagcgtaaatagttaatttattacatgggcagcgaaggcccagcacacacaaagacaaatgagaaacagcggaagactagggcgacgaccacaggcgcttgacggcaggcacgagctagacaccaaagccttcatcttccaggggctcctcttctgggtttgggaaaaattgagcaagactgagtacaaccaccgtattcaacaagacacacccacaagtacagaataaatgcaagggagtacaaaggagttatactataaagggttagggttgcagtaaacagcatttaaagatatttagttgctcaaaactatttagtaaacacgattctagaactatacaatattat

SEQ ID NO: 23233 - DNA, 8695 bp, Oryza sativa
aagacagtttcagagattcgcagtttcctaggcctcgcaggatattatcggaggtttatagagaatttttccaagattgctaagcccatgacacgactgcttcagaaagatgtgaagtacaagtggtcggaagaatgtgaacagagttttcaagaattgaaaagtcgcttaatatcagctcctattttgattttgcctgatccaaagaagggttttcaagtgtattgcgatgcatccaaacttgggttaggttgtgttttgatgcaagatgggaaggtggttgcctatgcctctcgacagttacgtccgcatgagaagaactaccctactcatgatattgagttagctgcagtcgttcatgcattgaagatttggcgtcattatcttttcggtactcgtacagaagtgtacaccgatcacaagagtttaaagtatatctttactcagccggatctgaacatgagacaacggagatggttggaattaattaaggattatgacatgggaattcattatcatccgggaaaggctaatgttgtagcagacgctcttagcagaaaaggctattgcaatgctacagaaggacgacagttgccattggaattatgcaaggaatttgaaagattaaatttgggaattgtcggtagaggtttcgttgcagctttagaagcgaagcccactctaattgatcaagttagagaagcccaaaataatgatcctgatattcaagagatcaagaagaatatgagaagaggaaaagctattggtttcttggaggatgagcacggaacggtatggttgggtgagagaatctgtgtccccgacaacaaagatttaaaggatgcaattctgaaagaagctcacgatactttatactccattcaccctggtagtactaagatgtaccaggatctcaaggaaagattttggtgggcaagtatgaagcgtgaaatcgcagaatacgtagcagtatgtgatgtttgtcagcgagtcaaggcagaacatcagaaacccgccggtttgttgcaacctttgaagattcctgaatggaaatgggaagaaattggtatggattttattactggtttacccagaacgtcatcaggccatgactctatttgggtaatagttgacagacttaccaaagtggctcatttcattccggtaaagacaacttattccggaagtcgcttagcggaattgtatatggcaaggattgtgtgtttgcatggcgtccctaagaagatagtgtctgatcgaggcagtcagtttacttcaaatttttggaagaaactttaggaagagatgggttctaagctgaactttagtactgcttatcatccgcagacagacggacaaaccgaaagggtgaatcaaattttggaagacatgttgagagcttgtgctctagatttcggtggaagttgggataagaatctaccttatgcagaattttcatacaacaacagttatcaagctagtttacagatggctccttacgaagcactgtatggtcggaagtgccgcactccgcttttgtgggatcaaacgggagaacgtcaggttttcggaacggatatcctaagggaagcagaagaaaaggtaaagatcattcaagaaagattgcgtgtggctcagtctcgtcataagagttatgccgacaatcgccgcagagatttgagttttgaagagggagattatgtgtatcttcgtgtcacgcctcttcgaggagttcatcgttttcataccaaaggaaaattggcaccgcgttttgtgggaccttataagattgtcagtagaagaggagaggttgcttatcagttggagttacctcaatctttggcaggagtacataatgtgttccatgtgtcgcaattgaaaaagtgtttaagggtacctaccgaagaagctaatattgagcagatagaagtccaagaggatttgacttatgttgagaaaccaatccgtatcctggaaacaagtgagagaagaaccaggaatcgagttatccgtttttgcaaagtcccgtggagtaatcactcggaagaagaatcaacttgggaacgagaagatgaattgaagtcagctcatccgcacctgttcgccagttcttccgaatctcgaggacgagattctgtttaaggggggtaggtttgtcacaccctgaaaattcaaaatatataaattgttgtttaaatggaatttttagaaataattttaaaagtcttgaaaagaaaatctaattttaattaataaattccaatataaaattgggccagataaaatttcattaaatactttgcttaattctataattcctagatttttctgggatttatttgagctaagaaagtatttttaataaatggaattgcatttaagaaataatttaaattgaaaaaggttttaaaaagtctcttttggctttgggccgaaagtcggcccaaaatcccttctctctcctcagcccagtccggcccagtccgcagccgcccgcgcgagcgcgctgtcgctgacaggtggggcccacccgtcagtcgtcgtcttcctcgggccgaaaccctagtttcgcgccgccgagctgccgtcgccgccgctttccaaatccggccgttcctttccttctccggccgatttgttagaggggaaacaatctccgggatctcctctaccttttctcctttggaatctttggttaaatcgctttggaaagcgtcggagacgagttcgtttcggatcggttttccctctctccaagccgaaggtttccttcgccgttgccgtcgccgtgggccttcgccgccgcctccgagcccctttaaaaggacccccggtgtctcctctacccgtcgcagccctcgccttcgcctctcgtcgccggaagagctgtagcgccgtgtgccctagctttgccgtcgccgccgccgctccagccgtgcgccgccgtcgtttcagccgtcgccgtcgctcgggaagaccgccgtcgtgcttgccaagtcgccgccgtcctcgtccgccccttcgctgccgtcggagaccgccggagcatcgtcgccgtcgtcaacccgaaggtagccgccgcttccttctcgtcgccgtcgtcgtccgttccttttccgccgccgttttggtcaccggtgtgttcgccgcgttgtcctctacgtgctggtgccctccgttggtgccgtggtgccgccgttcgccggcgagtgtccgccgcccgagccgttttcttcgccgagccgccgccgtcgtcggtgatgtcatcgttgacgtcatcgggatcctctcccgtgagccggtcatggaccgatcgatcttggccgtccgatttggatcggatcaatctcggccgtccgttcgcgtgaaccgccgcccatgcgcccggtccaccaaaccctagcccgctgacgcaataaatccccttttccttttcaaaaataattcattattgcgtcataattcaatttaaaccgatttaagtgttttaatccgatttaatctttaaaaattcataactaattcatcttagctccgatttagttggttcaattctctaattttttctaaaattgagatctacacattaaaaatatccacatgtactgttcatgcttgtttatgtgctgttttggtgattttgcttctttttgcttagattccgtcgtttccggagagtccgttttcgcggaagaagagtttgaagagttccaaggccagcaaggcaagtcacacagatcccaaacaaccctttgagcatgttgatcctatttaaagctattgtttctattcaactattgcatctattttcgaatgtcattgggtggaattgacctattctttgttatggcccttttgtacattgattaccttattccttgataccttgggttattacaatttgactagttgagctttatttatattggttcaactagatattagatacaattgcttagccctgcttagaaacattagtacacttatgggataactaatgactcactattatttcatgatggcttattgatagttcacgatggtcaatcgtgattagttaattaattaatgtgccaactaaaacctgataatggtgggttgtgggcacatggttttgatggtcgtgctcatgacaattaaggaccggttcacgagtttcggttgtgaaacatttatcgtgccaaccacaagccagcatgggcaacggctttatcttttgtatagcatggttcattgcggggcaccagactgagaagtggcggagataagcccacgggggtcgctggggagtccatgccttgtttataagggggtgattatgatccaggaaggtgcgctgcagtggattgtgttatgcgaggggtattgtcacaactcctttccgagataccgtggtggtattgaggcacatggtgacatgatgtggggttgtgtcttgtgggtacagtggtacacctctggccagagtaaaactattcgaatagccgtgcccgcggttatgggcgggtctaacaatgtctttcgtgattagtctcacacctctcatcattgtaaaagatgcttaaactggtaataatttgattagctcctggtttggaatggtacattcctggtttggagatagaactgtgcagccggggtggttgttcagaatggttgggcctatacaacagggtatgttgtatagcgttggattaatattgtttaattacttaactgttttatcaaattctcaaatgtttgctaaatgctgcttttgcaaatacaaccatattatgccatcctttgttatcctgtgcacttgcatatttgctgcgtggcttgttgagtatgtcatatactcaccttgcaatcattcatcagaagaagagttctacaatgaggctgatggtgtggaggattaggtgtagccttggtcaagctgcctgtggagtggagccgtctgcgccgtttatttaatttccgctgcttagaactttattgattgagaagaactatctacctctgtaatgacattttattcgcttattaattagagtattatttgtactctattatcaatttgttattgtgtgcctcggctgattcctggacgagggttcacacacatgtaagcgtttggaattttggatagaaattccgggcgtgacaagttggtatcagagcccctttgaccctaggttataccaaatggttacccaaagaagccctctgaaaaatattggaaaagtagaactgttctcctccctttctcttttaattaaccaaactaatggcacatgcacttcataatttttttttaatggttttcattaaaaatttattccagtgttattagtactgtacatctattactgtactaatggctcatttatcagcaaaagttttacaatactgttttatttaatcttgctgcaataaaataaatttagtatgttgattttataatttcctttcatctcttttgaaaccagttattcaaaattacaaaatttgtgacctcgtttccaaatgttttaatttatttcgcaaagcttggtttactttatttacttccctttttactttgattttctaactttattcaaattaatccaaaaacttgtgctattaattggataaaggtcttaactccctcctttcacttgtctttagatgccgcgttacaagcctgagtacctgtttggtgttgagggttttgtccaggagttgcgtacgatgtcctttgtcattggatttgggactgcccctttttatacccagattcctcatgatcgtcatgaagagaagtgccgagtcaaagtcaccttgaacagcaatagtgaagatattccctcagtgatgttcgaagctggaggaagaaactacatccatgcatgtcaggaggtggcaaggatcgccataggagagctccgtgatcgctacagtgatcaattggccgacactgagtatcgttaccatcctcgccaaccccagggaagtgaccgtggcagttatcttgagactgaaggaattgagaattatgttaccacaagacatttggttgagatgttgtgggctatggatgaaagtcgtgcggagactgtgttagcagctcaagatcgtgaagaccggaatcatggtaagatttgcaagttagaagacaaggtggatcgtttggagaaggaattagccgcattgaagggagaagcaccgccgcagaaggccaggattcgtcttaccgcaaggaagagagctctatttgtccctcgctatcaactggcgccaaaggttcgtgtggtggagaaagaagttgccccagctcaagcggatcctccggtcatcatcttaagtagtgatgaagaagaagaatctaagcgcaacaattccaagattgagtgggtagcaacccaagatgatgaagacgagccttcaatcgacctccgatgcttggaagaactagagtgacttgttaagtcgttgtcatagatcgttgtgttagtttgcttgcttaaagtttgcttgtgtgtggctcgcatgtgatttacatcagtggtgggatgtaagtgcatgcgtttgtttgcttttgagtgttaggaagttggtgagtttagtggtgtgagagtcttcagtttgtaataatgaaactcagttaagatcaataaaagttaaagtaattctctgtcctaagtagttttccccgttttctcttcttgtgccctgtccatgccagatggtgaacactcgtagcaatgggaatggtcccaacaaccccaataacaacaatggagagaatcccactcttgctcaagttcttgctcaacaaacacagcttatgaacatgatgatgcagcaatttcagaatcagcaaaaccaagggaataatcatgcacctccccagaacaagttagcagaatttcttcgtgtgaggccgcctgttttctctagtaccactaatcctgttgaagctagtgattggctgcatgccatagagaagaagttggatttacttcagtgcactgatcaggagaaggtatcttttgcatcacatcagttgcatggccctgcctctgaatggtgggatcacttccgccttaacaggactactgctgaacctatcacttggcttgaattcaccgctgctttccgaaagacgcatataccatcgggagtagtgtctctcaagaagaaggagttcaggtcgcttactcagggatctcgctctgttacggagtatctgcacgagttcaatcgtcttgctcgttatgctccggaagatgtgcgcaatgatgaagagcgccaggagaagtttttgggaggacttaatgatgagctttcttacccactcatggttggagattatcctgatttccagaaattagtggataaggctattcgtcaggaggacaagtataatcgcatggagcagaagaaacgtcggattgctcaattcaagacacaacagggaaataatcagaagccgcgtcttactttaggaccccagtctatgccacagggaggttcttcgtctgttgttcgtccgcaacgtcagttcttcaacaacaatgctggcaacaacatccgtaataaagctccacgtcctgttgcagctccagtacagcaacaacctgccaagagggagcaaggcagcaagcccgtggtgtgtttcaactgtggagacccaggacattatgctgacaagtgtccgaagccccgtcgcgtgaaggttgtccctgcccagagtaactctgctgtaccagtatccaaggctcgtgtaaatcatgtcgctgctgcagaagctcaagatgctccagatgtaattttgggtacgttccttgttaactcagttcctgcaacagtacttttcgattctggtgctacacattcattcttatctatgagttttgcgggaaatcatgggatggaagtagaagatcttagacgtcctttgatggttagtaccccaagtaatcaagcactctctttgcaacgtagcccctcggtcagaatagaaattaaaggagtaccatttctggccaatcttatcttgttagaatccaaagaccttgatgtcatcctagggatggactggttagccagacataaaggtgtgatagactgtgccaacagaaaagtaactctcaacagctatgatggtcgagttgtaactgttcatgcattgtcatctgagtctttaaggtcaagactgaaccagataactttggaagagattcctatagtccgggagtattctgatgtgttcccagatgatttacctggtatgccgcctaaaagggatatagagttcagaatagatttggtacctggaacaactccgatccataagagaccttatcgaatggcagctaatgagttggcagaagttaagaggcaagtagatgatttgctacagaaaggatacatcagaccgagttcatcaccatggggagctccggttatttttgtggaaaagaaagaccatactcagagaatgtgtgtggactatcgtgcactaaacgatgtgactatcaagaataagtatccactacccaggattgatgatttgtttgatcagcttaaaggtgccactgttttctccaagatagatcttcgatcagggtatcatcagttagaatcaaagaggaagatatacctaagacagcttttaccactaggtatgggttgttcgaatgtactgttatgtcttttggactta

SEQ ID NO: 23234 - DNA, 9964 bp, Oryza sativa
  unsure (1)..(9964): unsure at all n locations
cggaccggagctcggcgggcgacggcggagagagagagcgacggcgcgagctcgattccggcggggagagagagcgacgagtggcggaaacggcggagggaggcacggggagcgtttatatagggttgggagtgagagagggcggtcggatgagggggaaacggccgcggaagatccggccgccattgatgcgccggcgaggtttaggggaaaagatcccgaacgaatccgatggagagagagagggaaaagtggggggaaagagggagggaatcacggggaatatttcccccctcttgattgcacgtggggcggacgggagcggcgggatttgcggcggcggcggcgctagggcacgggcgaggcggcgggagcggcgggaggtaggggatgacgggtgggccccacccgtcagcgagggtggcgggcgggcccgcccgtcagcggcacgcgcgcggggaggaggccggatgggccgcgggggagaggagagagagggagggaggtgggccgagccggcccaagagggggggaaaagactttttagggtttttctttttataaaacctttttaactttgtttatttcttcttaattattatttgtgctctgaaaattccactaaaatttatttacgcattttaggcttttaggaaatatacaaaaatcctccaagccttatttgacttttaactttgcacattttaattgttggaggctttcacacggattttaattattctaggcataatttagaggatgtattttagggtcgttttgggacgcgacaaacctaccccccttaaacggaatctcgaccccgagattcggaagaactggcgaagagatcgggatgggctgccttcagctcgtcttcacgctcccaagtagcttcttcctcggcgtggttgctccattggaccttgcaaaaacggattacccggttcctggtcctgcgctccatggtgtccaggattttcactggcctctccacgtaggtcaagtcttcgcgaacttcaatttgctctgagtcggcctgctcggatggactcgaagacatttcttgagttgtgacacatggaacacatcgtgcccgttgcccaaggaggcgggcagctccaactggtaagcgacttcttcgcgccgagcaatgatacggaaaggacccacgaaccgaggtgcgagcttcccttttgtctgaaacctgtgcacactcgcaatggcgtgacccgaaggtacacaaaatcgtccactgcgaattccaggttacggcgacggttatctgcataacttttctgccgggactgtgccacctttagattatcccgaatggttctgaccttcgcttcagcttctctcaggatatcagtcccgaacacttgactttccccaacttggtcccacaatagcggtgtccggcatttgcgcccatacaacgcttcataaggtgccatttgtatactggcttggtagctgttattgtaggagaactcggcataggggagactcttatcccaggtcttcccgaaatctaggacacatgcgcgaagcatatcttctaggatctgatttagacgctcggtctgtccatctgtctgcgggtgatacgcggtgctgaaatttaatctggtacccagctcttcttggagcttcttccaaaagtgagaggtgaattggcttcccctatcagatacgattttcttgggaacgccatggagactcacgatcctagcgaagtagagctcggctagtttgttccctccataggtggtcttcacaggaataaatcgagctaccttggttaatcgatccacaactacccatatagaatcatatccaccttgggtttttggaagtccggtgatgaaatccatcccaatttcatcccatttccattctggtacttggagaggttggagaagtccggccggtcgttggtgctctgccttgacacgctggcacacatcacaaagggccacgaactctgcaatttcccgcttcatactaacccaccagtatttctccttcaagtctaagtacatcttcgtactgccagggtggatggaataaggactttcatgagcttcctgaagtatcagctgtttatgttctctgacatccggaacgcatacccgatttccgttccatagggttccatgttcatcctctgtgaaacccgcagctttaccctgtttcatatttttgaggagtccacgcatgtccgggtcgttcttctgagcctcgcggatttgatcgagcaaggtgggcttggcttccaacgcagccaagaatccacgactcactacgctcagattcagggcttccatctgttggttaagttcgggtggaaagccacggacgttaagagtgttgcaatggctctttcgacttagagcgtcagcgaccacgttggccttaccaggatgatagtgaattcccacatcgtaatccttgatgagttctaaccatctcctttgccgaagattcaggtccgactgagtgaagatgtatttcaaactcttatgatcagtatatatttcacagcgattcccaatgagataatgccgccagatttttagagcatgaaccaccgcggctaactccaaatcatgggtagggtagttgccttcatgaggccgtagctggcgggaggcataggccaccacatgaccgtcctgcatgagcacgcaccccaatccttggcgcgaagcgtcacaatacaccatgaagtccttgcgagtatccggcaagattaacactggcgaggaaaccagcttttctttgagagtttggaacgccttctcgcattgcgggctccacacaaatttctcttctttcttcaacaactgtgtcatgggtcgagcgattttggagaagttctcgataaacctccggtagtatcctgccaaacctaagaaactgcgaatttgagtgactgtcttgggttgcttccaatcagtgacggcggtcactgttttggggtccacagcaactcctttagcagatatcacgtgccctaagaatttgacttcggacaaccagaactcacacttgctaagtttggcatacaattgatgttcccgcaactttcccaacaccagacggagatggtgctgatggtcttcctctgattgtgagtataccagaatgtcatcaatgaaaaccacaacaaacttatccaagtattccatgaacactttgttcattaagttcatgaagaaggcaggagcattggttaaaccgaatgacatcaccgtgaattcatacagtccgtatcgcgtggtgaatgcggtcttaggaatatcttcttcacgaatacgtaattggtgatatccggaacgaagatcaatcttggagaatacagtggcacctttaagctgatcgaacagatcatcgatccggggaagagggtacttgttttttatggtgacttcattgagagctctgtagtcaacgcacatcctcttcgtcttgtctttcttctccacaaaaatcacaggagcaccccagggggaagtactcggacgtatataccccttttctttcaactcttccaactgtttcttaacttcagccagttcatttgctgccatacggtagggtcgcttgtatagaggagtggttcctggagcaagatctatccggaactcaatctctcgcttgggcggcataccgggtagttcttccggaaacacgtctccgaactctctgacgatggggatttctgacagtcctatctgatgaagttctgaactactgacagaggttgggggtgcaaagaaaacaaccggttgttctggccctgggtacagagtgacagtgcgtctcgcgcaatccactactccttggaattgagccaaccaattcatcccaaggatcacatccaagctcttggtgtctagcagaatcagatccgagggaaaaggaatcccctgaatttctatagggacggcaggactataatactttgctgtcataacccctccaggggtggtgatgagcagagggttcctaagcctttctacccccaactgatttctccccacgaatggcacagatataaacgagtgggaagctccagagtcgaacaaaatggtagcagggatggaatgaatgaggaacgtaccaacgatgacgtctggagttgtcagcacgtcctcggctgtcacgtggttcacacgaccccgaatgacatccttaccaccgttgttggagcggggaggcgcttggccttgctgacgcctcagctttgggcatttatccgcaaagtgccccggctcgaagcagttgaagcacagacgctgcggaccttgagcgtccctgcggctttgaccaggctgcacagttggcataggaggacggggcgcacgagtcccttgttgactctgctgctgctgcggctgtgggacgcgcaccacgaattgaggtcgaggcgcggagcgtggttgctgctgctgttgttcctgctgcgaggaggatccccctggatagggattggtgtagcggaccctttggttagcaccctgttggttgcggaaattcgccaagcggcgcttgtgtgactccagttccttgtgcttgtcttccaagcggatgctcttgtccaccagacgttggaaatccggatagtccccggagactagacggacggacagctcaggatccattcccgccaagaacttctcctgcttttcctcatcttcccgtacatcctccggggcgtaccgggccaggttgttgaactcatgcaaatactccatcacagagcggttgccttgcttcaactctcggaattcccttttcttaagggccacggactccgggcgggncacatgggttctccggaaagcagcggtgaagcgggcccaagtaataggctgcccctctggctgcgtagcctggaaatggtcccaccatagagatgcgggcccctgcagctggtgggcggcgaagatgactttctcctcatcgctgcactgcacagtgtctagctttttccccacggcatgcaaccaatccaacgcatccacggggttgttggagctagagaaggtaggtggacggatgcggaggaactcggcgagtttagagtgttgtgggggtggtggtggagcattctgttgtggcggattttggaggtggtggaggaaagcagtcatcatgttggcctgctgggcgaggatttgagtgagaatggcgttggtgtctggtggtggtggtggaggcggaggaggaggtggaggtgggctgccctggtggttgtggttgctgccttcagattggttgccctcaccggtggcagcacttctcctggtcgtcaccatctgaaaaccccacccaaaaccagcaaacagagagagctgacaattaaagctaaccatccacgactaccataattcttgaatttattactgctattaaattggttcattaaagttcaagttgcttaagcaaataaaataaagacaggctccgacacagttacaccacacaccggcataaccatgccccacacaactccaacaagaagacaaacgagaaagaacacacgcgcaagcctactaactgctcgtctaccgctgcgacgggccaggacggaaggtgagcaacagcgcatcctccatgctaccaacgccggaggcttccccctcctggggaaccacgggcgcaggctcggcacgaggggtctccacgaagcaagtccacgccagggactgacgaacaagctcgggcctggaggtgctcttgcgggcggtgatcttctggctgcggcagacgcggcgacacttggggcgacagacctctccctgggtgatcttgagctgatgcagctgcgcctccactgcgtctaggtccttcttcagctgcagattctcctgacgcagctccaggatcttcatgttgttctcgaccatcccacgacgcaccatctgatggaagtcgatacgagccgcatcgtacgcctccaccatgcgcgccaggtgcatgatggtagcgtcatcctccgagctagcatcccggaaggtggcgaagtcgcgggctcctccgcgacgagggtggtagcggtagggcgagtgctgcaactcgtccgggtagccctggtgaagagtgccgatggcgaggagagcggcgctctggcaagcggcggggaaagaatctccacccgcggtgactgccaacgaagtccgctcgggagagccagtgaggatcactgcagtaacctcccaagcagcatggggctctgcatcgtcaccctcctgctccgggagcggcctgccctggtagtccactccatgcggataccccaggacaacgcacatgccccgcagctccaagacgaaaccagtcatgtccagaccacgacggctgacgctgccggccatctacaaacaaaaacaaaaagaaaagcaacattttaaaggtcatattttggcgataaatgaagcagcaggacagagagagactagaggattttcacaaataagaagggatttttattttgaaaatattgctaaggcttgggatctaaggctcgtcctagggtcaagggggctctgataccaacttgtcacgaccggaaataacccaacgggtgttccttacgtgcgtgcattaatccttgtcccaggaggcaaggtacaccaaaagttgatacaattcagagtttaacaagcggaagcgtaaatagttaatttattacatgggcagcaaaggcccagcacacacaaagacaaacgagaaacagcggaagactagggcgatgaccacaggcgcttgacggcaggcacgagctagacaccaaagccttcatcttccaggggctcctcttctgggtttgggaaaaattgagcaagactaagtacaaccaccgtactcaacaagatacacccacaagtgcagaataaatgcaagggagtacaaaggagttatactataaagggttagggttgcagtaaatagcatttaaagatatttagttgctcaaaactatttagtaaacacgattctagaactatacaatattatttatcaaggccgtgaacccacacgaacctgccttaacccaaggcctacgatgattcagaccgaactggcaacccgaccctgggtcccagctcgtcccaagccaacccaggccaaccattccaccttttagttgttaagcaggttttaagaattaaaacactaacttgggtacattgctcggcttgcccataaccgagggcgcggctattcgaatagattatactctgatcagaggtgtacatctttacccacaagacacatcttcctcacgtgtaaccacgtgccacataccaccacggtatacagacggaagacgtgacatagtttccaacccatcctagccatagacaagagtaccgacccaatcccacctacggccggaacccccgggacaggcaggcaggactgagcccctagcagcaggacaccggccctgtgccatgacatctcgactaccgggccacagctcgtgtagccttcatttgtcctagagatgtccatcgacccccgacttcttccatctccatccgtgtacttttgtttataaccagactgagccacaaactaagccttacccactagacatgtggaagtacggtagtgctttgcaacagaggcccgaagaccggtccttatatggccgaggtgctactatcaaaaccatgcaccccgagcccagcctaaaaccattttggggattttgaatagaaggagcggtgtgaagccaattccacaataaccaaaccattccatagtgtccaggtgatatgaacatcccaaagtctagagttgtaaaatcacctaatgttacctaattaaacagcgaagcatctacctaaaatcatactagtggtaccatgagtagagtgtccactagttggggttttgtttaatctaaggtgaacaaggtaataataacaataacaataataataaggtcataacaaaggtaaataggcatggctagataaaacagtgataacgcgggaatttaaataaagcgataatgcaataatttaaagcaacataattttataaactgggattcaatatgttcaaggatgatgtgacttgccttgctcgcttttccaaacgtcggcttcaacttccacgaagagcggatcttccgaagctgcagcgtctacacgaccaacggaaaagaaaaggcttttactctaataaactccatataacaagcagaaacaaagcacaaaaatgggttcttgacttcttaaggaaaaattagagacttgaacggtccaattccgagttcaaatggccaagttatggccatttgaaggttatatgctctttaaatgaatatttgcgaatttcttcatttaaattttaatttaaaatggatttattgcgtcagccgaggggagagggcgcgcggaccgggtccacgggagtggggccacggtggaccgggcgcacccggctcacaccggccggcgccgtgggtcccatgcgtcagccacacccgagggcgcgggcggctgacggccgggccccacatggcagccgcgggacgcgcccgaaggcggcgcacccgcgccccgatggtcgccgccggcgaccaccggcgcggcggagcggcgcccgagagaggggagggaagggggaagcgaatcggcggtccacggctcaccccgggtcgacggcgacgacgggaacggcgaccggagcggaggaaggcggcggcgcggcacgggtcgacggggacggcggcgttccggcggtcggcgaccgaaacggagaggtggacgaggtcggcgaggttgcggcgaacccgaagaaggcgacgccgaaacgggagaaggtccggggcgacgacggcggcggaccggagctcggcggcgacggcggagagagagagcgacggcgcgagctcgattccggcggggagagagagcgacgagtggcggaaacggcggagggaggcacggggagcgtttatatagggttgggagtgagagagggcggtcggatgagggggaaacggccgctcatttcttctttattcattgtacagtatgcaattccacgaagctgatagaactggagcaaaggttggatacgtcgatccaacaagaatatgcaaaacacaacacaccgtagagctgagagaagactgcgagcaattggttggcaagaccccggaagaaaaggaagaatatgtgaagacattgcacaagaggaagaagctagaagtagcaacatacttggcaatagcaatgttggcgcacgccgacaaagatgtcttaatggtcccctaccagttcacgtaagctctctcttctttttgtttaattaatttatcttcttcggaattttctgtctccaataagcctatcttatatgtagagaccactacatattattccttgtatatccgaaagaccaattgatcatatcattggaccccgcacactatgacaaggagacatttatggaattcctcactattttgaatttgtaagtgataaacatttcattactataaattgtttaggtcgatcaccagtcttctaactactaataaaacaattgtttccttcaaacagagcacacaagtactaccgcaaaagaggtggaccagtacatattccatcccagaagaagttatccgtcaggactggctggccggtactatcaaatttataccaatacaactaattatcgaacagtacatatatactaaatatatctactgagatcggtccccataattatatcgcagtgctacaaacaaccaccaggaaccaacttgtgtggttattacgtgtgcgagatgctcagagtaaatggaaggtacaaaacaaccagtaaccgagcaggtcatcgaactcttctctacaaagaaacccatctcgcacacacttctcactgagtaccattttattttcctttctgtgtgcagatccccgaaatccca

SEQ ID NO: 23235 - DNA, 3710 bp, Oryza sativa
atattattttagctattcggaaattgaatttcgcatgcggtctacttaagacgcccgcatgcgaaaatagatcttcgcatgcgatcttcttaggtcaaccgcatgggaaaatatatcttcgcatacggctgcgacatgcgggccggccaaccgcatgtgaagatcgattccgcccgtatgcaaaaacgctttctgtagtagtgaacgttgaaggcgggaggagcggcgcgggcgggggaggcggcagcccccccgatggacgcggtgggcgtgccgagccggccgacaacgacgtgaccacacgggagttgggaggcatctgcgtcaagcattctcctgctggttgccgaggcaatcggcaagagacgacagatgaggactgactggactgcgactagcaagcggtagcaacaggcagtgcatgtgtgtactaacatcaagcggcaagccaacaagcaaagggctgactgacagagcaatgctgcagataggcacgcatcgtctcctcgccggacggtggggcggccgcggatggtccaggtacgacgaccctccccacccattcgcacggacggagcgcggccgcggaggagggggacgcgaggggcgggagcctcgctggccctcgagcgccccccgccgccggcgctccagctcccgtccctgcagacatgcgaaggggagagaagagatgtcggatataatcttgacttaattagttgctgcacattatgtgtatgtgcagatgtacgtggtcactgagtcagtcacgtagttagccattacttgatgattgcacgcagatgagctagtgattagttactgcatgtgcgtgtattagtgggagttagttgggttgttagtcgtgtgagctgcttacatatccatgcagtgcatgctgaagttagtgcctagagaataggtcgtgcatgagtggagttggtagctcttttgtgtacataagtactagataaatgaatgaaaatatgtggcatggttgccgagaaagcaagatgtagtttatgtgtccacctctgttcttcctccctacttgtaatattcttgtgtgcgtgtgtctaccaaagagaatttacgtgtttgtgattaacacctagagagtgagaggagatattcctaacaagagagaggagggagagagagagggaggaggatgaagaggagagaggataatatgtgggccccacatgtcagtgggttcacaaatttgctttgaatgataaataggtcccacacatattttttaattctaatgatacctaagcgccacatcaacgccacgtggacagaagatcgagtcaatactgccacataggtgccacgttagtaaaaccgccctccaaaaccgccgagggagtcaaattgcaccggttttaagagttgggggtcgagatatccggttttgtggtttagggtcacagattagatttcgatcacttttgagagtcacgaagtgaacttattccacatcggaatcagttgggcctaccagacaaaaatgggcctccatatcacacctaaagagaggggttgctcaatatataatccaacgcttggtattagctggtctgagctgatccaacgacgccaattaactgatgacgtggatgaataagagggcagcaaattagtattaactgcagtaagtgtggattaatcgtatagatatataggatttttgctatgctgactgcagttctcacgacgaccacggttgttgtcatcattgtgaggatgaggccacgattgttacgatgatgtcagcaaccgttgtcctcattactcctttggttctcgcgcttttccctccatccattgaggtgttgacataagtctatcagcttcatcgtttggcctaaacagtcaaagaataaaccaaaatttaaatttttaaacttaattttgaaattgattttgaaatgcttttaacgtaatttttgttaatgttggcttttaagtcgctacgaataaatctacagaagttttacttataaattaattttaattttctaataagccattttggataaaatgggcaattgatgggagcctacatcattattggggggaggagaattgcgtgttctccatcatcgaggcatagattgatcttgattgtggttctgacttcattattttggccttctgcaccgtcttggttccttgcgggagattggtgatttgctgaatgtcatccctctctttgttgattgttcacagttttaaatgtagtatcgaggttggctgtcatagacttcatatgttccaaccaagctgttgcatctggattggtcgttgcattgttggggatttggtccagcaatccatgtacataggtcaaatgctcggccggtgttagagcagggtttgttggaggagtatgttgtgagaagctaacgtattcaccttcctcatgggatgctcttgctccagcactggttgccgcttccccttgattaggatcattaaccttgtgttccgagttggccccctcatcttttcgcttatgcttatacttatcagccaaaatttaaattttcaaccttaaatttggagttgattttaggattttattcattgtagtttagttttcagcatttgagcctttgcttttatatcgtcaagaacacgtatataaaagttttatgcacaaatatttttcatttgtaattatgttgttttgctttttcctccaatatgcctaatgatggggttgtaaaatagccccatattgcatattcaggcatataaactatcacaaatgaaaattttatcaattagaaagttgtttatctcattgagctatataactttgatatacgtcatgtctctatctgagatcatttaaaaaattcaaaaaaaaattccaaaatagatctcatcatttgtaacgcttatttgaacatgtaaacaatctcaaataaaaatattgaggtctacaactttgatatagggcctatctccattcaagtctgtctgaaaaatttaaaatttatttttcaaaatagatcccatcacttagtgcatattcagacatctaaacgatctcaaataaaaatattatcaattataaaattaactctacaacttttacataaagtctgtctattcgactacatacacatttttttaatacacatttttttatcaaattttataaaaaaaggttgtgatttaaatatattccctcatgtgtgagggttcgtaactgccactcatcatagatcatagatatgtgtgatgtgtcgtagttacgagctattacgatgacgggtcataaatatctttgatgggtcataagcagggcttcccttactgccgtaaccactcttaccgtgggggtacggtaatggttaccggcggtagggtttgatgaattttaaccaaattcaaaatttccaaaacaaatcgaaaaaaacatggatgtagttcttgatttgtagtggcggatggtaaagaaatttgatgaaaaagagtaatataaaataacatttgatggtaaaaccgagagtacattagaaaatggtaaaaaaataatgcaatggacctttaagttgcactgtttatccagcaaattaaggcccaatagtggagaaaatatatatagggtggctgggtgctacatatggacatcattatgatttgaaatgtgaggttgttgaattgacgttgttgacttattatgctatgaa

SEQ ID NO: 23236 - DNA, 2281 bp, Oryza sativa
ctgatgcactggtcgttctttgttgtctgtgcaaagttgaaaaaactcaccggtaggccctccaagtttgattttaccataataccatttttttcttgcgcgaggaaatatcagtttgcctttgaccaaatgaattagtggatccgaagatgttgacatgaactctctctctctctctctcaagtggttaaccatgcatgcaaccatttttttaaatcttttataatttaactgaaaaatcgttcagtaaccaattgttaaaacaaacaatctagccattcactgaaggtaacatggtaagctattgactgtaaatatttatgtaatgtcgaaaataacttgccatgtgacatagcaaaaatataattttcaaaatacaaaaaaaaaatcacatgcgacccaatcaaatactcctatcagtgataattgaccccgcaagccatctagggtcaattctagtacaattccacgtagatttcctcccaccctaagaaaagttgtcactttgttctttaaaaagaccaactcgcgtgactttcttctttctgcgctgtaaagataatagaatgaaacattccggcttttgctcaagagagctacagttaattattacaaggtagtacacttaaaagaaaaaaataacgcaaacacaccaaccaaaaataaaggaaaccaaacatgacaaggataatattattctaacctgttggtgaatctccatccatggttggcaaaaagttgcataaccgtcgtctcaaacttacgacatgcaacaatcaggaattcttcatcttcattacacttttgtagttgtgcccacaaccggagccaatatgttgccctaaaaattacctgcatataggaaatagatgatgatttatcaaaaaccctatcattcctacacaaccacagtgcacaacataaggcagaagcaccaacaaatatcagtttactctttttcatgtcaaccccccgaagccatctatcaaaaatatgagatatggtactaggaaggtataatccaaaagaaaactgaactgctctccaaataaattttgcataatgacaatccataaacaaatgttgaatagtctcatttttcatataaaaacaacatctcaagctgccattccaatttcgtcttgctaggttatccttggttaaaacaactcccttaagcaagtaccacataaagaacttaatctttagcaacatcttaaagcttccaaataaacttatttctatcaatgtaaccattattaattaaagctaagtacattgatttaaccgaaaactgaccattttgatgataatttcatctaaaataatcagaagaattatttaactggaaatgaacaatagaagcacacaactcatgccaaagtgttagattctgaccaactaaagctctcctaaagaaaacattaagcggaatagaggccataacactagcaatagaagcattcctccttctgacaatagcatataaagatgaatacttatctctaaaggccatattacctagccatttatcttcccaaaatcttgtttcttccccattattcacaatccaggaacccatacttaagaaagtgtttttcactttcatgagtcctgacaaaaaatgggagtcaccttgtttcctatcaacttgggttatagacttattataaagatactttctcttcaataaatcttgccaaacaccattcttattaattaacttatataaccacttactcaactgacatttattttgaatctctaaattatgaacccccaaaccaccttgatctttgggttgacaaataatatcccatctagctagcctatacattttcttatgatcatccccttgccaaaagaaacgtgatctataataatcaatcttttgaagaacccctttcggtatctcaaagaaagatatcataaacatagctaaacttgaaaggacagaattgatcaaaaccagtctacctccaacagacatgtgtttacctttccaactactaagttttttctcaattctttgttcaataactttccaatccttattacccagtttcctaaaatgcattggaatgtcaaggtatttaacaggaaaagaccctaacttacaaccaaagatactagaatattgatcatagcactccttagcctgaccaaaacaaaacaactcacttttgtgaaaattaattttcactccagataatttttcaaacacagataagatcaattttagattctttgcttgttgtaaatcatgctccaggggtgcagg

SEQ ID NO: 23237 - DNA, 8074 bp, Oryza sativa
aggcctttataagtttaaaaattgtcaccaatttgatcattaactttaataccaacatgtcccccttgaataaaagaggctatccactcacaccatttaagagagaagcccttcattctcaaagtctgttgtacaaaaaaaccatttaaccttatcataagctttctcaaaatcaatcttaaaaattatgcactcatgtttttacgatgtaattcatgtaaggtctcatgcaaaataaccacaccttccataatgtttctcccaggaataaaagcagtttgggtaggactaattaccttttgggccacactcattactctatttgtggcaactttggtaaaaatcttaaaactaacattaagtagacaaatgggcctatattgttaaatttttatggcctctacacacttaggtaaaagaataatagtaccaaagttaagcgagaataaatgtaaagtaccattatgaaactccttaaaaaggtttattaaatcaaattttataacatcttagaaaacttgataaaattcagcaggaaacccatcaagacctggtgctttgttatgttccatctggaaaatagcctccttaatctcctcttcagtaaattccttgtgttagagcctcattctccaaaagagaaacttgaggaatgtcagtaaatttactctcatcaaactgaataggagaatcatctggaggaccaaaaagacccttataataagtgataatatgcgatgtcaaattttcatcaccatttattaattggtcaccatcttggaattcaaaaattctagtattactatgtttcccatttgcaaccaagtgaaaatactttgtattagaatcaccctctagaatatccttagatttggccctcagataccatttgatttcctcctctctcataattgaagataatctattcctataaaaccatctaatatccaattcctcctgactcaaaagaatatcctctttgtctcccatgtttcttttgatttctggaagtgcgtcattgcatgtacaagggcaaagtttcatgggtactggctccatcagtccgccgctgcttccactcaaaagctctgttgggcgacacgggcagcgaccgccgcttgcacctctaccccccacctctctccctcccgcctcaccgccgccggagccagacaccgaaaacgtacggcagcatgaatggcggcggcgagggcattaacgctctcctgcgcgggatctaggagctagcggttgctaagaggacaacggtgacgattgccactgctggcagcgtcgggcagtcgcggagaagttcaaagccaccggcgagagctcagaagcgcagtgggaggatccggcgaggaggaaaggcaacggcaggcggatccggtgaagagggcgatggggcggtggctcgcacgtcgtcagcagcctggcgctgccggcggcatagggttgtccaaggggagacatcttcgaccctcgtgactgcctacgcgcaacccctctttgccgccggtgaagctggacctgttcattcgcctccttggccgatttgtctagatccacttactccttggccagatctactcggttggggctgggaggtcggtggcagcggcgccctgacctgcccatgggggcggtgtgtgatggtgtcttcaagccgctagcgtccgtgccgccgccgcgtgagctatctgactagtgtcctggctggctttaccccctgctctgggttgaaaaccccttttggtttccacagcgtacgatggcgtcttctttcttgttgtcgtccttcttcttgaaggcatcatatttggaaatcccctgccataaccctcgggtggcttcttctcctcgtcattgttgtgccctctacctgtttgtcccctggcatccatcgtgtcctgcctacacctatcctcgacgcctttggtccaccttgccttgtcttttcatctaaccagtgttagtgttcctcctagtttccttggtttgagtcattttggttgttgtttcttgccttgcttcgaccaccttcaccttgatccaccataaaccacgagtatgcagtttcccctttcctcctcagatttcttccattttggcatgctagaatgattgatagtttggggctgcaagttggttagaaccattggctttctcagtgaacctatgactcctcaaccatcgtggatgatgtttcctccaccattgcaattgctgcctcccaacttacctcttttgctttgctccttgttctattttcatcttctttgcttgggtgtccttgtccacaatgttcagcgaccatcccaccattggggcttccttctcccttggggcgtcgggggcgttgtattaattggcaatttgctaatgccggattgaagccgatttgatgtgtgcggcctttacagcaacccttagttgctctccctcttctggggcatcctttacccaaagggcgttggcgagcattgatcaatatttcaacacaatgaaatcgggttttgatggcttgatgcaggtggtctttgacatacacaacctctaatctccggaaactgagtcggcttgtgcgtggcagatggccttctgacaattcaactcccggtgcttgaaggttgcgtgtagagtagatgttgtcaggctagggagctagctttagctcagattaggattgtggttttgtgatcttgttggtgaaaaacatcaaacacctcctctctctctttctctctctctctctctctctctctctctctcgtagtcctgctagtgtggctcaggtgcccttcggggtggttgtgtttctgttgtgtttctcttccttgtttttccctgtatactttctcttatcctccaggactactgcgcttgtgtagcagaagctttgccctgtgtaagaccgtttgaagtaatatatttaggtgggcatttcgccccccggtgacccgtctaaaaaaaagttgcatgggttctgacaggaatattcagccttaattcgaaaatgacaaggtcacttgacaagcaattaaagagtagagagagaaatattaaagagaagagagacaaataatcttgccacataggatttttcatgtcagcaattaaagagagaaaatggtgtcttgaatctgacattatcatgcaagtaaaagagcattggaggggagggcagtatcgacaacataaaatcaaaggagagagatggacaaagaaaattattatctgatccaacaagtagaaacaatgcattggataaattcactaatacaaaaatggttttttttttgcggccaccggcattgctagagaccaatggccagtgaagatgcagcatcttcaattcactggcgatcgccaactgccagggaatatagcttttcgctggcggctagtttaaggtagccgccaacaaaaatggtagaggtaatgccttagtctagttgtatgagattagatctgtatttgagtatgcgcggtacaacgtgtgaatagcacgtagcacgtatcgtcctctccccagaattagggtttttggttcaccctatatagaggtaacatatctcctataatctggcaacctaccatcgatttacatgagataagatcggttgccttatctagccacgcatgctcctcataggctcaggcctactcggcccaccacatgctatgcggcccaaaggcccaacagttggtacctaggtaccgtgtcccccacattagcccccgactctatacttagttaagcatcaagcaagtggagagtcaagaacatgaactcccaacagcgtgtggttgagtaagacaaaccctagaggatttgcctcatccaatggaaccagccaaaccatggaggtgaggaagccagttagtgatcacaaagttggccaacatggggacgtagttgctcggcggtggtgaaggagccaaccagcacaaggacaaagtcacccgacagcagcataggcaaccaacctggagacgcagcccccagccggcggcagaggagccagccaacatggggatgaggtcacccgacggtggcataggcagccagctagaagacacccgggacttgggagtgacgcccgagtaagacaactcagggggcgtgtcttgcccagtggagtggtagccgagtaaagcaaccaacgtggaggcatagccaccagccggtagcgacgaagccgagtaaggcagcactaaggagtgtgcctcacacaacaaagtgccagctgagtaagatagccaacgtggaggcgcaacccccaagaggtggcgacggagccaagtaaggtagcactcatgagtgtgcctcacacagcaaagtaacaaccatgtaaaatagcccacgggggcatatctcactcagcgacatggtccagtcctcaagtataggagatgggcgcatggtcccgagctccaattacacatatccatacctgggccctgcattaaaaaacacataaaatgagtagtatattgtatagaaaatatccactcaagaggaatacaagtttgtttaaatacatgtaaatatttgttcctcctttattagaattaatttccccgagtagtttactatttacgttcaagcactctgcctcgggcgtacggtatggggcgtagccataccgtgtaagtgtgcagtgagtggcgtagcccccgggcatacggtgttaagcatggccttgaccgtgtgagccgtgcgaggaaatagagcttcacgaatcagagtttgtgctactcaagtacttttgcaaccattaagaggaggaaatgaacatgcagtttgaagcacctaataggtgcagcccttgactttatgtttggttgggtgaccaactaaacagtaagtcagaagtaaaataaattactcaaatgaaaataccatataaaaagtgaattagattacttagtattccatgagttgaaaacaaccggggaggcggtgaagcccttcagctgccccggagccggccagtcggtgggtacgtgattgactaatgtggaggcgtagttgggtctgcgtgagccatacaagagtgaagccccagggcatacggaacagtgacgtagtcgggtagagagtagccgggtctgtgtgagccgtacaagggcgaagcccctaggcatacgggcacacgctcctggcgaagtcgggtcgagttagccgcgtgaaggccaaagctcccaggcgtgcagcgtcgtgcccaggtcttacggagatgtgcccgggcgaagtcgggctgcgtcagccacgcaaaggccgaagcccccaggcgtgcggagtcgtgccttgagagtacgtgccccgggcgtagtcgggccacgtcaaccatgtaaaggctgaagcccccaggtatgcggtgtcttgcctcgggcgtacggagacgtgcccagacaaaattgggccgcttcagccacgctcgaaagacgaagcccccgggcgtgcggcatcatacctcgggagtagtctgtctggggcgtagtcgggccgcgtcagccaggagaagactgaagcccccgggcgtgcggtgtcttgccccgggcatacggagacatgccccaggcgaaatcgggttgcttcagccgtgcgaaggccgaataccccgagcgtgcggcatcgtgccctgggagtagtccgtctagggtgtagtgtcgggccgcgtcaacgaggagaaggccgaagcccccaagcatgtgcggcgtcatagacggtgaagcctcatggtggcgttggtgccggctagcccggggacatgttcaccacgcggtggcgtggaggcagccgaccgcgaaattgttcaggcaatcggcagtgtaagcagatgtggccgacatgggaacacggttgccactcggcaactcgaagatggctgactacggaggcgatggagctaggctgctacgacacaaaggcggccagagtggagaccactcggcgacgtcgaacatctccggcgcatgtgcaaaatgattgttaacgaccgaatttggaaatatcgatgcgatggcgacagtgtgcccatgtgcgcggctaccgacgggcatgtcttctgtctacctggtcgtgtccgagtgcgtggccctcgcacctgtgtgcgcatggccacgactacacacgccatcactactaggaaaagcattttcgccggcaggggaaacacatcttcccagccggaaggccggtccgcctatagcacaacgcctaggaattcatgtgtattcatcctcttatgggatatcaatgggatgaagagttttgagaattaatccatttgattagggaattggtaacttatatcaattactcctaattgatggatggttgatggttgtgtagtggaggatggttcatggctagttgatgacaattagttgctctattcctcttcctattccatttgtaacctacatcaattactcataattgatggttggttgatggttgtttagtggaggatggttgatggctaattgatgagaattagttactctattcctcttcctattccatgactcttactcttcatcttccatttctcatataaaatgagaatggatttgatctcccaaaagagaaagtgagacacactttcatccattttccaacgctgttgctgctacggtaatcccatcccgacgagtgtgtgcacacgcgttgggagagtaggcctccgaaaccacgcgctgctgcgacgtttgcacggacgggcgggcgatcaggtttttggagagcgtaaggcgcgactactcactgttcgtcaacatctacttcaccttcaccaatatgtcgaacactggagacaacggcaacactggatacaaggagaaggaggctcccgtcaacatcaacggaggcaatactgcctcaaactccaacggaggaccattcttggggtataaccttcttacattatttcaattagaagttttactgttaatattcattgcaatgtcaacattgtgttattatgtgattgttgatgcttattctacattaagcatgctcatgttgattacattcaccactatcactggatcaaatcccattataaatatcatgtttattatcttgttattttggattaaaatatgccgaattatgaccaaatttccaacaatccaaaaacctgataggtcattttcggtagttggctttgctgcaacactgaaaccacatgcttttgatagttctaattataagatatggaaagcacgtgcactactgtggttgacagcgatgcaatgcttctatgtttcacggggcaaacgaagtgaaccgcctctctctcctgaggaggaggctaagttcgaggcttcggattgcctgttccgtggagcattgatcagtgtactcgctgacaatatagtggacgtgtacatgcacatgccttcagggaagaacatgtgggatgcacttgaggccaagttcggagtttccgacgccggcagcgagctgtatgtcatggagcagttctatgactacaagatggttgatgaccgttctgtagtggaacaagctcatgagattcagatgctagcaaaggaacttgagaacaacaactgtgagttgccggacaagtttgtggcgggtggcattattgccaaattcccaccttcttggtcagactttgctacttctctaaaacacaagaggcaagagttcagtgttactgatctcattggctctttgggtgttgaggagaaggcgagagcaaaggacaaccggggcaaaaatatcgagggaggttctagcgccaatttggtgcaaaataagaaccctcacgcatcccataacaacaacaagaagaaagtcaagcctgatgtcaaaccaaaggctacaaccaattttaagaagaaaggcaagggaaaggccaagggcgactgctttgtgtgcggtaagcctgggcattgggcgaagaattgtcctgatcgcaaggacaagaagtctgccaacatggttattagcgagggcggaggaacatcggggtacggttattttttacctacagttctctctgtttttcattcacctgattggtgggttgatact

SEQ ID NO: 23238 - DNA, 1984 bp, Oryza sativa
  unsure (1)..(1984): unsure at all n locations
gtgtagcatgtccctttaataaagaagaatctagttagcggctctctactgtgtagagatggttttagacttgtgtttgaatccaataaatgtgtcgtatctaaatatggaacttttattggaaaaggttatgatagcagaggtctgttccgtttttctttggatgacatgtgtaataataataataatgttgtgaaccatattagcgataatgatgagtccaatgtgtggcattcgcgactttgtcatgtgaatttcggttgtatgacgcggttggctaacatgagtttaattccaaaattcactttggtcaaaggttccaagtgccatacttgtgttcaatcgaaataacctcgcaagtctcacaaggcatttgaggcgagaaatttggcaccactagaactagttcattccgatctgtgcgaaatgaatggcgtgttgactaaagggggaaagaaatatttcatgacactgatagatgattgcactagatattgctgtgtacctattgaaaacaaaagatgaggcattgcattactttaagatctataaagctgaggtagaaaaccaacttgaaaggaaaatcaaacggttgaggtctgataagggtggagagtatttttccaatgagtttacgtccttttgcgaagagtttggaattattcatgagagaacgcctccctattcaccccaatcaaatggggtagccgaaagaatgaaccgcactctaactaagatggtgaatgccatgttagacactgcgggactttccaatgaatggtggggtgaggcaatttttactgcttgtcatgtcctgaataaaattccagtgaagcataaggaagtaacaccattcgaagaatgggaaaggaagaaattaaatctctcatacntacgcacatggggctgcttggccaaggtaaatgtacctatagccaaaaagcgtaaacttggaccaaagaccatagactgtgtgttccttggttatgctatccacagtgtgggctataggttcttaatagtaaactctggagtacccgacatgcgtgttggtacaattactgagtccagagatgccatattttttgagaatgaatttcccatgaaaaatacacctagcacgtctagtctagaacctgttttaccccatgagcactttgcaccgataaaacacaatgagcaaacgcttgagggaaatcctgaggaggatagcattgtagatactcgtaagagtaagagacaaagggttgcaaaatcctttggagatgactacattgtatacctcgtggatgacactccaagaaccatagaagaggcatattcatctcctgacgctgactactggaaggaggcagtacgcagtgagatgactcgattatgtctaatgatacttgggaagtcgttgagcgtccatatgggtgcaagcctgtaggatgcaaatgggttttcaagaaaaagcttaggcctgatggtacaattgaaaagtacaaggcaaggcttgtggccaagggttatacccaaaaagaaggcgaggattttttcgacacctactcaccagttgcccgcttgaccacgattcgagtactacttgctctggcagcctctcatggtcttctcgtccatcagatggacgttaagacagttttcctaaacggagagctggaggaggagatctatatggatcaaccagacaggtatgtactaaaaggtcaggagggaatggtgtgtaaactgttgaaatccttgtatggccttaagcaagcacctaagcaatggcatgagaagtttgacaccacacttacatctgctggctttgttgtgaacgaagctgataaatgtgtgtactatcgctatggtaggggagaaggagtgatcttgtgcttatatgtcgatgacatattgatctttgggaccagcttcaatgtgattgaggaggtcaaggactttctgtccaagagttttgaaatgaaggatttttgagagg

SEQ ID NO: 23239 - DNA, 1393 bp, Oryza sativa
taaaaatctggcagatcagtttaccaaggggctaccacgtaatgtgatagacagtgcatcgagggaaatgggcttgaaacccacttagagttgcacaatagtggaaacctgtccattgtgatcggagatcccgtgaatttggatggcgaaacaaactattgtgtaaccgagagaagagacccttaaatgggctcattttcatgatgtacttctcttctactctgtgtggtaggatggcttatgcctcggcttttattaagcagagatgttgacctgcaaaacatattagaaggagtacacctatatgagttcgactactagtcacagtctatgagatttgggtgatctctagatactcatgaaaggcctggagtatgacttataagctccaacctgagggaatactaacggttgcctagtatcagttatggaattgagtgaaacctaactgcacaagactgacaattcaaggcatagtccattgttcagttgtggtccggtgtagctccttttctaggtgaaagttcaacttaacagtcttcaccaaaacactggtatataaaagctgctatggaatagagagcattctcatgagccttgaaatttggtggggattgttagatttaattgggtaattgatccaattaaatcaattaaatcatataaattccaaggctcattatgctaggaattcatgtgtattcatcctcttatgggatatcaatgggatgaagagttttgagaattaatccatttgattagggaattggtaacttatatcaattactcctaattgatggatggttgatggttgtgtagtggaggatggttcatggctagttgatgacaattagttgctctattcctcttcctattccatttgtaacctacatcaattactcataattgacggttggttgatggttgtatagtggaggatggttgatggctaattgatgagaattagttactctattactcttcctattccatgactcttactcttcatcttccatttctcatataaaatgagaatggatttgatctcccaaaagagaaagtgagacacactttcatccattttccaacgctgttgctgctacggtaatcccatcccgacgagtgtgtgcacacgcattgggagagtaggcctccaaaaccacgcgctgctgcgacgtttgcacggacgggcgggcgatcaggtttttgggagcgtaaggcgcgactactcactgttcgtcaacatctacttcaccttcaccaatatgtcgaacactggagacaacggcaacactggatacaaggagaaggaggctcccgtcaacatcaacggaggtaatactgcctcaaactccagcggaggaccattcttggggtataaccttcttacatt

SEQ ID NO: 23240 - DNA, 5540 bp, Oryza sativa
tgtgttattatgtgattgttgatgcttattctacattaagcatgctcatgttgattacattcaccattatcactggatcaaatcccattgtaaatatcatgtttattatcttgttattttggattaaaatatgccgaattatgaccaaatttccaacagctatatggtccgcctgcgaaaatatagcatgaccgcctgcaaaaataaaaaaatgccgcctgcgaagataggtacaaatatttgaaatttgttacaataataattttctcataaattatttttcaattaattaattaattgttgcataaataatattagtaaataacaagcttttgatactgagaaatctacatatattgcaaaagggaaaagtatcgtcaaaatattataatattttttacattgtcacttcaaatacgctatctaattacattatggcatagcattgctgcactcccgaagatttttgtatttgtcacttgtagctagggcaccctctttgtcgaagaactttccttccacatgacagcactcacggtggatgaagtggtagagatcgcgctggatatttttaatggctgtattgtcaaagcttgtttgttgctcctcccttggcaactgcatgcatggaaataagcacaatatattagtatcatctatatgtgaagttgtctaatccatatagtctagagacttacatcctctgggttaaccctgacctcccattaacccttaggaattcgcatgcgtaatacccgctgaggacagtgcctctaggttgcttgtgacacttcatgacatatcatagaagaaaatagttaaattttgcaattagtgaaacaattggaatacattaagtgagtggagtattcccggccaatatgtatgtactagcagcttctcccttgatcgaatctgttctccacccttgaacttgtagtacttgtacgcactgtatggattttgtaccgtttcacattaaggaggagatttaattataatatattcatagcagacatgcaagtgtcagaatcacttactattgtaagattgttagaaattgtttgtatgagtcatgagagtaatcgagagggtccaagactgtcacggtgcagtgcttcgggtagatgattaaaccgatgtaatgatcgctacatattaacaacagtgcagttagtcatggatacaataagacacatatgtataagagaaatgtataccggacttacttaaaattataagcggccaggacgaccctcttattttgaaagtgcaagaaggctcgtccaatgtactgtgcgacattaatcagtttctgcttgtgcaatcccttcttgtattcagctatctcttcgggagtcttgtccttcagctgctctaactgtggtgatagctgcacggtatgctgtgtttgacatatcctagttggatctagaaatccgataggttcttttagcttcttagcatccatgtattgcatcctacaaaagaagtttgttagtaataatcacatggttatgtattatatagattccgtcgtgtaattaatgtacactcatactcacaggcactaagcaccgatatagttgacgtccatcttttcccgatgatatatggtgtgcagatcttcgaaatatggttgtgtcttcggctgttgcgtcttatctttcttcttcgagccggtggacttagctgggaccgcgtcttcttgtgccttgtctttctttttcggctgccgttttgatctccgtggccccgttttctacgagtaggtatgaaactttcgaattactactcactactagttatcactcacacaattacgatcttaattgtacctacccctttctcacggggaatgtagtccttatcaccttgttcaccctcatccttttaccaccgtttcgggcttggacaacgatcacttggtgacgagtactcatcgtcctcgttgggtacgtcgctgtcggacccatcggacggcagcaccgttggttgcggagcaaccacaatagcaagggacggctcaactggcggttgtcaagactccacctcccctacagcctgatcttcatttcctttagtactctcggccatcgtttcgtacttcaaacataaaaatgaactcgatagttaatatagaggccataaaaaggagcaaatttaaattatcgaggccacttatcataaaaaaatagattataccacctacttgtcatatgtgcaaaaaaaattgaacatagaccactacgttgccatagtaaaaaaaaaattcacatagaccactatgttgccatagtaaaaaaaatttgaacatatctccccccatatgataggaaaaaaaatttgaacatctcccccacatgttatacacaagaaatttgaacatttctcccccagatgttgtacaaaaaaattttgaacatatctcccccacatgttgtaaaaaaaaattgaacatatctcccccacatgttgtacaaaaaaaatttgaacatatacccacattcacccatatatcattcacatccacccataccacccgtatcacccacaatcaacagataagacccctcattcccattccatccatatatacaaacccctcacagtcaactgttgaatgtttgttgttgcttttataaactctagacgcagttgtgttttctgctttcttttcttctgctgtaaactgtgacatttcttttaatgaaaatggagggttaaggccctttgataaaaaaaaaatacaaacccctcacacatatataaacacccacatgcacatgttcgctcgcggacgacgagcggccgaggacgtcgttcggtcgtggacgaggaagttgttcagccgaggacgacgttcggccgagggggcatgtgcgcggccgaccgggagagaggcagcggcgcggcctggaggaggcgggcagtgaccgacgtgcccaagagagagagagagagagagaggcgccgtggcggccggccaggaggaagcttgccggaggaggagctggccggaggaggagccgaccgaggaggcgtgcgcggccgggggaggcgaggcccggaggtggaggcggcgcgcgcggcggccgaccggggagagagaggccagggaggaggagataggcaccagcggcccacaggtagaggaccaccgcgaccggcggcggccggcgatggacggggtggtggcggccggcgatgcgcctggtcgtggcggaggcggcagccggagtcgacgcggcgggcggacggcgcttgcaggcggacggcgacggaggatggtggtcggcgcggtttcgtcaaaaatttcagcagcctgatggcgacaaaatttctacggttcccgcctggacttagaaatttggcgcccgacgggtgcccttatataggcgatgtatctttctaggcaggcgccccgcctgcgaagatacatcctaactaacttcgcaggcgggccacccgcctgagaagatgtcacccccacttcagtactcatttttcgcatgcggacaccccacttgcaaaaataattagaaaaggtcaaatattaatacttaataaagaaacattttattaatgtaactgactttataaattataaataaagatggtaagcccatataaaaattgtaataaagatggtacgtttcccaaaaattgttacaaaatattaaaagcttaataaaaacattttaaaaaaataattgattttataaaatataataaaaatggtaagtccatataaatattataataaagatgataagtgcacataacaattgcattgtgagtaaaaacataataatgtgcaatatgagtacatatagccccctacataccatcattacagaacaaacaattactctttaacatttttccccacaccgtccttgtgcatgtaaggcttcatggtcttctgagttgatgcctctacaagcttaatcttttgtacaaattacgtataaagtggcatactatcgtactggttgtaatcttcgacatcttcgaccccgtctactcccaagatcttttgttttcctgatagaactatttctttcttcaaatttgcaaggtctgtcacatagaacacatgtgccacgcgattggcgagtacccaagggtcatccttatgacccacattcgcaaggtcaacaatagtaataccaaacttatcaatactgaccctgttcgggtattttacccactggcacttaaatatgaggaattgcattgtgagtccatagtcgatttcccagatttcttcaataaacccaaagtatgattgtttttccccctgaatcaattgcctccatacaaacaccgttgttttgagttacggtcttactatctcaggctcttgtactaaatgtgtatctattaatgtcatatccctcccaagaattgactgtagttgatggaccacaagccaaccgcttcatagttatttgctcggttgtttctccatcaggtaagtctaggtctcgcaaccaatctatgaagacacgcttgtgttctttcattatccattcggttgtgcgtcccttattgttagctcttagtaattcgatatgttgatcgatgtaaggctcaatgatagcaaactgatgaagaatgctgaagtgagcttctcaaaatgatttgtaatcatgggtgacaaatctcttctttcctattgtccccctgccagtcaatctacccacgtgttgaggtacaggtgtcagggttatggataccacatacctaatagtagttgactaaatctcggcagggctcaccacataccatgtcctatacggaagcaaccttcggatataggaggagttccgataaggaaatgaaaccagagttctacacggaaacgacaaggactattcggattgtatccatattagtttccctagttctacttggacaaggggacacctatgggtataaatacaaggccccctatgaggagggggacgactgaccaggagacgatcaacacgatcaacatggtcaccacgatcgagatccacctcaatcaacaaccaccacaatattcggaacaactgaagccacagcatacaagccaacatacgccaagacacgccgccagatatcgacttcagggataggcatggctattcccctacggtgtctccggataccgtcaggagagactaaagcgctatctttgaggagcaaggctaccctgtagtcgactacgagtcagaccttcagaccgccatgtcgacaacagttagataggctattccacatattgtactggtgcgattatggtgaataaaagcaactccggctccggccaacaagatgtagggttattacctgaccgctcaggggcccgaacctacataaaaatccctgtctccgtctcttttacctcagtctcgcgtatatcctagcaccgacgatccccatactgtccaaataccgtagtcgagacatcaaacgtcgacagtggcgcgctaggtagggggattttggtgctctaggatttcgacgagatgggttcaagagatggaggg

SEQ ID NO: 23241 - DNA, 2975 bp, Oryza sativa
tcgaccaaagtacgtctcccgacgagatcggaaccatcgtcgtcaacaactcgttctctcgagatcgaccaaacttcaagacgtcaacaccgcggagaatcaactgcccagacctccgcctacgacatcggctggaccgacaaaatacacccggcatgtatctacaaaggaacaattgagcactcgagtaggatgtggtcgagtacgccgcattatcgagaacgatctcgacaaatgcagagccatcgcgcccaacctgccaacgaagaccgacgacctatctcatagcaccggccatcctgggctactcgagagaaggttgttaacgaataattcctcgtgaacgccgtcggcttgatcacctgacatgattgcgaacggacatccgtatatgctataagttgggtacgtgagtcatgctggccacatgagatacacttgcaacaaaccaactctagcgcttccatcggtgttcgagagataattctgctcgctcactggtcctcgaaccagtacgtagcaatctctcgcaccgcaaacttcattggtgttcaagagataactctacacgtttgctggtcctcgaaccagtacgtagcaatctctcgcaccgcaacctcagatggtcgaggtacgactacgattgatcttcgaacggcagcagagtagcagtcctcgcaccatgactcggacgacttcaaattgatcgagaaacacctgctcactggttctcaaccagtcaatcgtagcgatctctcgtatctttacttctagtggtcgagtttagactacctctggttctcgaccagcggtgtagcgattctcccactacctttacttctagtggtcgagtttagactacccctggttctcaatcagcggtgtagcgattctcccactacccatacttctagtggtcaagtttagactacctctggttctcgaccagcggtgtagcgattcacccactgtttccacttcaagtggtcgagtcacgactactgcctggtcctccaccagtggtgcagcgactctcctactacctctactccaacaaagttggtatcaggtacacaagatcgccaagtgttttacccagagatccctcacccagatgacacctagcgttgacacctatcctactgtccctttacgccatgctgacaaggcctccgaggaacctaagggatcttcggctggggatgcccggagccgataaggccttgtcggattctttagagacgaaagaccatgtcagccgtggtcgtgtaagagttctccccgtgcgtattaaccaagccgcgtaatcggaaattaactttccaacttcacggctgggggctaggatcagtacttgttcaaccgaggcagttcaaaggtccaagagccttgtccctcgagaacgattctccgacgacaaggctagaggctagggagagtgcataactcaacaaactgactagtcgaagtcggtaaaagagaagacgctcatacacaaaacattggtcggtaaatttaattcatttttaatttaccatacatattataacatgtcaccctttgagcattcgctcgggggctctttctatttgatattcttttatgagtattgatttcaggaaaattctattcgacatttgttgaaaactcatgtctctatagttctacaccaagatcgactaaggcgagtacgacaaatgttgacaaggctccgtcgcagactctacgccttctcgatcgctcgagaacggttgctggatctcgacaaggaatacggaatgaagagatggtgtacccgccgagataaaatttcttgacttcaatccaaattttcgattacagcaagatgggagacttagtcgtctgctctatacttccttggttgacatcagagattgactcagacaaaccctttcggtgcccgcacgaggctgataaaggaagtctaacgttatctctaaactcaccgagaacggtcacgtgagctcgataatagttactccatggtcagtggtcgagaataggaatccgttcatgtgcattgaagtcgggggctactgtcagggttatggataccacatacctaatagtagttgactaaatctcgacagggctcaccacataccatgtcctatacggaagcaaccttcggatataggaggagttccaataaggaaaggcaaccagagttctacacggaaacgacaaggactattcggattgtatccatattggtttcccaagttctacttgaacaaggggacacctatgggtataaatacaagaccccctaggaggagggggatgactgaccaggagacgatcaacacgatcaacatggtcaccacgatcgagatccacctcaatcaacaaccaccacaatattcggaacaactgaagccacagcatacaagccaacatacgccaagacacgccgccggatatcgacttcagggataggcatggctattcccctacggtgtctccggataccgtcaggagagatgaaagcgctatctttgatctcgccggacacggattcgaggagcaaggctaccctgttgtcgattacgagtcagaccttcagaccgccatgtcgacaacagttagataggctattccacatattgtactggtgcgattatggtgaataaaagcaactccggctccggccaacaggatgtagggttattacctgaccgctcaggggcccgaacctgtataaaaatcctcgtctccgtctcttttacctcagtctcgcgtatatcctagcaccgacgatccccatactgtccaaataccgtagtcgagacatcaaacgtcgacagcaagtattccaattgtctttccatctttgaggtaatcgatacagcactcgacaacctcttctgtactgtaaccctcaaccattgatccctccggatgggcatgatttcagacgtagcccttcaaaaccgccatgtaacgctcgtatg

SEQ ID NO: 23242 - DNA, 4090 bp, Oryza sativa
taatgaccttctgtgagattgcattaaaaaagcagcacaaccttgtgatagcaaccttcaaatgttctggttttatggcacttattgcaatggcaagaaacacggtgagcaagacatgacagtctgttaacagtgaaatttggtaaacctcgaggatgtcatcggcctaaaatcagtatcggcttcagagtcctggaatcagtcgatgggagttatcaagtcgccatagtcggattcttactatattcggttaaggaaattaatctattaaagaaagcttatccaagagtaaccgagttcaatgaggatgcagcatggcagttatctattaattaggaatagtctgttagtttcctttttatctttaggaaagtgtgtttagtgtccgattaggactttatgttttccttttatctttaggagagtttctttcttgtcctacaaggactagtatctacccatgggtataaatatgtaaacccggggtcattgtaatttatctctcgatcaataatactctcggcgcatcgccaccctctttcctgaggtttttacttgaaatttggcacctgacacggggctgcatcggttcagttcgatctccggcgaaggggtaagtcctacgttccgccggccctggtgaatctatcggctgcttcgatctcttggatcgctctggtttggttgatatatttgcctacctgatatctcaattccatctctaattgcattgtgtttagagacgcatcggtttagttgggactgtctcggttaggtctgatcttctatcttagctgatatatctctacaatcataatgttgttctaaatagatttgttatatctatcacattagacagatctatcggctcatctagtattagattatcatatacaatctcgtgctgcatcggttaggttcgacctactagattgttgttgataacataagtcttgtttagccgataggttcatgctagtgttttatcggggtgctagccgataagttatctggatgttgcatcagcttataaggatagcatatgatatatatatatatatatatgtatatatatatatatatatatataaaagttggatttagccgatgacaacaaaagtttcattgatttatctaatcttgtagattttatgacatcggacctccagcgtattatttacccttcgaatcagattggtttctactggattatattgctatattattattgtttatcatcatcagccgatcgcctttatatcattatctacattggacatatagccgattgctaaaaaccctatcgacatcgactgaaatcggcatcggctaatttcggctatcggctggaattactccatcggcttgtcagccaatcggctttttttatctgttttttacatatcttgtcagttgcaggatcaaactgactggcacgctcgcatgtcatcaacctttggacatgcactggagctaagcagatctcccaggccagtatatgtttttcgcatcagcacagtcgtgtgaattataactagataacgtcaaatctttcatggagactagtcgactgatgtttgatgagaaacctatgggcactttcacatcacgaagtgataagcaaaatgatttcttctcctcaggtgtcggtgtgaaacaggctggtgaaatatatattttgccgttcttctctctttcttgagggtgtaactcttcactaattcccatctcgactaggtcaagtcgtgattgcagaccatccttagtcttctatggtatgtccaacaatgtttcaattacgttgtcaaacacattcttttctagatgcatgacatctatggcatgccgaacctctagatctttccagtacgggaggtacttaaagaaaattgaatgtttcttgaatgggggagggagttgatcacctggcttctttctatcttctggtttcttggtcttgtcaggtttcttgcgctttgtaccctttgaaggtttcttagtcccttttccaaattcgcaaactattttctctgtcatttcacatactttctccccggatgtatatttttgtggaggatcactctcttcaatgccatcgaattctgacttcatcttgcggtacttgtgatctgtgcgtaggaaccgccggtgctgcatgtacacaaactcgttggaacccggaaggtacctatagtacgttccattcaagcagatcacacatcctgttttacctttaatttgccctgaaactgaaaacatggcggggtaatcgttaatgatcacgaagatgatggccttcactgtgaagtattctctcaagtactcgtcccacactttcaacccctctttccataaatccgctgtatcttccaacaatggttcaagaaatacgttaatatcaataccagactgtcagggtccctgtatcaagatacagagtaatacgtattttcacttttgacaaagccaggtagtaagattatacatggtgaaaagcactggccaagtactatgtgagctactcatgtctccaaaaggattaagtccatcagtactaaggacaaacctaatattccgtgggtctttagcaaactcttcgtacttagcatcaaagtttatccactgatgagcatctgtcgggtgttggagcatcccatctttcttgcgcccttcttgatgccagcgcattagatctgcatctcgtagatttgagcatatccgtttaatgcggtctttgactggaaagtaccacatcacacgctgcgggatttttctcttagttcccttgaatatgttagacgcttctaggaaagtatttctatttgatttgtaccggctagcaccgcaagttggacattcatccaaagaagcgtactcttttctgtacagtatgcagtgattaacgcacgcatgaatcttttctacaccaagtgaaaggggacatatgagtttcttcgcttgatatgtgttgtatggtaatgagttaggcctcggaagcatgttcttcgaaagttcaagtagactgtcgaaactactatcagacaatccatatctcacctttaacctcataagttcaagaactggccgtagtgttgagaactcactgtcacagccctttgactcttcgtacaaaacttccttcgctgctttctgtaaagtttcaaagttatttaaacctctagccgacccaatcagcacctcaggttctgcatgacgtaacatttcctctagatcaattttgtcttcaccacaaccaacgccgtacaccatgtcttcaacttctgtcggaacttctttttcaggcccggccacttcttgttcgccatgacgtgtccatatttcgtatttttccatatatccacgagttactaagtgttcctttactttaccaacatcttcccaggccctttcattcttacaatcagcacatagacaaattatcttcgtcatattgttctgttcagcgtgtgccttcacaatactaataaatttacatttcttccctatataaagccaaatacctcggcgaatgatacatccattgccgcctgtccatatctctacaaaaaatgaccaacaaatatttacgctattcataccaaatttctagggttcactaaaaatgacatagcactattcataagaacaaagattatttaatttcatactaaattaatatcatagaaaaatctaacaaaatcatatcatcataacacaaataatttttttaatcgaccaaattaacatacataaaaaattttcttctctatgtgtctagatctagacctaggagatggagcttttccttcacaattttgcatgcatagatccatcacaaattaaggtctaaaagcataaaaaaaattacatatctagagtggaaatgagtagatctaaccatcgtagaaaaatccccctgagatttgaagttaacagcctacacaaacatatcaaaataaagtaaataaaaaaacatggagcttttccttcacaattatgcatgcatagatccatcacaaattgaggtttaaaagcttaaaaaatgtatacatagagtggaaatgagtagatctaaccaccgtagaagaat

SEQ ID NO: 23243 - DNA, 8769 bp, Oryza sativa
tcctcggctctagttttcaccggcgaggtatttgctcaaaagcgtatgtccggttgcaaaaattttttgccgacgtctgcgaaaatgctttttccagtagtgcgtaggtcgcatgggacatgcaaacaagcaaaacaatctcagattagccttaaaaaaactaattttgtagatgcaatgggcatgcatgtatcgatcaactatgcactctgtttgccagatgtgcatgcatgccgatcaatctcgtgcatcgacgccagatccatcgacgcatatgcgtgattgaagcagctccgacgacggtcaagcggatgcgtggcaaggtgcggcatcaaccggggccgcgcggggaagcaagcatgaatcatgatgcgggaggttgcacgggacgagaagggcggtcggcgagctgcgtcgcccaccgcgccttcctgcatgccccgacatgaacagcctggggtcgcgccagctcgtgacgcgtccacgacttgcgcgatcgccaccccggccaggatagcacgtcgcaggcgtgcactgcatcgtcctgcgctgcttatgccatcaacgcgatctcgtcgacggtatcaatcggtgattgaagccatctcctcctgatgattgatctagcgcccctctacctggcgtatcaacagtcgattctctggatccgcaatataatttatagggtgcacgaaattaaggagatatggttacacagagtttatactgattcaggctctcaggggtaatgccctagtccagtcgaaattgctaattggcgccccccgcgcgcgactgggcacgtggcgcgatgggggagggggagggctgagcggcgcgatggggaagggccacatggcaccggttcgttttttcggttctctgttggttttttttcggttttcctgttggttttttttggttttcctgttcattttttcggtgtttttatatgtttgtacgacgtatacaaagtttgtatatgtcgtatacaaactttgtatacatgtttttttctttctcggtttttttgtttttaatatgcacgtatacaaagcttgtatacgtatgtatacaaagtttgtatacatgtatatattttttataaaatatatacatatagaaaattatatttatatacatatatataaactttgtatgtacgtatacaaagttacatgtatgtatatacatatgtatataggaatagtagtatatatcatagtagtagagtatatagtagtagtatagagactagggggagtggggctggtcgcgcgccaacgcccctaagtccagttgtatgagattagatttgtatctaagtatccgcagcataacgtgtgaatagcacgtagaacgtatcgtcctcttccttgaattagggttttcggtcctccttatatatacttggaggcggccaattatggtaggtaacaaatcacttataatataggaacctaccatctatttacatgagataagatcggttgccttatctagccacacatgcactgcataaactcagacctacgcggccctctctatgttatgcggcccaatggcccaaccgtgggtacccgggtaccgtgaccccacaatagcatccctcctcatcgctgtgaaaagggcggacgtggttggggaatgaggaggcatgtcgtcgtcccttctcgctgccttggggaggccggacctggcaccccggaggtcgaaataactagatcagggtgggcgatgctaaggaggtggggggtagatcacagtgctcacatgggggaggaggtggcggtgcactactacaggattgattttcctggacgccaccccattttgtttccatgtagtccataagttggactgcacggaaaaatggggggagcgaagccgggtcgttgcccgcacacgaaaatcaattttcatgtgcgggttacttaacaggcccgcacgcaaaaataaccctattttcgcgtgcgggcctcctaatctacccgcacagaaaaatagccttccctcccatcctattaaaaaaaattttgactttcttctctccccctgggcccccttctctcctctctctctcccccttatcttctcactttcctctcctcctctcattttcctctctctctctctctctctctctcaccttcttcttctcaccacatggccgacgcctccttcttctcctcccggcggctctcaacggcgggcccgacggcggctggcgggagcggcgggctcgcggcggcggtgggtgggagcggcatgcgcgtggcagcgggctcacgatgggcagacgtggggaggcggcggtaggcggacaggggccactgccgacgacgacgcggcggccgggagcgtcgtgcacacggcggcggcgggcggacgtgggccactgccgacgacgaagatgaagcagcgagctcggcggcggcggacagacgtggggaggtggcggtgggcggacgggggccgctgccgacaacgacgacgaggtggcggccgggagcagcgccgccgccgccgttcgacctagggttagggttaggattttgtaattttattttttttttggattttgattttcgtgattttcccagacgaatcattccagacgggcgaaacaaccgcacgcaaaaatttgctattgtagtagtggtggtggctatcgagaatggggggcgcgtaggcggcacttgggtagggtagcagagccgactgcggtgctcactattgacatggagaagagggacggtcgatcttaatctgaagggagggcgcttagcaagagtgtttcagtaaacaaattgaggagctgggtattcttgctttgctaggctccgaacttataacggttagagatactaacctctgttagagattagaatcaggcattgttacaggacactgcttgtgtgtgttttatctctaggataagtccaaactcacttttggggggaaaacactccataaacgtggtaatttgccagtggacaccgcgctgattaaaataataatttccggttgaagaggagagagaaatcgcgtaaaatatcaaaaatacccttgggcccacatgtcagctctcctatctcacttctctctctatcccctccttccagctcgtccgcaatggcctcgaagcacctcccgcttccacgacgccatgcggaccatccacgccgtcgtggcgatggctggcgatgaaggggcggcgcggcgaggcgaggttggtgctcgaccggacgtcggacaccgccggccgagggcgagcagtggctgcaggacattgaggacgtcgtcaccgccagctccgtcggtggcaacagcggcggcgcgcgccggcatatggaaacaaacgatccaacacatcaccggccgtcacgtctctctttaaagcatgcacacacacatatggatggatcagcagctagctgcacaagcaatagcaatacatcgccagcgagaacacgagctatctgcatcaatgcggcggcgcacttcgtgttcgtcccgctcatggcgcagggccacctcataccggcgttggacaccacactgctgcgggccacccacggcgcgctctgcaccatcgtcaccacgccagccacggcggcgagggcgggccccaccgtcgactcggcccggcggtccgcctcgccgagttcccgctcgactacgccacctcctcctccacgctcgcccgacgtgcctcgtggcggacttctgccacccgtgggcgtcggagctcgccgccggcctcaccgtcccgcggctcaccttctttagcatgtccgccttttgcctcctctgccagcacaacgtcgagaggttcggcgcctacgacagcgtcgccgacgacaacgcgccggtggtcgtgcctggcctggcgaggacgatcgaggtcacgcgggcgcaggccccgggcttcttccgcgtcgccaggtgggacaagttcgccgacgacgtggagcgcaggtgatgggcggtgatggcgcggcgcggccgtgcttgagcgctggccggctcggcgcggtgtggagcatggcggcaaggtggaacggagggaggcggcatgggaggaaggaggtcctccagcggccaccggtgccgagtagaccgcgcgcgctccgggcatcgccgctgtcaccgagcaagccgcgaccgagaggaagaagaagaagggagaaagaaacaaagagaggagagctgacatgtgggcccaagggtatttttgacatttcacgtaatttctctcacctctttaaccgaaaattattattttaatcagcgcagtgtccactggcaaattaccacgtttatggagtgttttcccccaaaagtgagtttaggcagtatcctaagattaaaaccacacattagcagtgtcttgtagcaaaatttgccttagaataaaatctataataggtttagaatattgaaccattacacagataggttgtcgtcagtaaccagtgtttgatcctacctctatctataacagtctatataattaagtgttacaggttatgtccttgcaaactgtcttagctaagcggttacagatggccgcggttactgctggttacacgttccgtagtagtgtgtggagcccaccagcaaagatccggccttcctccctaaggatggaaactaattcttctgaacgcgtaaaagactcattagtatataattaattaagtattagtatattttttaaaaaaaatagattaatatgatttttgaaagtaacttacaaaacttttaaaaaaaatgtaccatgcgatgcaccatgcaccatgcaccaccatggacggaaacgcaaatttgtccgtccatgcaatgcaccggaccggggagagtcatcgtcgatcgtcgtaccctcaccccctctctttttctcctttttcgagaggaaagggtaccatattgttccttcgttgggaaggcaggcatggcatgtgtgtgccgtggtagaaaaaggcggatgcgtcgcctccataaataaagccaagaaacaacgcatatatagtataattcaattatccgtccacgaatcttggattccagcgctgcctcctgcactgcactgcaagtagactagagcagatgccgtacgtcagtgcttgatagcctaagaaaaacggtggtaattggcgtgcttaatttttaattttggtttcccgtacgtgtgagtgtgtgtacatgcacctgcgaatcgacgaggaagcagcagcaggggcagagcaggaggaaatggaggaggaggacgtgaagggcggcatcgcgaggagcgccatggcggcgtcgtacaacgaccagatccggccgctgctggacgccgtggaccggctgcggcagctgaacgtgagccaggagggcatacagctcccgaccatcgtggtggtcggggaccagtcgagcggcaagtccagcgtgctggagtcgctggccggcatcagcctcccgcgcgggcagggcatctgcacccgcgtgcccctggtgatgcggctgcaggacgccggcgacgacgacgagcctgcgctgcggctcgagtacagcggcggccgcgtggtggctacctccgaggccgaggtcgccgacgccatcaacgccgccaccgccgagatcgccgggtgcggcaagggcatctccaacgcgcccatcaccctggtggtgcgcaagaagggcgtgcccgacctcaccctcgtcgacctgccgggcatcacccgcgtgcccgtgaaggggcagccggaagacatctacgaccagatcgctggcatcatcaaggcgtacatcgcgcccagggagagcatcatcctcaacgtgctctccgccaccgtcgacttcccgacgtgcgagtccatccgcatgtcgcagcaggtggaccgcaccggcaaccgcacgctggccgtcgtcaccaagtccgacaaggcccccgagggcctgctcgagaaggtcaccgtggacgacgtgcgcatcggcctgggctacgtctgcgtccggaaccgcatcggcgacgagacttacaaggaggcccgggaggcggaggcgcggctgttcgcggagcaccctctgctctccaggatcgacaagtccatggtgggcgtcccgacgctggcgcggaggctgacgcagatccaggcgagaatcatcgcccggtccctccccgacatcgtcaagcagatcaacgacaagctcagccgcagcagcgacgagctcggccagatgccgccggagctctgcaccgtggcagacgcggtgagggaattcttccacatcgtcaatcagatgcgcgcgtcgctggagaaggtgctcgtcaggggagagttcgacgagtaccccaacgaccgccaccaccacggcacggcgcgcctcgccaagatgctcgagggcttcgcgcgcaggctgccggcggcggccgcgaccgacggcgagccgttcctggtggaggagatgcgggtgctcaaggagaccaagggcatcaacctccccaacttcatgccgaggtcggcgctccacgttctgctcaaccggaaggtgaagagcatcgcgcaagtcccgcacgatctcgtcaggcaggtgtgggactacgtggaggacctggtgctcaaggagctgcagcgccactcgcgcagctacccgcaggtgcagccgtcgtgccgccccgccgtgcagagcctcatggacaaggcgcgagagcggtcggcgcggtacgtgaacgagctcatcgacatggagatggtggccaactacacggcgaaccccgagtacatcaagacctggaccagcatgatggatggccagagcaggctccgcgaggccctggaggaccgctccaagccagtggcgaaggtatatagtgtttggggggtgcacatgaaccccctaaattcctaatttctcacttaaaaacactagaatgtatagcgttgtactgaaattttctagattctcaatggtagtgcaccccccttgttttgatgctagcttcgctccttctccaagcccacggcggtcgccctcccggggttcggagagaccgacgtgtcgcacctccaccagctgccgccggagcaggtggagctcgccatgcaggccttcgacctcaaggcgcgactcgccgcgtactggaacagcgtcgtgctccgcgtcatcgacggcttggccctgcacgtcctctacagcatcaagcgcctcgctgagaaggatctcgaggatgagctcgctgctcaggtcatgggcaataacatggacggagtggagcggatgctggtgcccacacccgccgccgccgccaagcgtgactgtctcaagaaaagcatcaaactgctccgggaatccagggaagtcgtcgccaatatcatggacagattaacgcggcaagcaccgaccatgtctgataactactactccacctagtactccacttcgcgtgtagctgccacgcataataatactctccatgagacattccctccctcgttggttacatgttattcaaatagctataaaaaaaatttaaaaggatatcagcgtagccactagctacctagctttccttccatccatcaccactcgcgcgtcttgcgtgtaattttcagattgttatcagtgtcctagatatgggatatcctatacatgtgtacttagctcggcggggaccaccatataccaaatcctgtacggaatcaaacctcatacgtatggcaaaactcttaagtagataagagaggagtctcaaataaagagaaacatagtcctatttgggcctaaccagaactactcgaatcgtacacatatttgtcttcctagttctacttagataaggggacacttgagggtataaatacaggaccccaaggaagggagggataagccaacacatcccaacaagccaagagagatacaaaccaatacaagccaccatcaatctcgtagagtcactactcgaggaagccaactacagctagccgccgaccaccatgctcgagctttacgccaatatactggcagcctagattaggctttcctctatatactttgtactcgagagattgatatataaaggcaacaccggcttcgtccaatagtagtagggctattacccatcatccaggggcccaaacctgtaaaaatctcgggtctcccattttcctattcctatcttgtgtataccctggtaccaacattccctatactctacaagcatagttgttgaatctactccattgacagtatgcagtattcctagacatggtaagtacatgtatatgaggtataccttatctatgacactaacagtaaccctcgacctctacgcaaatgctcattcaatgctgacaactctagcacacccgagaagctatgatgtcgaaaaaataaacttactcattcattgccctctttgtcttccatcatcttcaaactcccagagcccaagaacgaaccctaacctccacaacaatcttgctttctcataatccacccatggatcttgagaaatccaccatgaataaagcattactcaaggcactccaggtggaggaattaatccttggccaggaaacaattgtcacacccagatattcataaccagaattcagaactaaattgtgcattaaacccctatccaagactagctatgttacacaaatgatagtgtattatagatctaatgtcttacaaaacatcatcagatgtttatacaaatgcagcacaaacttgaaaagataaactaaacgataacatcaagcagatcaacga

SEQ ID NO: 23244 - DNA, 1325 bp, Oryza sativa
gccaaatgccttgtcactaaccccattttttgccttccattgcaacaactctagagtggtatccaactttttgtgcccctgctcgcaacctgggtacaacgaagttctgtggtcctccaacatcttgtccaatttatgggcctccttttcactttcgcagtcctccctggcgtcctgcaacatctgaccaagatcatccgcaacgtcgttaccatcagcagctatttcctcctcgcccgtttgatttccttcaaatccaacatactgagcaaagtccggaatattgtcgtcttccacttcatcttcttccatttcaacaccttgctctccgtgggatgtccaacaattatagcttggcatgaaccccgactcaaacaagtggaaatgaatagtcctggatgcagaatactccttctgattcttacacttattgcatggacaacaaataaaacccctttgcctgttagcttcggccactctcaaaaaatagtgcacgccgtcaataaactctttggaccgccggttagcgtacatccattgccgatccatctacatgagtcaaaaaaaaccgtacacaaataattattcttacaataatgacagtcatacaataattataagatatctttattcatacaaaaatcataaaatattacaccaaataattcttaaaaactatttgtaaagttttaaactaattttaatgtgttttacttcttttaattttcattttagtttcttttctattatttaagattaactttcactagagttttccttctcaactattttataaaaccttgtttagcaaatgaactaaatttctatatattctttcttccccacacacattttctctctcatcaacttacaactaaattttggagacaaaaaaagtgtgcaaaacataggtgcaaatgtagtatgacaaaaaaaaaacattggaggatgaagttgcaaaccttttaggcacctccgatttgtatgtaatcaccaaaataaattcaatagaaattttggcatgacctcccctcttttttgaagaaattttgaagcttgctcgggcagctggaggaggaagaagacatatatataggggtgggactttagtcccggttggtagcaccaaccggggctaaagatcaccgggatctttagtcccggttggtgctaccaaccgggactaaagtcccacccctatatatatgtcttcttcctcctccagctgcccgagcaggcttcaaaatttcttcaaaaaagaggggaggtcgtgccaaaatttctattgaatttattttggggattacgtacaatcggaggggcct

SEQ ID NO: 23245 - DNA, 705 bp, Oryza sativa
tcctgcacccctccgtttcacaatgtaagtcattctagtatttcccacatgcatattgatactaatgaatctagatagatacatatgtctagattcattggcatcaatatgaatgtgagaaatgctagaatgacttacattatgaaacggagggagtactaaaaactataagaagtaataactagtaatctctgaaagttaaacttaaagatatctacttcatgccaagaatgacaagcaaaatgtttaccactgctttacactgcaggaagagccagtcatgggggcagttatcaagtagatatacaaaatcttttggctctgccactgccacaatgttttggagttgtcaggatggaggtaaattacacgtgcacagaaaaaaaaatggcaatgagaaacaaggtcacatcttaagaggtgaacttacatgttccaagcccaccccaacctttgttgatgatacctctctgtccagttatttcaagtgctttgacaatgacttcagtcatctttgctggatcttgaactggctagtatatatacgaacaaatgaaaggagtgaattttcaaaacacaacaatcatagtatcctaaaattcattaagaaaaaaactgaaccatggaatcactatttgcaagcagctactatatgcatgccacacagatcaacaccaccaaggcaccaacaactcattatcataa

SEQ ID NO: 23246 - DNA, 3889 bp, Oryza sativa
tcatgtaaaattgatgttactagatttattattaaacaaactatcataatatgtaactctttttatttaaaacatcttacttttatagatattgctggtcagagtagcatctcggaaaccgtgtcaaagttcaaaaattcttatattttgggacggagggagtagcaaactttcatgctcattaccaattagaaaaatgtggtatcaaactgaaaggctaccaatttcagttggcattactaatattgacttggttcacagtgttatcacagcaaatactcaagcaagctcttttcaatacaacaactgaatgctataagaaagtcaaatgaaaagaaaccatacgaccaaatgaaggcccacaagttttaaaaactatacaatcgacggatgacaaggttaagcatgacgtgaaaagggataacatataaatctcagataaagctaatactcatcaggaacctttcggttttggaacaaggtgaggactccagatgtaaccatgaggaatgtcattcccagaaccctgtgcaccacttaggtatgttaccggacgcaacttcagcttcttcttcctaaattcatttatcatatctcggataccaagccaaatcatagagtcaacaatttgataagaaagctgcaagtgtaaaccatttgaagattagataacaaatcagatcagaagaaaatgagtgatttgagtatgaatctttcaacaagtgcttgatgtgagttagggagatgatctctaactttgacatgtggtgcatggttgtttttagggaatgcagcaaaattgcaacctatttaattacaagaattactataaattggatcaaggtcccttgcaacctaaagagcactcccaagaacaccagccacactgaatgaagccagaaactaactctctgcatacagtaactcacttgagtttaccacccaaatcagtctaacaacaaacgagcacaagcaggcaggccaaaattgtcagagttgggaccctatcccagagatgcacaacaatgcaaacaaagtaagcacaacaaaacctattgtctgattgccatttacaaaataacagttcaagccatttcaaatatctctactattataaaaattgaagatgtttccgccggaattttggtacgtcgcccgtatccaattcgatgtgagcctaaaataactattgtaactattattcaaaaaatttgtacaaatataaaaaataaaatgttgtgcttaaagtactttgggtaataaagtaagtcaaaaaaaataattctaaaatttttttgaataagacgagtggtcaaacagggcaaacaaaaactcaaaatcccttgtattatgggatggagggagtagtttgtaacttttggtcccattggtgtttttgattgctcagttgatggttttcttcatattgaggcccagagcacattctatcgtgttgctactgatattgcgttcactgggacctgttagttcttaaattcatcacttccagatttttcctccaatgaaatcttgtttccatttttccctttggcatgctatctttgaaaaatcatgttgatacagaactgaagtaccggttaactgaagaaatttttgttagacaactgattttgatattttttgagtctctacaagtcttgatccatgttgtaggagcctatttctaatcccatgtcattcttattcttgcagatgagtcttggttttcattcctgcaacgcagtgactgggaaatactattaatggatgctatccttgatgttcctactgacgatgggaaacaccaaacaattagggtaacaattccagacaacacgacaccatcaccacaaattgattgcaaggcatgcaagtcccaaccaacgccgacgccacctccgcctccatctccgtcacctccacagaagtgaatccatctggagaatacttttggtccggaaacagctaccatggattagttttttctttaccctattgctcatcaaccctgaaaagaaataagtgctgcagttggaacgggagaacagcagattttttgctttggtgttcgcaacgatacaacatagaataggttacctgattgtttcccacgcagcaatactttgaaaggtaggtccatcagtcactaaactagatttgctttaggacttgctagcggggcatcatatattttaactgaagttttgatactccatgagatctcgtagattcttgctggttgcacaagcctgctgattggcatttggcaatacatacatatagtacgtagcagtttgattagggatgtgggattttaagttcaacaaatgatggcttctgtgtagtcaatcattaaattgtctcggccgagctatccgccatgtcattatctttctattgttagtgatcaagaggcctgcttatgagatttatccccttctattatacctcactttatagttatcaaaatatggctatttctagctgtagctatattttatgaaggatggaggtaatagattcttaactgattgccctttgttagatttggtcctgttttctaccatgcatataaccaacttttggttatgaatatggacaaatatgtgttcagatttatagcttaacacttgctatattttgagagcatgcagtatttctttttcatttgacaagtaaattgacaaactactcgcccaactacccaagctacgccatttgccgatctgcaccgtatgccgttggcgacctgctcgtcttgtcccttgctcgtcgcgttgcctctacttattctcgaataaaaccgtacataagtaatagggatttgatatagggaaaattggcatatctcattaatatgaaagtagtattggtgggttggttggtaggtaaggggtattgaagggataaaactcttccatttgtgaaccaatagtaggtaagagtatagaaatcagctttttttttggcatttgacggggaacttgtagttacattttggaaaagttcctgacttgtaattagcgcgcagttcgtctttggcaacctttagaactcccgctacctctaacatgttagagcatgtcctagctcatccaaacctgatctaccatattaccatttgaatggtcataaaaaaatccatctctatatctcttttcactccaacaaatcattcatattacatcttcaataaaccacacctttttatattttattaatatctttcaactcctaactggtaaaagtatatttctcttcatcttttctctatgacaggttcatcccgggtgctcgatccagagaagaggaagaggggaagggtggactaggacaaccgagtagaggggcgacagtgggagctagcgacgcagatgggcacgggtggtgcagggccatcggagttgggtcagcggctcagcacgagaggtgcactggtcacagactgtgggccgctagagcctcctaggggagggcgtgagcggcgcaggtgatagcgcgggtcgcacagggccgccgaagttgtcgcaattggaggtgctgcaggcgtaggggcaggggtagttgatccgaatgggggcgggagcttgatctggaggagtcggttgcaatatggcgtgaggagagagaaacgccaaatataaatttggtgtttctctctgtgggatagcgtatgcaccatttttggaggcctggatagcatatatgctagagtcgcttttttccctccatatgccattttttcaatggagaacatgatagatgagctgctaggcatgctcttagcaagcgtccgtgtggtggattatgtttcacttgtagtgaaaagaaaatcttgaccgtggaaaatacataacatgattatctgatgtcaacttagtggaacgct

SEQ ID NO: 23247 - DNA, 854 bp, Oryza sativa
ttcctgcagccctaaaaaatatgtgggacccatttatcattcaccaaaagtatgggtgggtcccactgacacgtggggctcatataaatcatatcctcccctctctttctctccgcgagtgtgggacgggggccaatggcgacggagacccaggagcggcactggagcggtgacggaggcgtgcgggtgagggccggagcggcggcggcggcggcggagatcgagaccgccgtggaaggttggccgtcggaaggaagaaaacgagccacgagaacggccgtgtcctcgccatcctcggccccgccaccgcactatccatcgctgcgctccacgccctctctgccggccacgacgcaccggcctccgccgttctcccgccgcgcccacgaacgcgtaagggtcgcctgcgtctcgccaccgcgactcgcgtcggcatcccctcgaagatggcggcatccggcggtggcttcttctgcacctgcggcggcaaccactactacaaaaatcgtttttctgtacgagggggtcggtaggttctatgcgggccgcttgtggcggcgcctgcaaaaaccgccccccgggggcgggttgattagccgcatgcgaacatgcggccgtcttaagtggccgcatatattagggcatgcggctccttaagacggccgcatgcgaaaataggcccattatcgcatgcggctgatcttcgcatgcggctgtcctaagcagccgcatgcgataatggatcttcgcatgcggctggcttaagggaccgcatgcgatgatcggccatatatgctcctccaggcccgagcttgaccatttgaaaacgaagctttctctctcctaaagcaagc

SEQ ID NO: 23248 - DNA, 857 bp, Oryza sativa
ccacataccaccacggtatacagacggaagacgtgacatagtttccaacccatcctagccatagacaagagtaccgacccaatcccacctacggccggaacccccggacaggcaggcaggactgagcccctagcagcaggacaccggccctgtgccatgacatctcgactaccgggccacagctcgtgtagccttcatttgtcctagagatgtccatcgacccccgacttcttccatctccatccgtgtacttttgtttataaccagactgagccacaaactaagccttacccactagacatgtggaagtacggtagtgctttgcaacagaggcccgaagaccggtccttatatggccgaggtgctactatcaaaaccatgcaccccgagcccagcctaaaaccattttggggattttgaatagaaggagcggtgtgaagccaattccacaataaccaaaccatttgtcacaccctgaaaattcaaaatatatatactttgcttaattctataattcctagatttttctgggatttatttgagctaagaaagtatttttaataaatggaattgcatttaagaaataatttaaattgaaaaaggttttaaaaagtctcttttggctttgggccgaaagtcggcccaaaatcccttctctctcctcagcccagtccggcccagtccgcagccgcccgcgcgagcgcgctgtcgctgacaggtggggcccacccgtcagtcgtcgtcttcctcgggccgaaaccctagtttcgcgccgccgagctgccgtcgccgccgctttccaaatccggccgttcctttccttctccggccgatttgttagaggggggtgcaggaat

SEQ ID NO: 23249 - DNA, 530 bp, Oryza sativa
tcatccagtacgccttgtccctggtgcagagtgtggatagacccaatggcgcacgagcttgggtagccgcggcactgtagggctcccacacgacgtcagtcggcagaaggcggtcgaactccataacaaactcaggatacgaccgcctaacctgaacgtgagcccatcggcgctgcaattcgagacgatcgatgtgatgtacaatgaacttagcaattaacttaacaatacgataagatcgatgcaatgtacctgacgacggcaccacagagtacccatcgtagggtagtcgacctctggtcgctcctcgtacagtgactcgtacgcgtgctggtccacctcagggcggccgatcacaatcctctcagctgcccagatagaaagaaagagagggccccaccaaaggtcgcgctgggatccgtcttcgtgcaagcctcacaaagtgcacggtacagagccgccaacaacgcggaaccccagctccactgaggcacctcgcctaccgtagcgtcggcgatgctcctggcgta

SEQ ID NO: 23250 - DNA, 5077 bp, Oryza sativa
aattcctgcagccctagaggcaaaggcagatgatgcttggtgttcggatcttggtacaagatcaaataatgaactagcattaattccgttggaaccctcaacatcatcgttttcaattgctggaggtcctgcattttcaaatggtttttcatctggatttggttccagtttttcccaagataatagctttagtcctttattaagggacgcagaagatggttatagtttctccaatggcacaaaggatgatatccatggactgagtggtttacataacttgggaaatacatgtttcatgaacagtgctatacaatccttggtgcatacacctccattggtggagtactttttacaggattacagtcgggagataaatacagaaaatccacttgggctacaggtaatgcatgttgtcctattatgtagattgcgaacttatgatcttattggtgatttctgagaacatctccattgagcagggtgaacttgcaacagcatttggagaattactgagaaaactttggtcagctggtcgaacttctatagctccacgtccattcaagacaaaactttctcgttttgctccacagttcagtggatacaatcaacatgattctcaggttgctccgaatgtttctcctaaacacttcttataaatgtctgttaaatggtgctgacactgagttttgcacctttgttctgttttgtaacttccattaattagtcgtacattataaacgtatttcttactttaagataacatgctgttgtgtcccagaactatgaagttaattttcatttcaacacaccggtgcactgttagtgttaaggcacatttcagttccgaagtacatatgcattaatttcttgtgagattttattacaaaaccctaggttttgggtaataaaactcccaggtctaattcttacatgtactaaaaacaataccgcatactattttattgtacaagtgttatgcataaatagtggtataagagtgtggccaaaaatttggggttcttcgaaacaaattataaaagctgggattttgcgttacaatcgttccaaacctgaggttttgtgaaatttgttttttaaccatagtgttggttgtttatttaaattgtgtcaaactatgattatatctatgtttctcaaacttttgttataagtcgttttgacttttttcctagtcaaacttttttaagttagaccaagtttatagaaaaatgtagacacattttcaacataaaacaaacatattatcaaaatatattaaatgttagttttaatgaaactaatttggtgttgtagatgttactaaatttttatataaacttggtcaaacttaaagaagtttgactagaaaaaaagtcaacgacttgtagcataaatcaacatgtcctgtcaaagagataaattgtctctgctttttggcttgttcgctgttctgataaatggtgcatcctttttggccacacattgacacaagttttcagctcttttcctgaatatgttttccatctttagaatctgttttaattgcgtccctgttatcttccttgctgtaatcttctcttttataaccgtcatcgtcttgtatacagtttgttgtcattttgtgaactgatgcatcctatttatcactacttatgcatccctgctttgcttgttttcagaacttgatgtatttctccatacatttttttttcattgtgtaatattacctgttgcaacctttaataaatgtgtctttcggaataagggattgtttattatgctttttgatatattagtgcctccctcatcttgtcgtttagttcttgtttggataagctatatttatttgacaaaatttggcaatttagattgttcacattttgttaaagaagattgatctgttacttattgcccctcttttatgcaggagttacttgcatttctattggatggtctgcatgaagatctcaaccgtgtgaaaaagaaaccatatattgaagcaaaggatgccgatggccgtcctgatgaagaacttgctgaggaatgctggaattaccataaagctcgaaatgattctataattgttgataaattccaggtaatgaaatctttgctacgtgtatatgtttaccatgtggagcaaatattgtttggatctggaattattttaaagatatttctgcatttttttgaataagggttccctatctctggttgttctttaggcatcttcgtattatggaaatgaacttggtaatgctgaaactatttgtaatcagacaacaggtttttattttcttttttaaagaaacaggttattttttgaggcagggatcaggtgaaatttcaacagtggttatatcacaaaaatttaaccgtttttgggatgagaacgggtactattttctgtagagccctcataagtagtggggatattcagtttttggttaattttgttggatgttttctattttttgacaaccggttttgaaatagtggtaaccagaatgattgctgcacaaaaaagagctcctgaaccgaataattcagtttggttcagttagaaaacagtatctgtttctcctcggaacatgccaatgctgacctgtgccgcttgacgttgctcctttgctggcctgctgtgccactgccgctctgtgactgcctgccatgccttgcgctgctctgtcgttgaattgatttggtgaaactgtggaaccgagggaggaaagagatgtaatagaaaatctagtcgggaatgtagggttgtggtttggtaggggcgtgagatgtgcttgagccgttggcatgatgattggttgctggttggcatattttgtaccttaacatggcataatgatctaaagccatttaccgaacaaagagaattaaaatcaaactggaaatgaaaatacaaaaatcctgaatgtggcatggctcattttggtattaggtttatgtatgctcacaactattcaccactcatcagtataccttttccattgcttgctgcttttgcaatgattatcttcttgagactaggcctgaaagattaggccaggtctgtctgcaagcagatgtagcgtaccaagatttacctcacaaactgctcagccttttacttgctgctgagtgcaagatactagctagttctggtgcttggtattattagttagcactgtagaatttgttggatatttctgatcggttagtatatatgttgggacaagtgggtcgacctgtgaacccacttatgtggttggcaccgttgtatcaagctatgtcttgagttgaatctggcttgaaccaattgttggttattacttggtcgatttatgaagcagtgatgggtattttcaatagaagaaaatactaaagaacaatgttatagcgttgattaatgattgctctctgatggtgaaacatgattgatgtttcttgaagctattttaggaagtgggagagatagtatagttattttgctttcattctgtaatatttcctccatacaaaaatagaaggcatatgttatttttggattaggctttaaccaacaattattatgttagaatataatttttgtgatgcaaaatcaatgttaatagattcacattcaaaggaactttcttatgatatgcttttgagtcacataaatgatatgtatgttagtaataaagaaattgttggtcaaagtcttgacgttaataacagtgaatacaccttatatttttataaggagggagtatatacatgttcaaatttcagtagcattttcccctttggcgtattttgtggtgtacgataattgttaattgtcacatctctgcagtaacatcaattcatttggttgatgtttcagggtcagtacaagtccactttggtttgcccagattgtaagaaaatctcagttacatttgacccattcatgtacttgtcactgccattgccctcaacagttactcgcatgattaatgtaactgtatttagtggtactggagatgcccttcccatgccttacactgtgaaggtacaaaagaatggagtttgtggagatcttataaaatctctgagtgttatgtgttgcttacaaagttgcgaaacactgttacttgcagaggtaaaaaatccagtttgttcttatgtagcaatggtgttatttgaagcataactctttttcagtaaatagctaataaacatcatattctttaggtatatgatcatcggatttaccgctattggaacccatcagaaccactttgtcatgtaaaagatgaagacaaacttgttgcttacaggctaccggttggctctgaaaatctcttgagggtagagatcctgcatcgggtggttgataggtgagtctgtaattatgttagcaaggaccacatatgtgtttccatgatgtccgttcatctattgttgctccttagaataggtgaaccctgcccttatttgaattttggttctagtgagaattttgtgcttatgattcgtgagaatagtttagtgtagctgacaaaaaaaatgctacagacattgagatttcttacctcagatacatgccatgtatttgatggtagtgattttcttttttctactattctattccttggaactggtttccatttttgtgcttacacattgatttgttttgttaatttatgcagatatacttcagagtccatgtttaatcttagtcggaagctaattggaagccctcttgtgacttgtattccaagtgactctacaagaaaagctgatatttatgcaactgtctcttcacttctggctccatttgtgcgggcaaaagtacatactctggatgaatctgcaaccaagttaaatagcaatggacctagcctggatggtattgtactgacagacaatggtgtcacctgtgaggaagatgtatctacatcaaatgtggatgaggaagcagctgatgaagaggttttgccatttcagctttggttgactgatgataaagctaataagagagagcatattgatgcagattctaacggtgttcctgggtcgaccatgaggttattaatggactggtctgatagagaacggg

SEQ ID NO: 23251 - DNA, 8089 bp, Oryza sativa
ctgagatattggtagttcacttaaaaaggttctcatacagccggtttatgaagaacaagcttgatacctttgtcaactttccaatccatgatcttgatatgagtagatatgcaaatcactcaagaggtgatcagccccccatttatgaactctatgcagtgatcaatcattacggcggaatgggtggtggtcactactctgcgtatgcaaaggtactttttgggctaagttttcctaggccttgcatatccttttaacttagtaggtgtttcctgttggttgctgaattccttttgctgtacattttgtatctgcagttagtagaagaggacagttggtatcattttgatgatagccacgtttcatctgttggcgaagaggacatcaggacatcctcagcttatctcctgttctatcggcgagttggtagcagctcctgcagtgtgtctaaaaatgttgcagtggacactgatatggttgattcgctggacacatagatttgaaggcgagaattcagtatggcatagttttctgggcaatacatatgctgctgagaagattgctaggactcttatttgctggttttgggcactgagtattggtttatggtaggtccatccaaccgtggaggttttgagggtgcagcatctcgttagcatcatcttccaatatgttacaaccattctcatgcagattagggcttccaatatctcctgtcttgcccttttagcgaatcgttgaaatgttgccggctatatgtttactaaaacttcctttgccgatatgctgatgtacagcagcaggtcttgttaatttacgtgatcttattgttgtggttggatgggtggtggaaaattggtactgcaactagctgcgtcagaaccagagaaaaagccaatgtactgcatttttgcttgctgagctacatctactcatgttcttattttactggaatcatatctgctacatactataggtcttgacgatatattgattttctaatacactattcgattcataaccaatatactatgctgtggccatgtatcgtgttgtgagcaaatcaatcccttgaattgcctacttggctatctaaaatgatcacatatattagaaatctgacttgttttaattggttaattaatgtctgcaattgtttccatttgtccaactttgatttgggataaccacgatcttatcctggtgacgtacgtttttttggctattgctattctccccctgtaatatccattgtttatgctgtatctatcagctatcaattgggattggctatcaaataccaatgctaaacggaacaagtcagaaactataattcttgttgcgtcggcaaatgtagtttggttttttttcgaaccaagcttcaacatgaattggatcattattcgctaactggtgaaatgcatattgcagcaaatgcagtttttttatataagaaacgaaaattaatttaaatcctacaagagccacttggacatactttgagccaagtatctgagattcaactatgtaggatcacacacaatgtcaatgtcaaattggatgaagggccatagtcaatagtgactgcgaagttcaacgacatacttgtcctctgtttaaaaatacagaattataagatgcagccaaatttgtcttgcatggtgtggttaattgtttagaaactatctggttctacttctacctctgtttgaagttatatgatactgttaactttttgcataacgtttgatcattagtcctagtcaaaatatatatataaatattactttttagttgacttgttttatcatcaaagaaaccacaatcttaactcatacctttacatattaatactaaatttttaatttttaaataagatggataatcaaacgttttgcaaaaagtcaacagtatcatacattttgggaggggagctagtaagacgtaatcttgtcctccttcattggaatatatttacaaccttttgaatgcgttatccgtgtgacatttactgaattatttataaattcttcggtttgcttctgaccaaaacaccattagctgtgagaatgggatagtttcattcctttctagagtttttgcagtcattttcattctcccatggaaatagtaaaatatgttattgatatcgtaagtacaatccaccgtttaaaatatatatcattggatctttccatgattgtcattctaaaagataatattgtttttcaacggttcctcaaggtctgctcatagccgcctagcctcatagcttgaattagataaagactattggcacttttatactaaagcaaaaataatggaagatgaattttatatcctggcatcaggagactttatattcgttccataaaaaactacaatttacaagacgggtagactaataaacaatagtagaatctgacaagaaaatagtctagtatgatcagatccgaacgaagaaaagaaattcagaatgtataaaatatattgagggtacatcttacacgtttgaatcttcctgttgccggatttaatatttagtacttgcaagcaactaataaaagttggctattagaaaaaaaaaagctgcaaactgcaattgccgattaatttgatatattaatactgttgttgcaccagcattgtcaagcaagctttgcctggccatgcattaatttgacaaacaccataaattgatttgagtgactagcttttggaaaagtgatgctgtcattcagaaagaaattaaatccaggttggagtttctctgcttctattgcaagtcaccgctcatgcaaaacagagtgcggcttcttgggattctccgggttaagcaaccgaaatgtgtttgatatgtgtctatactgctgtgcttcgaaaaagaaatatgttgtttctggaaaccggcaatacaagttccatcatctattcctattgcagtatcataaaactcgatttaataagtcaaagctgatttaaaaaataataattttaggtagaagtctttgcttgtctcctcagcaatcatgaaacatagttggcacacatggcatctaaattttagacagacattgacattcaaaatttcgatcatacatttagaaatttggatcataattttagagatagtggcccatgtgaaatcgaaaatttagaaataaaagacaattatttgactagttgtatatacgcttatcctatgcattctagagagggacaaagagagaaaaaaagtctcgctttttccacgcgcatatatacttcccgaatagctaattgatacttttcttttaaatttttttatacaaaagttactttaaaaaatcacattaatccatattttaagcttaaaataattaatactaaactaatcatgatatgctaatggctcatctcgttttgcatgtcttgttaattttctccaaccccctcctttcaaacactctataacatgtgttccgagaaggccaggccatcaatttgctaatatgatcacttaatgaaggacggcagacgcacacggttgtggcgagaagaggaacttcttggacgcctcagaagccacacaagactaagctgtccacgtcattgtcatgtaaagctcaggatctagctaggtgtttctgtgacctgttctgttgtgtggccacaaggccaaacatgccatcaattcatgcgtcacaattgaagatgtgtgattgatcatgggtgaaatggtacacggggcggcaacgagaggaaaggactgaagttgaccttgttggaattggccgccatgagacctgatgcaaattcgttagaccaagaggtaagatttgaatttgcacacatgagacttgatgcaatgggttccatgaaaatggaaagtgagcatgtgcgaagattcgatccaagtattcatcaacccgtagatcgatctgcatcggtagtattctttgtatccattttgcatatctgtgttggagtttattcaacttaatataatcttaagttcttagcctaaacatgatcacctcttactcatgcggaattcaatcgatctactaacctttgatgtgaagccattgaagccagtcgtcaattccctttcttactgttcttccttatctatttcttcttttccgtaaaaaactatgggttaggaactggaaatagttgtatccgtccttatgtcccatattataaaatatatgtcaattatattataatttcacctataaacatgataaaagattagttaatcactatttttatgagctcacatgtaatattatataatttgttccttgatgtatctcttttagcactttaattatcttcttaattagtattaaatatctatgagttagagatacaaataaatatccgttccctaatccgattcaaagaaaataatatgagagataggatacgagatgagtgacatgttatccgatactaccagtatccggttccgaatttaaaggaagagatgggttaggatatgagaatgttgtgatctgacactaccggtactcgggccgatttcacctctagccctggcctactacttgccatggggcagaaatatccattccaaatttttatctctccaatgaatatctgttggatattctagtaggttagattgttagtatattccttttccttgttaatttgagtatttcagaaatttcttattcatgcagatatttctagccccttttgtcagtctataattaacgtgaaggcctacataataaaaaaacgtttggtatagagatgactaaagatgatgtttaattacgttagcaaatacacttttctattaatttgcaacatctgatttatgacaatcggttatgctttcaaataaaaataaaaataaatacatgacatgtgggtcaggatagcatatctcaaactttgcaaaattataatggcatggttccaaattacccttcaaataaagccataggtgcctgcgcttcagctttattaattgagcttttccactgttattagagaggaactgcgagccatgcctcttaaaattaagttgtgcccatagacaagactgaattcttatgccttgtacagagccataacatttaaattattgtgttaagttcaatggtaaaattttgtttgttgagcacttcgatattgaaataaatatttttaagacagtgaataacatggactctgctttgacagattgaagttatagtcacttattataaagtttttggctcaatcatttgaccaattgtaaatgacagaatcaaaggatgacgagaagacacaagtttaaaacacatctacacaaaaagagagatacatcttatttgagtagctaacctatttagtaaatgttcatataaagttggcgcagatctgcatgagcattatactacagattcttatatgcaatgtgtatgacttctttgtacttatcacacctttatagtttgcctaaaaactatgtcaatatattaccctaaaaggtaaatctatattacttaaaatgttagtagtggtagtgtccattttcacacccaccctgtcactgacatgtgggtctcataatttatactattacgtacatcaccatttaatgagtcatctcctgttttataattgactcttcccaaatttcaaaaccacctatatgttcaataaggaaaatcataatatttcttgaactaagtgcttaataattgatttaataaggtagaaacactacttaaaaaaagcccatagagatcggcactataggtgccagaattaactaaaaccggcacctataatgccttttcctcctccgtgggttgaaaacatataaaaccgatgcctttaagcaattataggtgccggttttactttaaaaccggcacctattataggtgtcggttaattaaaaaccagcaccaataataaattataggtgtcgttttttttttaaaaaatggcacctatccaaaccgagccgagctgccgagccgatccaggccgatgcattggccttatcctataagtcaaccttatcatctctatctctctctcgcctctctcgtcttctttcgcgcacacggcggaggcagtagcagtggcggtcgtgccctcccctccgctggatccggctggaggggaggcggcgggcaatgggtggcggtggtgcccgaggaggtaggcggcggcgcaagaggggaggcggcgggcgacgggaggcggcgacgccctcccctccgccggatccggcaggaggggaggcaggaggtggcgggcgacgggttgcggcagcgccctccgctccctcagatctggccagccgtcgtcgccacttgccgctgccgtccgccaccctccagcgctaccgtccgctgccaccgcccaccgcccaccgctaccgtctgcttggagcgccatcgcctggatctgcgtcgccgctccctccgtcctccttcaccgccgccgctccctccagcgcccgctcgcccgccagccaacgccgacgccgttgggcccgttgccaagaggttctcctctcctctcccctcccctacaagctttgagaaaatatttgattgccccaagattttgagcattgtaatgtctgtgttgtgaaatggtggattcttataaattagcatttggtcatttaggatgaaatgctgatgcaatttaagaataattttgcaaatctagctcacgaattgtaggtagcagctgttgtaggataattgacctctctttgcattttttttttgattggcctctcttctgcatcgacacagtcctccaccgccgttgccctccgacgccgtcctcctcccactgtccaccctccctcctggtcaccaacaccgtcgtgttcttctgcgtcgactccggtcaccaacacaaggtgatcgatcttgcctgatgctgtaattatgtattataacatatgcttgcctggctgatcgatctttgtggtccagattaattggggagccgctctttgatcatttgatatgtgtgtgttttgaaatggggaaattttggtaaattcttgttctgaaatgtatgctgaacttgatcttttcaggaaagattaattgtaaattatgagttgttgtgttgatggataggagtagcagaagatgagttgtgaatatcctattagtattaatagaaatgagtcactggagaggaggggttaaaatgcttttgtgtagctttgggaaagttaatatagaacttgatgcaatctgaaatctgaacttgatggtgcagttttgtatatgccatgaacctgtgtattccatgaatttgaaacaatatgaggatgctagaatgcagtaaacctggaaattttcttttcatgacgtagacctgttacaaatatcaatattacttgattgcaatttttagaatcatagaatagggtatgtttttgctgaatgacagttggacagctgccccatatttattttgtgatgtaatctgaaatctgaaaaatgtgaaggatgtggatgtgcaagatgtgaatgtaatattctgtgacttgtgtggaggatgtggatgtggaggatgcgaatataatattgtgtcatttttgtgtttcaggatatatttctgttgcgctatttattttttttggcttttattagtataggtgccggttctttattgacacctatgtggtgagtacaaagtgttggcctttaccccttgtaggttccgattatttgcaggaaccggcacttatagtaccatataggtgtcggttctgatggtataaccgacacttataatattataggtgcccaatgattttgatcattggtgccgaccaaaaggtgtcggatccaaaaccgacacctattaggccttaagaaccggcactaatgggtatttttgtaacgcacaggctattggctagtgcatataaaatttagttgggactttataaaaagcctctacaatttctacttagccatacaaactaacataaagagaatgctcgtactataatactacctccgttttttaataaatgacgccgttgactttttctcacatgtttgaccattcgtcttattcaaaaaatttacgtaattat

SEQ ID NO: 23252 - DNA, 20196 bp, Oryza sativa
cctcatcttccagaagtggctcgggagattcgtgagggggaactgctgtaactgtaacacccaagaaaaccacataagcctgggatgccactaaacaaccacacataagtgccaaaacaagaaaattttggcaacaactaccttagacaagaaaacatcgcggaagcatcaacatatagattaaggttatgatacaacaatggactgacatgtagggataggcttgaaaaggtagctcattaatggtcaacacttctagtgtttaattaacccattatgtctaaacacaagtaatcctatcagcatattacaataatcatgactaagtgagatcatgtcgtgcaacagtgtagctaatcccatcccttcacgcaaacatatcaacagcaagtacctgaaaagactataaggggatgagaataaatctcagcaagcaaacggctttaacaagctacttaaaccacaggtggattatatagttaattaaatactaagttatgattcacataaagacaagttgaatatccatagactaaaaatatcatgacgtcaccaatcaaatccatatactcacaaatcccagagaagaaaacacttctcaaagatatcttcgatcgatatttcacgtaacatcctgcaatatgtacatatgcaatgcaatgatatgtactcctgctttcacacccaacagggtgaataaatgcatatgcaatgcaatgatatgtactcctgccttcacacccaacaaggtgtgaagctgcatcgtattacggcaatatacgatgttgtaccggtacggtcgcaaccataggttcacgacataacttcaaatgcaatgcaagtgatgcaaatgcagtatgaaatccagagtataacatcggaaccaaattccttcgatggagatcagtataagggtattataaccaagagcataaagtataaccatatacagtgtaaaatcaataagtgtgattcagataggtaaatcctctgggcaacaaataataatatatcggttgatgatatataattttcaaagtgaaggtagaataaaataacaggttaaagctgtagcaaaccaccgctacgttcacttgccttcactgatgatgagatgaactctagttgcattccgaagtggcatcacctgaataaacaccggctcagactcaaataacatgcataatcattcaagaatcacacatacgcttcctacgctgggatcccaccccaaacaacattaaacaaatcaccgataatcttcctataaaagcagcatagattaacaattcgatacctccaattctacatcacataacacagcaaaatatatcatttctgacatctacagaacaagagttacaactttcatttagataacaaaattgaattcttccatttagctggcctaaaacatggcacaaaacagagaagtgcatctgcccagaaaactgtgcaacaaccattcaaaagagcactgacaacaaactacaagataaaatctaacaatttttatgtaggaggtagatcacaacatatgctacaacttttgtaaaaacaagtttctctgattccatctttaaaatcctctaaaatccctctgaacctcgactacagaaaaatgcatcgatatttagacagccaacttcagaaattgatacctcctaaaccacttgatataaactcatgccatttggtcagaagatagatctacacgtttctacaacttttgtatagagacttttcgcaggaaatcccattatgttggccgaaaaggcagccaaggtagaactgtgcagggtggcagatcagaaaaaaaacccggttgaggaataaatcggtggatccccaaacttactcgcttccaacacttgatctaaaccctaatagaaaaccaaaacagagggacgaaatcatgcattgatacctaagcctccatgggcagcgggtaatcaaaccccacatttccatcttcacctcgatttcctccgcttccttctttccctttcttctccttcccttcttcttcccagatctgcagcagggcaggcatgggggaggtcgaccagaaggggaggtgggcgccccaaggtaccaaatgacggctagggggaggtggggagggggacctcctagggttttggggtgtggaggggcagctgggccttgggctggctgaaagctagcccagctagcgaataactattgtttttcttctaatttcaaacaccaaaaccttacggacttccaatatatcctctacggtattctatttttttctagggcattacagtaacctcctccgctaactcaatctctgagagagagtcggtcaaggcgaaccttgcccgcgagaatggaactgagaattcattccctcccaaagttatcttgaggctatctaatcggagcgtgtttatgaggagttgctcaatggaaagcccgattagaatgacaatatctcggatttcaaagacgtggaaatccaagaccgcctccctgtcttcaaagtagacaggcacatcttgcacaatcccaaatccttcgatgatatttccgttcgggtgtttgaagaatttgtttgtcagggttactggcttatcgctcagataagcgaatgcaaatgactcaaagatgagattaacctcgatagttggactgtaaagaataccaatgtcgttcccctccagatgacaaggaatgattcagggagcggtatttatccgaattacttcgtatgaaagctctgcctcccttagccattcgtcgctcattatggatgttagctcccgaacagtttcccgtaggaacccaagttccataagatcaggaggcggcaaagggacgagtggtttctttttactaaaatagtttagggtgttgccatagtcttcgtcaaaaccgtcccttaacagaattgcggcatggtccgaagtctgaatttcttcattcgcaacggatggctgcaaaggaactttctcatcaatcgagccagtggaagtggaaggttcagattgtgactcgattgttgaaggttcctctatcttggacacggatacctccggagggggttcatcagactgtgccatgaaggaggtactttctagaatgcggtctagaattatttttccttccaacggcgttttgtgcatgaatgatcctccggcggttatgttcagatagaatgtagattccttatccaaacccatatggaaatgttgcaagagcatatattcgggtaaggacaaggttggtccggactgcagtaaattagtgaatctagaccaagctgcaccgattgattcgtttttgatctgctggaaactgatgatctctactcgaagggtagtaatacgagtatctgggaagaaggaaagacataatctgtctcgcaactttttcccaactaacatttacacatccaacggtagaggtgtaccattgcttcgctctctcttgaagagagaacggaaacaattttcaccatatggtttcttatctcatgccacgaatattaaggcatgagcagacatgctcaaagtctcgtagatgatggtagggattttctagatcaaagccagaaaaagtattttccctaaccatgttgattagtttggagcgaatttcatagccagttgtataagttgggtccaatgaaggaggtggctcatagaattcgcccctaggagcagacagctcgaaaagaggttgctccatagttgagaagagtttgacaggaatacttctctgggtagcaggggtaaaggtagaataaaaagtgaaaaagagatacgatgatgaactgggttcggaaatgattagcaaccgttccccggcaacggcgccaaaaatgcttgttggtaattcttatggtcacagatagaaatccgcaagcgcacggatataccgatgtagcacttcccctatggagtattctaagggtatcgaatccaagggaacttgtggtttcagatcttcattcggttcatccaaggacaccaacaaaggatatgccaggatagacatgattttctgttgataaacagtgtctagggaaagcttaagttcaatcctaacgcaatacttcaggcactagcaacccgctgttcccagatgtcgctctactacatacctggatagggaggacttaagtaatcttgagggctgtcaccacctctacacctacctcaaacgtactgtgggatacgcagcaattactggataacaatcacctaaaaaccacgtctaagcaattaatatctactttagtgtttataactcaccaaagcaatcactatattttagttaattatagtgagcaataatcccgtatgctatttaggaactaaccaggagacaattctcataagataaatctaaattactcaagaaaaatattgtattgaaatcagagtaataaacagaataaaagaaataagagaagattactgacaactccggaattcttccgatttcttctactctactctcttcgtattctagtatacaatatagtgcaatagaacctcttataattcagctcaagcttggaagtgtgtgtgaagtgaaggagtgaagctacttttatagggcagttatgacggttgtgagaaggggaaatgtctgaactgccccgcaaccgtcattaggagagcatctggagcatccacgccaaaccccaggatcaatggcgatcagaggggttcggccgaactagggggttcagccgaacttgggctgggccctcccggcctggccttcggcctgtggactcccctgactctcctctgtccatttctcggagttttgggctgagtctttgatatttttatgactagtgagcgtgcacgtgcaaggcatgtcagtatactgaatagagaaaataaaagaaaaatacatccatcactgatgcacatcgacatatatcgatacattaaaacttacattcaccgaatgaaatagcataaagcatgtacgtcagaaaccggaataacctggtttagagtcatggatgctgatgttagcccaaatgaaatagcatcattgcgctctactgtattaagattttccattgaatcctggattttctaatttgttttgcttccctcaaacaaatgtttctgatatatcatagtttgaacgtgatacacagctatagataagatgcagtgccaaatttggacatcttcagctatatagttgggtgttctaagtagacaggtgtatcaatcaaagagctgcagtatgctccccatgtgatctcaaaagaaaaaataattggctacagtgtgaggtaccttgcaatgctacagaaataattaagaaacaaaatcaacctttagatgccacgaggagaaataatgtaatttcagtgttcaacaaaccaaatgctaagaatggcatcaaatcctggagacagagctgctcccccttggccacgcaagtatgtcgatgatatatgccactaactcctagggtccaaccattgctatagcattactgcattaggtttagaaaataaaattttcagaaaaagttcagtgcttgtatgaaaagtaggaagtggtatatttgaccaaaattcttcagaatttgaatgagatgcagagctcaacgatccattgatcgaaccacatgcagagttagtaactgaggcgaaacacaaaaacctcttcacatcaggtcagccttacgctaccatggtctgttgctttagagaacacatatagtaaatctacacgaatttcgtaagagagaacatataaagaaagcgctaaacgtttaaaagcatgacagttttcacagtgagaattagcatggctcttagactcttacaataagaaccattgtacctgagacttcggttgtaagaagattgtcacaagaggaaaacaatgcatcttagtaactatgtttctggcaaaaattcatcttgtgatagccaaagcagaaactgacagcaactcttagctctgagttgaatcaataaactactaataaaccattgctcagcagtttttttttcgccgggccggcgaatagccggccgatgtatattaagagaaagaaaaggaatgtacaaggttgcgcggtgcgtcagagcaccaccattaccgacacaaaagaaaagaaaaggctaaaatctcacagcaaaatttgctacagggtggcaaaaggggctaacaagacctgcagccatccaggtctcccattcatcccccatggccgagcagagctcgggaaccgttgccgcgattctatcgaacaccctcgcgtttcgctctttccaaatcaaccaagttacaagtataacccccgcatcgaatgttttgcagtcaaccttagcaacagatttctgtgctgtaagccaccaatcaatgaaatccgccaatggcgaagagcacgaaaggcccagacgcgtgtgcacccgaccccaaatctgctgggtgtaagcgcagtccatgaagatgtgctaacaggtttccccatcgttggagcacaaatggcacacccgggcaaggctcaatccgcggcgttgtagattgtcggcggtgaggcaagcgttgcgcattgcgagaaacataaagaacttgcatctcgccggtgcacgggatttccaaataatcttgccaagtgggcacttcatcctgcctgccgaaaacagggaataggttgagcgcacagagaacacaccatccggagctgccttccatatcatctcatcccgactagcagggtcaagagagattccagcgatcacatcccacagatctagatattcgcccaatgcttgaaccgagaggccgtctctgatatctgagacccaggaattattacggagagcagccgccacagtcattccactattcttaacgaaagataaagaggataggtcctctgttttccactgaaccaccatccggcaaccaattatctttccaaaatagagcatcttatccattccccaggaccaccttgcagccgataggaaaacaatgcagtctcttcttatccgccggcggcgcgaaacgcgcccacggtcgctccggctgcgttcggtggaactagatccacctagcacggagagcaatgcccatcagacgaagatttctgatcctcagtccaccatactcgaacggacgacggagtttatcccagactacaaggctacacgacccagccgcctcttcatcacctttccaaaggaatccccggcatttcttctctatttcgttgatcgccaagacagggacttccaaaactgacatgaagtaaagagagttccaaaactgacatgaagtaaagaggtagggccattaggacatgtttgatcagcgttaggcgggcatcaggggataaaagcttgggtttccagccagccaagctttttgcaagcctatccatcattggttgaatctgctcctttgttggttttctgacggagagtggcaacccaaggtaaacaattggcagcaacttgactgggcaggacaacacatctgttacttcatcaacttgcgcatcagagcagtgaattggtgttaacgaacttttaagcagattagagaccaaacccgatgcttcacccatcagcttgagcacaaaattgattgtcagcgcatcgtgtctggaggggtggaagaagatcaccgcgtcgttgtcacatcccaatttttattaattttaaaatttacctatttccaaaatttaaataaatatcgcctttcgcttttgttcctaaaacaagcttaattacttttattaaattaattaatgatgatgttaatttttattgtgtgtttattctaattggagttatttggatttaattagattttggtttgcgagctcaaattattctaactccctttatttcctaaaataaccactcaaaaaaaatatcatttgtgcagaaagccttccttttccttcctttttcgcttcctattgtttcttttcatttctccctctcttttttcacgtacggactgaaacaatattttctgtttcttcctctccaacacctggatccagctcctatcccaaatattgttgctttaatcccatgaaccagcagttataaaaaaagaagagatgaagagcaaatcaaccacccagactttacatcttcctatcaatgcaaacatttgacatttaatcctctgttgattgctctctccatccactatgagtttaatcacctatgggtcatcaatcaggatacgttagcaagccaagagccaaataattcccctgcattatcttcaattgaatcaccagataactcctccactcaacattgattccttctctcactgtataaacagacttccaccatttttctgcgttctcaaactctcaaaggctcatagagccaattcccacacttggtctgcaccgcttgctcacctagggccggcgtcgttgtggtaagacactctccttcctcctatctcagcgatggcgctgcatctccctcctcaacaacgttgacaatcggaggtcatgttcaccggcgacgatcaccggaggcattcgccagtgtcaccacattcttgtgtcggcaagtgctgttagcgaagctgctgtcttgctggtcaccatcattagttcatttgtgcctctgcacaagcacgtgatgtgtcctgtgaaatcacaggagctttttgttcttttctccttgccactaactggtagttctccttcaaaatgtcagaaaccacaaccaaatataaatccctgctttaattcctatactgatcgtccagtcccaaaataatcccagatcttttttttttgaccaagggcattaagcccccatttccattactagaaatgagaagactacaaaagttcaggttcagatacagagcaatcccagacaagctatcaagatagctggttttgtagatgacaccaaacataacagaatagcagcacatagctctaaaatttaaagccctgaaacataaccaactggtgattcagaaatacagcaatcaccacccaaaaccctaaattttgtagttgcagctgacatccagaccaatagagagagaacaatcttcagcatccaatccttcttgtagcggccctccatccatccttggagttgaaaatttcacttgccacctgtcttatgagtttggctcctaagagcaactttctttgatcttcctccagtctctgcaatggaatccaagattccaaccaatgacaaaccgaaaaaatcacatcagttgggtcattagggagtttattctcaaaacaggctttgtttctagatttccaaatggcccaaagcacagcagccacaccagtgacaacaagttttttaagtttctttccaaaagcagaaatccaggagctaaacagttgattgctatcaaaaacaggtttcaaatccaaagcacaggagataatgttctagatcagccttgccatagcacaatcaaaaaagagaagctgaatggattcttgttgatcacagaattgacacttagtgtcacctttcctccaccccctcttaaacaagttgtctttagtcaagattttaccctttagcatgagccagataaagattttgatcttcaggggtattttaaacttccaaattttcttgaaaggagtaggtgtctgttgaatacagagagcattgtaaaaagatttgacagaaaatgtcccttgcttattcagattccagctgagcctatccttacagcctagctgaaagtgtagatttgcaaagttttgtttaataagattccaatctgtcagtttttcatcaaccaaggtccttctaaatttgatcacactccaacctttttcttttatcttagctaaggaaataagttttgtcaaagtgatattataaagagcagggaactgagggacaagtgggcggccacccatccagctatcctcccaaaacattatagatctcccatctcccactttttttgaacatagactataaaattgttcttttacttccagcagcccctgccaaaagtaagagtctccaggttttgctttcagtacagacaagggtttcttcgtcaagtatttattcctaagaaaatcttgccaccatccctcttcattttcaagttgccaaatccatttccctagtagagccttgttcataagatcaagatctaacactcccaaccccccctgttccttaggagtgcagataactggccattgaacaaggtggtgcttcctaatgccctgatcctcttgccagaggagccttcttctaaagaaatccattctctccctcacccctttaggaattctataaaaggacggcatgtagagagggacattacttaaactggaattgatcaaaatcaaccttccaccaattgattgaaatctcccttgccaacaccccagcttgtgctccattttattttcagctgttttccaatcctttttcagaattctttttttatcaatagggaccccagatatctcataggcaaatcacctatgttacaagtaaagagttggctatataaattttgtctatcctctatcagccctatgcagaaaatttcacttttattgaagttaattttgaggcctgataattgttcaaacaaacacagaatatatttcaagtttctggcataatctagattgtcaggaatcagaagaatagtgtcatcagcatattgcaacacagcaactttgttttcatcattgacacctaatccttctagcagggaattgttttatgctctatgaatcaacaaagtaagggcttcagcagctaaattaaaaagcaaagttgacaggggatcaccctgtttgagacctttgtgggtttggaaataaggaccaacttcatcatttactttgacagctaccttccctcctctgatgactttcatcatccaatcacaccattgagttgagaaattctttgcaattagcattctataaataaaaaacccaatctattttaacataagctttttcgaaatcaatcttaaaaagaatgccactttgtttcttttggtgaatagaattcagaatttcatgaaggattaccaccccctccaggataaacctatttttgagaaaagctgtttggtttctggagataatgtaagacatcacacaatcaatcctgttcatcaacacttttgttagtattttgaaactcacattcaggagacaaataggtctaaacttttgaatttgagcagcatccttagttttaggaaccagagtgataatgccaaagttaagtctctctacatccacatccagagttcctttatgaaattcattcaaaagctttaagagatcaaactttatcaggtcccagaatttggcataaaactccccagggaacccatctggaaaataatcccagatctaatccacccattttattttctataaatctatttaatttgagctctctatttttctgttctgtttattacttgtttgcccatcgtttatttgcttctgttttttttatcgtgcacgagtagacgtcgctgccgaggaaggagcaggtgcagaagaagtttgggttggagattctactggtgaaggcaagtgtactcctttgatcaagttgatcccagtgtgtaaatattattgtcttcaaattatatgcatgttttatttaaaaattagcgctttgggtaattactgtcctaattgctataaataaattcctgccatgttatacattgctacctgtaaattctttgtcgccacgtattttgggaagtgagctactggaatgaaaagctctgataggtagttgagcttagccatgcgcataatggtttttaagcaaaaataatattaaacttgactaatcatatactcaacattgtttttataacgaccatgtggctgtgtgccgtcttttggtggcatgtgatgcatcgtatgataaacatatggtggaaaaattgttttagactggggtgatggtggatctgtctgaacctaggggggaagccttctgtgtgcgtgcttcccatcgacctgtgtggtccttgagctgtgtgctccttttgctgtgtgcttgaggtctttagtttaggcaagtcgccccggtcaattgaggactttacttcgtgcgccattgatctaagccctatcgtgcaaccacacgttctcgtgggaaggatctagcttagtacgcttcctagtccggacactggcgtcccaggtggttagatgctaggattttggatcgtatcgtgggacctttcacctgtgtggcaaagggaggactgcccatgagggaggccggtgttagggcgaggtaggggaaacgctttgttactctttagagtttggccgcaccgaagggtatcgtgtgagtaaagttgtacaacctctgcagagtgtaaatctattcgaatagccgtgtcctcggttatggacatgctcggtgatttcacatgaggggtagattttcgaaaattttactttggagcgagctgtgtgcaagataaattaatatgtttagttttgtgggattatatttgcatttcagcatttacattctgtacttattttcttttccggtatttaaattctgtttttactgccccctgtatacttttgtactaataaaatgccatttaagcaaaataacccctaacctttctttgttagccttgtaacatataatgcatgtttccgtacacttgttgagtacttgttgagtgctttatgtgctcacccctggtgctatctcaccagttgcagaggaggcttatcctttgtttccagaggaggttgtggcagtggatgatgactaggctcgcgtctcggtcgattgcctgtggcagtttgatgaatttcacttcgctgtttatcttttccgctgtgtttcccttcgcttttggggccctgcgcggccgaataaatatgtaaaccatgttacttatgcactggttatatattatatgcgtgatgcggttgtgatgttatttctgtatcctgtatatgctagcatgatcctggtctagcattttatacagagagatcctattcggggtctcgacagtcattggtgtagagcgaggcacgcagcggtagatgtacattggcaagaggagaaagctctcctcgctgcacagccgttgcgcatagggccgccagagcttccgtgacgatgacgaacaacagtggagagaggggatccctttgacgcaacccacgagcaagcctgatccgttgcgtatctctaccgttgatgatgacagaagtagaggcggtgaagagcaaggccgcgatgcaatccctccatcggaccccaaaacccaggtgccggagcagatccagaaggaattcccaggaaacagtatcaaacgcctttgcaatatcaatcttcaagagcatggctggcgttttagaacgatggaggtttttgaccaccccctgcacatacagaaaattctcctatatccttcggcgcctgatgaaagcagactgtgccggcccaattagctcatccatcctcgacgcaagtcgcaaagccaaaatcttgttgagaatcttggcgaagctgtgaatcaaactaatcggccgaaaatctgacagttgattcggttcctccttctttggcagcaggacaattgaggctgtgttaacaaggtgaagatgctgggcattggatctccatgctaagttaagagctgccaccagatcattcttgataatttcccaacatttcttgtagaaggtggcactaaagccatccggcccggtgccttgtcgctcgacatttccaagatcgccttcttcgcctcgtcttcagtaatgtcgcgctccaaatcagagaaatcatgcaccgccaagccgatcgcatcgaaggcaagggatgccgacggggggcaaggcatgccaagaattttgagaaaataatcatacgcagcctgaagcttgtcctcttcagttgttgcaatgatgctgtcctaacaaatagaggaaattgtcttcttccttcgacgagcattgattttgaggcagaagaattgagccgtggtgcctctatgtttcaggaaaagcaagcgggcatgctgtttgagccgaatgcgctccagggaggcgagcgcgaggcagcgacctttcagagatgcccgcaatgatctttcaccagccgacagaagacgatcatcctgggtctttgtccaattggaaaactacttcatgggcgatcgcgagttgctgacggagctcactgatacgcctggctccccaggaccgtaaggcagcagcagttgcacgcagcttgaaatgaaggctgctgagtgcattggagccagccggcgctgcctcccacgcctgacagaccacatcctcgaaatcctccaatttggcccaataggattcgaacttgaacttcctcggcctatgcatcatctgatcgcaggccagcaacaggggacagtgatcagaggcagaggagctgagcgcttgcaggtgagcatcacggaaaatttcctcccaatccccatttactagcaccttgtcgatttttgttagagtcggtcgttcttgctcattgctccatgtatagcgacgcccaaacagatacacctcgcgcagctcaagggcatcaatggtgtgcctaaacttgctgatcaaccgtcgatttacattcccattgtttttatcaccgtccgtggccaagaggttgaaatctccgaccacgcaccaggccccgaccactagctgcctaaccagcagcaattcctccaggaacaacaatttgtcgctgtccaattgggggccataaacattggtgagagtccaacttgccccaccttccaggttggagaaacaaagagaaagcgaccaccgtcccttgtgaagacaggaaacagagaagcgatcatgccgccaagccgtaaacagcccccccttgttccatcagcaggaatgaaatcaacaccatccagggcatgtccacacgactgaatcgacagggaccgatctagaacatctaatttagactcctaacaacaaaaaatagaagcactagaggttctaacaacttccgctacaagggacctcttgccagggtggtttagaccccttacattccagaccaaaagagtacaagacatgagaaacgaccagcttcaacattgcagcacatgcggcagttttaggctgccgctgacaccgccacactgcagagcgccgccagcgcctgtacatgagatggcgctaggggagccttgaacagctcgaggtaccggaggatatcccgctcgtccgccttgttctcatcctcgatgatgccgagtctcttcatcaccacccgctgtgctctggtgatcatgtggatatgtttcccactattctgggcggcaaggcgctcgctcctccttggagtgtacgaggacgggcggtgtcggtgccgaggctggtggggacgcttcccgaaaagtgacaaaggcggtggtcccaccagatcagccaaggcagggagcgatcgtgggtcagcccactcctctagccccggcctataaagaggaaaggcccgcgggccagtgagctccctgcggcggcggtagacagccaatgggccagggacgagcaaagccagcccaaaagagggagcgaggcgtggtcccggcaagttgaaaaaatctccatcccgctcagcgggcaccaggaccgacgaagcatcaacgtcagggcgcaccggtgatgacgaagtaggtgtcaacattaatggctcctcaggaaaaagctctctttggagacccatctccctggtagacggggccacaaccatgcatgccggggctgacgaggggtgagtaatgacgcgtggagacggtgggcccagagccgccaagcctagggaagaaagctgaggcagagccggtgacaacgggcagcgcaccggcgaaggcgttgaaggcgaggcatcccaggaggtgggggctgccagcactggagaagcaccccccggactcgacatccgcggcaggaaaggcgcagctgggggcggtggcgtcgtagccggaggcgatgccgtcgcagctaggagcggagtcgtcgacttagctggggatgaagcctcaagcgctagcacagagactccctccagaatgcaccgaggcatgctagctggcatcaccgccgcccgagcggggagctgcagatgggacgcaggcaaaacgggtacgcgctacaactgccgttgaaaaccccccgccgaaccagaacccatgtctgccaccaagcgccggccccagccccgttgcatcgatgcgaccgaggaaggtgttatgggtgcggcggtgaggaggtacgaagtcatcgtctgaagaagagccttcccgaggctcctggagcgggtcgaccacctccatgatgtgaaggagtaggtcgaacttgagacaatgcttctcagacggtggagccggcggcccttcggctaagagcacctcgaaatatccggatcgtcggtctctggctcgttccaccattcttgcgtcggctcaggaatgtcgagggcaaattccttgggaatggcggaagggttcaccgcccaaggcagcacttccgtcatgcaggcatcattcggcgggaatgattcgatgaactggcagtccaccttgttcaatagctgcttgagctcttctggctcggccgcatggggagggaggccctcaattgccagccgaacgatgtgtctcattttggtgcttcgggcatgaatggcacggtgccagcgacgaaaggtgatcctcgcgccagcaactgccaaacggcctgagagatcaagaaccgccatgcagtcttcctcgcgcgtgaaggatatgagaaaatcggagggtctagtcacttcgacgcgcacattgtcatagagcacaccacaggaacgacggagctcttccaccaccatggccggcgagacctcctgccgcccagaaagaacgacaacgagagcacggcccctcagattctgctccctcagattctgctcgatggccgacatccgctgggtctaggagaggaccccccctccccacgcccgggcggagaagagggtcgccagcgcctagctcatccatgacttttgccgacgaagcagaatcgggcgccgacactgtgacggggagcgcctgacgagggggaggggcaccgggacaggaaccgccgagagcgtaggcgcctggacgacggacgcagttgacggagcggtcacgtggataggagcagcagctgatgcttctttcacggtcggggtacgtgccgcatgggcggtgtgcgcaggagcggttgggcgccgcggacgagcgacggctggcggcgcctggataggtggctcgtcttcgtcttcttggtggaaggtatagtggcgctcaaggtggctcggataccagcagtggtagcaccttggcgtagccgtgcagccgtctttaaggtggcccagacctaggcagcggaagcacctcccatggagccaccgagggatggggcgagcagggcgagtaaagatggtggttggacggccggcggatggccctcctttactcctcctctggaccacacaccaacctgcatcaaatgtcttgctgcgatagggtagggggagcacgggagtcaacccgtggggcccggacgacgtcagcccaggaagcggcggaggacgagggcgtagaggcgacggctttgtctggacggtgaccgtcggagcggccagtcgccggaaggggtgggtgggaggacgacaacacggctctcactctctctctctcatggcgctggtcttcctcagcaggttaccaaatatatatatgatcaattaccaaatatatatatgatcaaatatagtgtatcaatagttagctgaacaagggcgtgtacctgtgcttcttctgaaactgaacgaatggatggctgcttccactgcttggagtggcggcggcgggctcgcacgaggcgagcggctccctcgtcgacgacgatggctccggcgggatgtccactacttggagtggcggcggcgggctcgcacctggcgagcggctccggcggaggcggtggtggcgggaagcagcgggcgcgtaggaggcggcggcggcgatactgcccgctccctcggcgacgacgacggctccggcgggaggcggtggccataggcaatccgaggcagcggcggggtaggggaatcgggagcgcagcccagcgagcggagtgaaggcggcgggctcgcacgagaggcggtggtaggggacgacgccggcgacgaatatggctccgacgggaggtccactgcttggagtggcggcggcgggctcgcacgaggcaagcggctctggcagaggcggggagcgacgggcgcgtaggaggcggcggcggcgatgtggcccgctccccggtgaggcggtgagtggagtggcggcggcggcgcccaggggggcgacgcgtgagggatttttttttctttttcttttgtcttgaccgatcgctaatttctgtaaccgctgctttcctcctcgaggtgggatcactaattgcaggggtgatccaacttttgatataagccgttggatgaatagatataagccgttggtcaggaaaaataggtgtttgatgaaatcgtgctttttatagtagtatagatgtttacgacccatccttgtatggatacttgtttctcctgactttattctagatttcctcccaacttcggggtttaacacctatacaccaacacttgtggaataagtgagattaaacacctatcactatgttggatgttttattatctgaacttttatgcagatgttggcggtatagaatcggcatttaataaccgccaacacctaccacctgggtaaaaccttaagcaacaagtctagctttatttctcacaatcaaaccatcctcattttgtttattttagaaaacccacttggttccaatagtattatgtccaaaaggtggttcaactaaagtccaaactttgtttctctcaaaattttcaagttcttcatgcatggcgttaaaccacgattcatcagttaatgcatgagtaacatctttgggttcaaaagaagcaacaaatgtagaatttgcacaaacatcatgagtcgttaccttagaccttgtagtctgctcacgtatattaccaataatttgttctggcagatgtcgtcgttgaatatgcaaaggagcaacgacttctgaagttgtttcacgttctgtaccctcactggtcgaagttgtagcctttggaggaccatctcgatcagcatcaacagaatcggaacccgacgaccatggccggtctgactgcacctcctgtgccagtctgaccggaggcgttccggcgatctgaccggcctggcgcccggtctgatcggccgagccgacctcatcatcgtcgttgtcgctgttgtcttcaaaaaatacgaccatcctccccctgaacctgtgacaaagtacctgcaatttcggatctagtacctggactagcctcatcaaaagaaacttcgcaagtctcaacaattttgttagtttccaaaacaagtacatgatagccacgtgaatgtgcggggtaaccaaaaaacattccatcggtaaagcgtgcctcaaacttatccaaatttccagatttcaagacaaagcatttgcaaccaaaaacacgcaaacgtgaaactttgggttgatgtccaaatcgaagctcataagaagtttttccaagttttgaccttaagaaaacataccactttcctccaacagattgcactctagctggaccaacagtgtccatgtgtaatagctatcccggtgcatccgtcatcacagaaacaataggggcatgtgaagaagaaaccatcttagcatgacgacacggtgtacaaaccaaatcaagatctttcttaagtttaggcaaaccacgaacaagatccaaaccacttaatctagtgagatgatcaaaaccaacatgtccaagtctacggtgccaaaacatcacatccttattaaacttagcaaccaaatatgttatcacatgtgaaaccggattttcaaaatcagctttaaacactcttccatagcgagaaatattcaacatagaatcaccacaagaatcaaatactttacttccagttttcttaaagtgaacctcaaaattttcatcaacaatttgtgaaactgaaagcaaacttatactgg

SEQ ID NO: 23253 - DNA, 8038 bp, Oryza sativa
tgtaccccttcaggttgataatccttatcgttttggacgagggcacattcttaaaaaaaaacgacagtgaccattatttttcattataatatgtataaaatgttaacaaatatatgatttttattaaattattttttaagactaatatatacatgtagtcaccatatttgaaagataaatattttaaaaatgattcataatcaaagattctaaagtttgacatcactcttgtctaaaacgataaatattatcagtccggggaagtatttaaagagtgacaacaataatattattttctagatctgctactgaaagtctcccgatcgaaggagtctggagtgtgatcggtccataaaggttggtctcatatatacattgcacaggaacttaagatcgtcctcaagatagaagctgctcataggcttatggtccggtcaaagaaaataacacaataaccaaatgaatctatacgtctgattacgatgctttgtacgtttatggataactcagttgcaagaacaggtcttagatgatctgtctagcactctcatgttttttttttctttttggaagtggcattgtgtgacttgtgtctcagtttactcgggttaatctaccactaacttgaaattgactagcaaaatactcactaggatattggataacaaatgtacctttgagcaattaacaactcataccacgtggaaagttcaagagttcttttgctctggatgcatcacttggaaagtgacatgatggtcatcagttgtcaaaattactattgcatttataatttcgtgattatgcaaatttttctatctcaatcaactgatcctgatcgggaaaatggggccagaaattagttcggtcacatcatattctaacgagaccaatgtattaattaaattcacgctggcacaaattgaacgacaattttttttctgcggtgcatgacaaagacgtaaaaattggccaactaaaggaaaaaaaaagtaaaaaaaggaacagcggaaatatatacgtggctaaaatacgcacctttggagaatttttcagggtttatgtcaactccgatgattcgagatgctcctctcaatctggcaccttcggcaacctaaaagaattttaaaataatcaaaatttattttcttttgtttgccttttcgcatcctaattattacaaacatatattttgttgccaaatgaaatgtacgttataaaaacgctagaaaacacatatttgtagaaaaaatattttattgcctgagtatttctcagtaactaatttacttaccgcaagaccaatggcaccaagcccaaatattgccactgtggaccccttggagacgtttgcagtgttccatgcagctcccactcctaattaacagcaaaatcataaacaatttttaattcattatctaaatgaacgattgctaattaaattcaaaacattaaactctcacattaaactttcaagaaatctacacttccatatatatgcagtatcaatcaaactttaaggctttcattttcacacatcgatatcacaatgatagaagcaaatgcccaccattatcatctaaattaataaacagggataagtacccaaaaaaatcaaatggagggccatgctgcagagaccaatctctgtagcattgtgggctggacatggagcttggttttgttcagtttcagagttggacagagtaaccaatctactggcatccgtatccaaggtgtcccatgctggactgttggatttcaaataaaatcaaaggaaacatcgatatctagtcggcacttgacaagtccatgagtgtccagatgcatgctagccagtttgtccatgtgtcatgttaatccagctagctgaatttccatgtattgacagacagcatctcaacaaattttctgttcaagatcatgggtgcccctgcctgtttctcctttatggtttatatatacttttatgttggcttgttaactactacctccgtcccaaaatatagcaatttttagctatgaatctagacacacatgtgtccgtagctaaaatggttacattttgggacgaagggagtagtgtatagtttataaaacagtggttgtaacttctaggttataagttcaaggagatatagtcgtaactcctgtctcaaaaaattaacttggctcatcagtgtaagagcaattcatgtcattttaaaaaaaaaatcctaatacaaaactaaaatgcctattattgagtatatactatctccatcctagaataattacatttttagagaaataaagacatattagcaaccaacacaatttaccactattaataatcacactatatgtacacattccatacatacacttgattaaaaagaaagttaaaaaccatttttaaatttgattaaaaggaaggttgatcagtcccaccacagcataaatacatttttttaacaaaatttgaatggtagaaatacaattattctggaacggagataggacaatattttcttcactatataggaccaagtcacggttgcttacctgtggagaccccacagctgaggagactcatcttctccaagggagccttagggttgatcttgacagcgcaagcggagtcaatcacagtgtactcagcaaaggtggaagtgttgagaaaatggtagaccgggttgcgtgcaccggaggagcggtcgatcatggtgaacctcgtgccaccatcggtgaccatggtgctcttgaatgggttgacacggtaggttttgcataggttgctcttgctggactcgcagtaggtgcacgcaccacactcgccggtgaagatggggacaacatgatctccaggggcaagatcctccacaccctctcccacgctctccaccaccctgtttttttagttgcatattgctatcaggtgttgtataaaaatggtaacgtctttaatgtgccaaaaatatactctttaggatgagtgcttttactatgacaagatgtattcagttttgtgaaaacatgcaaatattcattccattaaacatgagaaatggagagtaaagttgattctagcgcaaccatgtaaaaacattgttaaaattaatgatgagctcatttgcgctaaataaaaaaaaggataaaggttttacatttcccataaacatcacttgtatgtagactagatttatatgccaaagtgatccgaaattttttattaaaatgaaatggaacacaattgatgaaaatatgtgaggctggtacaaagaataatcaagcatatgaggtatcgtctaatcccatgtgagctaagctggattgttggacctatgcttttggggagccggcgttctatatatcgtcttcatctgccaactaacaataattaattgtatttgtatttattaacaactggttatctgtcacatgatcgatctaatcgccatacatcgatcctactttatgtcagacaaaaaagatatctctagcttgttggcatgcaccaattgtaattaagatcgaaagcacgaccagtttctgatcaagcaactctaataaatccacttattagcacgtgtctggtgtaaccctggttatgtagacatcatatcggatttttttttatttgcttaataattcttggtttcttaaaaaccatcttttggagtatcttgacggtgatctctaatgtagtaccattaggacgtccaagatgacttttcttaagatgaagttgaccatcatttcaccattagcttttttgcaagcaaagtcaaaaatgcaacatcactttatacaaaagaaaaaaattcaattgcaacagaaatttcagactagccttttggtctttcctatatatattaattctctactgaactaaagctaaaaatcctatttcaaccacttttatctttcagccagtttaattaattgttacatatatacttacatagtacctaattaattttcctcaagaaccttttttttgcatttgcttgttcaaaacgaacatgcatgtaaattaaagcaacagatgaattttcaagagcttagttattataaagagaggaaaaaacacagagaaaaataacttttaactagagaaaaaaggaggataaaaattaaaagagggtgaaagatcaaaggtgtagtactcaccctgctgcctcatgacccaatatgcgaggaaactttcgctgaagctcgttctatcatcatcatcatcatcacgccagccaaaacagcagcatcacatgaacagacagattgaaggacaaggcaagaatcaatcaattaacaatgctcgagaaataattcaattgtgtacatctttgatatagaagacagaattgtgtatgctttccttcatacaaaagaagttaagtaacttaattagcaaaatttcatgaacacgattactgcatattcgtctatctttttatatacatctctctatatatgtatttgtatgtgtatatatatgtgtagaaagatatatacctctcctttccaggcgctgaggtcggtatggcagatagaggtgaagagcaccttgaggcgcacctccatcctcgccggcggcgccacctccacctcctccatcaccagcgcctcgccggggccgtgcgccaccgccgctgcacacgcatgatcgtcgtcgtcgatcgtcatctcatcatcatcgatcacaccggccggccggcaagaaaagcttgccggccgacgatggccggagaggaggacgaagctagatatagaaggcgatcgatgtcgttttaattctcacctttgcatttgatcggcttccctttggtgtcggcgccggcgccattggagtgcagggcgccgttgccgatggcagtggcatccatggtgtttcttgcctttgactttccgaggagaaatgtggatttcttgattgtagcttcaagtgaggcaagttgatgggtttatatagagatggcatgaggagagagattagctggatatatatatatatatatatatatatatatatatatatatatatatatatatatatatatatatatatatatatatatatatatatatatatatatatatatatatatcttgtagatatgatagggaggagaccaacaagggattaaatattttgttttcttgaagctataggttgagattttaatttggtttctcttttattttctcaaaagaggtgcatcaatccaaccagccaccgctttaactcctggcacacacaattatgcatagctggaagtatatctgtttcaaattacttgtggttctagcaaatctcatacaaatcaaaaggatatcgaagattacatagttgccccattaaatacatctcaattttttttgttttcaaagcatataaaccaatgggagttattgggagtttatgactgtattaatgcatgactatattgatgaaaaggtggagataagatcacctctaaaaaggctttgaattgtgagaaccatataagtaatttgataaaaaaaatgaaatgctagaatggtaagtaatatatatgaaactgagggagtactgatttttttgaagaagttaggatttatacttagctaacgactattaagcgtgttcaaacacggtgtactagagagtttgtgattaaggtgatgtgtttgtcggtatatcttgctgtgaaaaaacaaggtatggttcatgttcgccaaacacaattttactataaaaattaatttctaattgtataaaggtaaagctccaagtaactccatttttcactcaaacaattaaacaacgcccgcacccaactaaaatcagcttttttaaaaaaaaaaaccatatccaacaagataacctatgtaaaagaaaatttattttttcatggtaatttgtatatgattttaaatattggtgttctaaaccaatcttacgtcctatgcaaataataattaaattaaacatcctgaaaaactcgaagtataatgttactatcattcactccacaaatttcaccttaaaaaaacgccttttcactaaaaaaaattcaccttaaaataagactcgtgtaatgcgaagcgagaaaattattgaaaaataatattatacagaaaagcgaacaatttcatgcatggtgttgatataataattagtactgtggcaaaatagtttaaactaggaaagtggtatttttccaataaatcctaccatttaacctacataaagttggattaattgacaggggttaagcatgctattataccgatcgacacatacacgctccaccattgacttttgaaagaaaaaaatggaaaaattaggccaagaccactaacattaattaggtgtaaagaagaggtatgaacacccgaagctcatgagtggaggatgctgtaaattatatatactcacagagttgtaaatttacaggtttgatcttttgattacgacatgaactgtagtttaattgcaattgatggcatcgtattaaagagacagcaaactcttctatttgtattgagtgttttagcaggagactaaatcgatctacttattatcagtccatttgtgaatagcaagtaagcacatgaacaagcactgcaatcaatgatcaatttaacatgtggcgtaagaaataaatgtgaaaataaatcgtgggtagatactagggatgaaaactgaacggatagttttcatctgctccagagaaattaaaacgaatatagatacctttcgaaacggataatatagatacctttcgaaacagatagttcggatacgaatacggatatagtatcggggtttccgatatatatggataataatacggatatccggtgaacaccctatttcttaataactctataaccttcaatctacctttttagattttaatagtaacacatatcttaacactagtccacattattattattagacttttacataatttttataaattatactatattttatataaaatgagctaattatgtacgatgatatttgtttctattagaaattgaggtggtttccgtgttccgagaaaaaaatgtttccatattcatgtccgatcatatttgatccttattcatattcaagataatttgtatttgtttccatatccgtgctattcgtatttgttttcgtatccggcaaaaaaatatgaaaacggatatcgtatgagcattacacattcgtatccgctccgttttcatcccaatagatacatcttgccactggaccagtttctctttaaaaaatttaatgatatatatgtatgtatgtatgtatgtatgtatgtatgtatgtatgtatgtatgtatgtatgtatgtatgtatgtatgtgtgtgtgtgtatatatatatatagtgaatctattctacacccctcccctagaataactattctacacccccccctcccatgggtcaaacccacctcccccaccctccctagggcccaaaacccctcctcctacctcggtcaaagcgtcctcccaccggtcaaacccgcccaccactttgctgctctcgtattgtaggaatcgtgcagtaacaggacggtcatcctgcagtaacaagacagcattatcgcagtaacaacgtcaaaaagtagccatgatggatctagtttcgttaagtgtttttttatgaactttatggtgcaaacggattggaaatacaagatatgatgtgagagatattgctctctaaagattgtgatttacctcttttttagttctcgtctcactggaacagcgtagtaacacgatggccaatatgcagtaacacgtttgcttttcgcagtaacaacgttaaaaaatagttatgatggtttcagtttcgttaagcacttttttttttacgaacaccatgatgcaaatgggttagaaaaataagacatgatgtgtacgttagtactctctaaagattgagatttaaaatactctagatctaaaaaaacattactactatagggccactgttacgatgcatgttctctgttactgcaaatttcgtcatattgttactgccaaaagtgcagtaa

SEQ ID NO: 23254 - DNA, 10800 bp, Oryza sativa
atccatttttatgtcattgttgttaaattaatttgattattgattgttgagagcctcaccaggtaaaaaggagccataaaaagatgcttgcttcacttaaatttatggatagaaataaatccaaggtcccatagacaatacaagattttatggaccaaaagcaacttttcttagcagtatgttccattaacaatggggcatgtagagtcagactcttcggggcttgatagcatcatattgaactatgacataatatctatgatataatatctgttatatgtaaacggattggatagcctactaaaattatatatttatttcttatgtttgatctatgaattgtgttcagtttcaggaagaattcaatgcaaagtttaaactgaaggccccaaattgtataataaatttaaggtggtcttgatgaaggatcaacttcattttcgagatatatggaatgcatgcagatttataatacattctcattagttcgaaactcagtactatcagattttgtatttcttcgatatttcaaaatcccctgtgctttggttgcactatgagaatttctaatttctttcattgtcatttgtatagatattcaaatgatgatagatttcttccatttttccaatgatttatttctttcttacatggatccttgtgcaatgtactctgttcgcatacagtatagttttgttttcccccttttcagcctgaatataattttcaggaagttttgattcttcattcttctatggatcgaaatgaatcggtttggctatatattgagtctgcaaaatattagattgatggaatatatattgtgaaaaacgtgcattgcacgtgcacgattactagtatatatatgtgtgtgtatgtatatatacatgtatatatgtatatgtgtgtatatatatacatgtatacatgtatatatatgtgtgtgtgtaaatttttagtgtaaatttcgatatctctcaaaaccattttacactttaaaaatatgttaattgggaagctactttaaaaaataaacatggaagcactagggatgcaagtgggtagttccgctatcttcataaaaatccgcttgctagtttattttctatatggtagtataaaatttagaagaaaaaataaatcagaagtgagataagcgggcaatcgttcttccgttttagcagataaattgcgccacgatgcattttggacatgtcgatgtccataccgctcaatgttctagaggacgacaaacatagtatttttcaaggtacagttgcacgggagcttcaccagatgaattacgacactgaacaatttgcactggtttcacgcgatcttggggggacagatcagttaattacgcctcttaataatgatttaatcaagaccacttgcattaaacataagaaagagaaaaaaaatgtatcgaacggtccaatcgagttgtagcacgtcacaccctgtttgacccgccaaaccactcttacgcatgcacacgttctgtttacggtccaatctattggttattggttattgatgattcacgttgtattccatccatactcataaaaaaagtcattaaagacaatgtgtaagttaaaccttatgaatataaattataaataattctcaagttgttgagtttgaaaatgtaaaaaatatatgtatagatttatcttgaaaaatacttttataaaagtatacatatatcacttttcaataaatatttttatagaaataagaaatcaaagttgtgttttagagaccgtgttgctattctaaacgattagtatgagtatggagggagtaattaagaaccgtttactgtatattgaactgctagtaatcaggctttgggtagcaatggactggtttcggacgtcccacggtgacattcttgatattgtgacacatgtcgcattggaggttttctgttggttgcagtgtccttgtaataatgtcttcgtcggatcggattctctgcagagtgatgacatgatatgaccaaatgacttattatatatcaattgctctccgacaatatctttcattttggttcgacgttagtcgccagatgtaataggagcgaaatttgatcgatacaggaatgagccgttgattttgaagatttttttttctggtttgagaaagattaggattgtaaaatcgtttgattcttattctgtgatgaataattggcatctgagtttattggttttaatatttggagattattagtgaagtggttttggagatgattggagttacaggtgttaaacaaggagtgctggagatttggtccagtcagaccgggcatgggttgctggtcagaccggtgtgtatctagtagccagaccgggcagcccgcggtctgaccggccgactctgtgtcggttgcggtttcgggttgtttcattggatatcattagataatttgtgtttatggcttctagatggatactatgaatatgtaatactgttgtttgctaataataagtcaagttggaaatagcttggtgtcggaatatggtttctttgtttgattcatgtgtaggtgtcttagtgcctcaggagagtattgtcgatgatggatcgggagtcaatttggagataaggtgatatccggacggtcagatatcatacgagatacttaggctaaagatcaatgcgcgtggttggtgaagattccatatggcatatgatggagatattgtgtgcgtatgggatacagagtcgaatttggtacaattggaatttgtaaagttggtttactgtataggaagatttcctaaagggattaggacttcttgtatgagtttggttcgctacctacctcatatataaatagtgagggagggtggcctcccggtatcgctttagatagcattgagttgacagaatagttagggtttcgagtttagtcgagatttttgtgaggagtgatgttgttgcactttctaaacacagagagaagtaataaagttgtcatttactttgacagatcttcaatttttgtttgctcgggttcggcggtcgtacctgcgatcagatcagcggtggtgcggcggtcagaccggtgggtcagtggcggttagaccggcgacggcgacaggaggcagaagcaattttcgggtggttagaccgggcaatctacatcggtcagaccgacggctttggcttggtcagaccggctaatctacttcggtcagaccgtaattcatcgatttgagggtaacttttagttccactaaaagttttggttttggggtactacaaccattcacccatctatggttggcttagttatcgtcgttcgatcctacaaggattacatataactattaaaactgttgtaaaaaacaacagctatgcatactctagcccaaccacttatagaaatatgtctttaagtgatattttttgtttttaattaagctgtaatttttaatttttaattcagagatatttgcccttcaaattttataataatatgccaaaataaatttcatgatgtaaaatactcgtccagattcgtaatcatcctagttacaatatttagagccggagggagtaaaagagtttggagtaagaagagaacatataattacatttgaccaatcatcatattaaaaatacaactaattattttattgtgacttatttttatatatttttaaaaaataactaattattttttatatatttttaaaagttattaaggcgtgatcgtaaacgtaaaattaaagtcaactgcgttattggaaaaccgcaagaagtattgggcaaaagtataagatcgtacattaatactgcaaattaaattaataagtacccatccatatgttagttaatatatggggccgtgcagacgtggacgaatttcgcacgctactttcttttcttgcccccaatcacacgtggtaactacaatacgtgtagatacagacaaacagtcatagagagtgatgcaatcaggcaagcgacttctccatgtgtccgaacgtcgtcacggcagatatttccatgtgttacagtagcccacctgacaatgaccagaccatagagacatgacagcatgtagtacaagagagactttctttttatatgttgaatatatttttaagataaaaacagtataactcatcgaaaactattttccaaaagtaaacctattggtcatgttacaccaccgtaataattttcggcgaacaatatgttgcctggctacaatagtcgcgtggcagccaaaagatttaattttaagtcaacatagtaccacagattacaagcctaaacaaaagcttagccaaacagttttagctttaccctaaaataggagtggagctgggtagaacgctattgcaaaataaactagagaggtggagctaagtttaggctgctacacaactccactccagatccaactcctaaaactaaatttagaagttggaactctaccaaatagcccatatgtatctaaagttttctttaaacaaagttttggaaaacaaagaaattaaacctacaggagacagattgcaattaagatacatatataacatagcagacatgtgcaattctttttatccacttggttttgtcaaggaactacgtacatgttgactggagcaagtgtactggttggagttggcgtcggctttttttttttaacatagtgggaaatgttgtctgctaattagttcactttagcttaattttgcccaataatttggggctactccatgtgggagttgctcagatgtgtgctggatttcactatatttataagaaattcattcaattggactcgatccgggtcaagtcggcatgtgactacttgtacatatacaaatggcgcgtgcacgaaacacctttgtttaatgatatcattaatttcaatttgttatttatcagtgtctggcattttccgtgctacttaattaagtagaataaattactggaccacagcatgactcaaattttaactaatcacatctgcatttttttcgcgtatattgaaaatagccagtactcttttctagaaaagagaatgatatactgtcgttagaaaaatatagaatggagttccctttgaacgatttacctctcccaagattcttgctggatcgtcacgaagaccaaggtagacttgaaaaatgtagtcgcagttttagtcaatctaaaaacaatgactagatcacgacctggaatgcagtgcagaaaatacatgaattacccatactttttcttgactttttttgttttttttcctcttatcacatgcccccatgcctcacaaatggagttacctaagagcatctttagcagaagccctcattttaaagccccaaaaaaccaaatgagggctgcccccaatttcctaggaccctacaaatgccttcaactccaccagcagcccccattttttagaccatatttattattctcttttatattaatatagactataggtttacgtctaatttaacatctcaataattaaaagataaatattttacaagatcatctcgatgtaaaagttaattatcaggtgcattatacacgaacagcacaaactatagagtatatatttaaccaaactactgaaatattatcctatatgctgtttcaaagaaaaaaattgaatatataccactgtctctctccttaatcctgtatgtctcgacccaaagaaaaaaatattgtctttccactggaatcctctatgcctctgtaaaaaaaatgcaaagaaaaatctactccctgcattctgcgtgcagggacattgcaggggcaagcagacaggcagaagagggacaggcggatgaaaaagcaaggggatgggctggtgggcaggcgctagccctccggccggcagcgccgccagcgcgagcaggaggtgcgcgcgggttggcaggcaaaagagctaaaatcagtgcggtgattcaccggcgtgcgagcggatggcggacctatctggggtgatcttgccagcggtgaggggtcaacgactgaaatttttacaatttggtcctttttaaaaacttattttacaaatagactcctaggaaaacttaaaccagaaatggtcctttttgggacgccagagtggctggtacagtaccctaacatgcgggcgccagccacactggcgccgtgcccgtgccaccgtggcactagggctgtcgtggaggtgctgactaggcagaatgggggcgccagccacactggcgccgcccctcataccacggcgccagcatggctggcgcgccctcctctgtgggccgacccttaaaccccgtgggccccaccacctttctcctccccactcccattttcgccaagtcccagcccgagcagcagcgcaggagttcttcccctctctctccccctcacctctccacctcaaatccaatcaatttgaagccgtttttcacgggattttttgtggaaatcgaagagaaaggtagactccttcattcccccttttttttcgtttttattggttgaatttgtagatcggtgggtaaccctagaaccccttttttacccaaatttatgatttttagcatttgttcttaggattggcttgttgtagtgctatatgtttgcaatgtactcattggtgtcatgatttttttaaccatatatgtggtaatgttaatttttggatggtttggttggatggatggatgaaaaattatggttgaggcatgacggaggtttgggttgtatgacggagtatttgtaatatttcgatgtgtaatgcactagtaaacttgttgatagttgtaggtggattaaatatttttttggagtagtagctttgggacaatttaagttatgcattggttataatatgtcggtttggactacgtttaggaatgaagatttaatttttgttgcaaagttacatttgattttttggtgtagatggatagacttgttcgtgtttactacggtggtagagtggtggaaccttatgttggtgcacatgttgagtttgaggatatgtcattgaagaccattttgtttcccacccacccaactctagatgaactaaggtcacgagtgaaagaagttcttggatggaccgaggataatgtggagattcgtttttatgggagatacgatgttggtcaagggcataagtatatattaaatgtgataggtcagttggaatgggaagtttactttgatttggtaaaagagtctcagtttagatctctagaggtgtttgcatcaaagttagttcgtaccgtagaaaatttggatctaaacaaatctccttcttatcattacgtttagaagaattttgtgacatattattctcgtcgtggagggggtgcaagtaagagtgagttggtacgagaagacttggagggtgaaggagagaagaagagacctttgcttggaaatgatttatgggaggcaggaccatcaaagagatattgcggtactgatgatgtggatgcagcgagggtgatgaaaagggagttagtacaagaggggcttgatctaagtgaacatttgtcggcgagtgttcattggtcgtcgtacggagtcaaccctgaatacccgacagaagtagcaggccaatatgtgaatccagatgattacttttatgtcgaattgagtggtggtcacgattctgtctctgtagaagtcaatagagatgatgttgacgaggaggcaagtgttgagcaatatgatgttgaacttgctgaagactctgatgatgaccgtccattccctccacttactaataatgacaagttagcattagaggaatgtcgtgcgtttgagaaggtgtttgggaggaagccggacattcctgagtttagggacctaacacatgcccatggtgcactactagatggcggcatcaacctagatcagttgctagaaccattccaggtggatggtctcagaaagggtttagagttcccatccatggtcgcattgaagctatggctccaggagtacgccatcgtgcaccatcgtccataccgtgttgtcaattctgccgcaaataggaggtacactattaaatgtgaaaacccacggtgcaaatggaaggtccatgcaactaagaggtctagtggcacgtggaggatatcacgggtaggtaagaaacatagttgtgctactgccgaaggttcagggagccaccggcagctgacatcaaagttcatagcaaataggttattcaatgccataaaactgcaacctacactctctgcttctgcgttagctttgtatatatttgaggttttccagtatagggtgaagtatggcaaggcttggagggcacgagaggaggctatgaagctcatttacggtgaatggggtgaagcgtatgttcgtttgcccactttgctgcaagccattaagcagaggaatcccagtatgatctaccacatcgatactcatcctgacagggttgtcaacgttgatgttgtgaccaagaaaatttttatgcgtgcattctggtgctttggtccttccattgaggcttttaagcattgtaggccagtactagctatagatgcaaccttcctaactgggaaatacggtggtgccttgatgactgcattatcagctgatgcggaggaccaacttgtacctttagcttttgccttggtggaaaaagagaattcacgagactggtgctagtttatcgatcttgtccgacgggttgtggttgggccgcatagggaggtttgtattatctcagatcgacatgctggtataatgaatgccatgacgactcctattccaggattgccaccggttcaccaccggtggtgcatgaggcacttcagtgctaatttccacaaggccggtgcggacaagtatcagacaaaagagctcctaaggatatgtcagattgacgagaagtggatatttgagagggatgttgaggcactaaggcagcgtattcccgaaggtcctcgtaaatggcttgaagatgagttgttggataaagataagtggtctcgtgcatacgatagaaatggccgccggtggggttacatgacaaccaacatggccgaacagttcaatagcgtgctagttggtgttcataagcttccagtgacggccatagtatcatttacgttcatgaagtgcaatgactactttgtgaacagacatgatgaagctttgaagcgagtccagttagggcagcgttggtccaccaaggttgatagtaagatgaaggtgcaaaaaagtaaggcgaacaaacacactgcaaggtgttttgataagcagaaaaagacatacgaggtcacagagaggggtggtataacgcgtggcggtgttagattcggcgcaagagccttcaaagttgaaggtgaggggaactcatgttcttgccaaaggccattgctctaccatatgccttgctcacatcttatacacgtttatatgattcatgcaattgatgaggaatctcccaaccgaatgccgtatcagttctcttcaagagccgttgtgaacacatgggcaagtcgctttgagccatacctcgaccccacacagtggccaccgtacgatggtgaagaatttgttgctgacccaaatttgaagattaaaacaagagggaagaggagatcgaaacgattcaagaacgaaatggactcgggtctgggtggttctggaaggaaaccaccttcatgcgttcaacttgatgctgcgccggtgcaaaatgatgctcgttgtgtcaccaggagggtcacaagaaaactaagtgtcctacgcgtccaaaaaagaagaagtccaaaaaaaatataagtgttagggaggtaaatattttgttttcctactcatgctctcgcattcattttcttttaatatatgtcacattggtaactaacggtgaatttattactttttcatgtaggatggccaaggagggacaaccgccgacttacccagccttggaggcgtactacgaggcccgtcatcgcggggctgtgatcgaggcggggagggtatgaatcggcattgattcacttgtgcataagtatcggtagcgtgtatttgacattatattaactaattgatttacaattgctaatgcaggtacttcaaccgctccgagtcagagctcatgcccccccagtgttcgacgataggtagatcccgtacctaagggctgccgggttgctcggggtggccttggtcgtgagcagaggaatgccagtgttcaacgctcctgcgttgacagcacttgtggacagatggaggcctgagacacacagcttccacctccccagtggtgagatgaccatcactctacaggatgtggctatgatcttggccctcccattacaggggcatgccgtgacgggcaggacagagactcctggatggcatgcacaagtgcagcagctgtttggcattccactgaacattgagcaggggcaaggggggaagaagaagcagaatggaatacccttgtcttggctgagtcagaacttctcacatcttgacgacgatgctgagccatagcgtgttgagtgttatgcccgtgcatacatcttgcacttgttgggaggggttctgtttcctgatgctgggggtgacattgcttcggcgatatggattcctttggttgccaaccttggtgatctgggccgtttcagttggggctcagcagtgttggcgtggacatatagacagctctgtgaggcctgttgtcgtcaggcaccatcatccaacatgagtggttgtgtgctattgactcagatgtggatgtggttaagactaccggttggaaggcctaagtggagg

SEQ ID NO: 23255 - DNA, 1586 bp, Oryza sativa
acaaatgaggcttcaagcctgaccctgaactcgatgtgcaatcgagactctgactatttcatgtactagtgcccattgatttgtttctgggcagttgagtaccaccttccgcaccgtgtcatgcgacagttcgggaagaaacaagattggccggttgaggacatctcaactggagttgaattacacaagtaaatatttcttatctttgtttgctttcattgtcaatgttcaattttgtaccatttaacccttgtcgatgctcactattgtttcatcaccttctacttgtctaggtatgacagggtgagaacaaagaaggtgaaagactgggggctagagcataatagatacattgatgaatggaggacagccggaaggaacgacaggtacatcgagactatacaccaaaatcatcttttctcagagtaccttcgttggctgcataggacatatagactgttcctccgccctacttggacggaagccgacatagaggatgaccgcgactccgatgaggggcggaatccctatgatgtccgaactagagttggatatcaaatggagcacgccccacttagagacagagtcgtaagttttcttgcatttgtcaaaattatttccatttgcaccctagaccctaacatatatcttctcacgctttcagtcgagagagctcctcaggagtgtgaatgaaatggggcataccctccaagctccgaggggtggtgaggacacggagaacacactccgcaatgttttagaggtaaaatttatttagcactttgtattacttgagttatgcctaacaaacttctttttttttgaaatgcagaaagttcgtcaaaggtgccggaaacttgcagcaagattaggttgcaggtcggttggattggacgacgtgtaccaaccggggagactaccaccaccactacctcaatccgcgcgtccaagtatcgctcgacactccatcaggatagaagagcgtgaaggagttggtggctcgtcgtcgtcacgcattaagcaagggaggggaaaggggaaggcgccggctccacctagcgacgacgatgacgacgaggacgaggaggatgaggactacgtcgcaccagacgccgaggagatagacatgtcacagcttcccgacgcgcctcaggggacgcaacccacgcaatacaacttgcgatccactcgggcagcgaaaaagaggtaaaatgagcttaccattctcaaatgttatttgatttcccttattttgtttttaaaatgttttaaacattggattttcaaatgtaggtacactccggtctcgcaagcaattcggcgccaacggaagaagtaatttgtatgaagttaatctattggttggtagtatgacatatgtggtgcactatgtgatataaaatgtgatggactatgtgaggactatgtaatggacttttgacattgtttcatgtgtggaatataggatggacttttggcattgtttgatgtgtgggatatgtgatggactttttgcattgtttgatgtgtggaatatgtgatggcctatgtgaggactatgtgatggacttttggcattgtgattt

SEQ ID NO: 23256 - DNA, 20236 bp, Oryza sativa
cttagatctcatagttattgctgacgttgcatataataaataattctgaatttctaatgtcaatggttgataatcgtaatatggatgacatcgtgaatgagaaaaatcttgtcagtctgatatttcgcatgctccagaagatgctaaataatccaacttttcatgaaaacgccacgagttgaaaattattttaggcgtgcacgccttccttttgttcactgtcagaagcaacaagtgacaaataagttcatacaagatctgtccatttttcttgttgaaaataggagaaaggacgtaccatgtctcgttcattgctgcggaatttggcgtgttcgttttccaatagtttttcagtcaaagtatgtcccatggaggcattatttatctttgacaaaattcaagttcatttctctatcaaccgaaaggacagaaaaaaagttgctccagctgggagttctctgtttacaaggtcttcacaaatcttcaacaaaattctctgcttaaatttatcaacaaaatagcaatctctgttttgaaaaagttgcactagatgcaatagtaggagttagaagtcccattttgcagtaaaaaaaatcatgaatttcttaggttgcatctaagcatgggcggcctgaaatgtttgtgcaggcaaagagatgggcatcactgacttcatcaactcgaaggcatctggcaagcctgtccacgaggtacaaataatttggccgcttacataaccacactgaacttcgttttcctatgttggcaatttaaacatttttcaaaacattgtcctgatattttatatttaggttatcatggagatgacagatggcggtgtcgactacagcttcgagtgcaccggcatcaccgatgttctacgggaggccttcgtttccacacatgatgtaagcggtgaaaatatccggtgtttttaccgctctttgaaaaactatacaaatagttatgaaaaaatttgcgttgtttcattaaaactaaacctgtattctgaatgaaatggaattcagggatggggcctgaccgttgtgctggggatccatgcaacgcccaggatgctgccgctgcatccaatggagttatttgacggccgtcggatcactggctgcgtttttggtgacttcaagggaaagtcccagctgcctgaaatcgtggagaagtgcatgcagggtgtaagtaccgaaattgttttgaccaatttcattgagtcagattaatgcaaatgtttaatggatggtaattttgattctgtaacaggagattaacataaattttgatgggttcataacacaagagttgcccttcgccgacatcaacaaagctttccagctgctggaagaggggaagtcactcagatgtctgctccatgtctgatgaaacttgtggattgtaaatttgaatacacaataaatgaatcataaatgttttcgcggtttcaaggtgtataattttcatatgcatgtatgttttgtacataaaatgggttgaacttcgttaaagaaaagacaaattgttaattagtagaatgcagtattaatatttgtaacaggtgagtgtgggtgtgcagtcgcgagaattgagcacacgattggttacatacatgctcgagttgctagtcagtagggccacacaccatttttatctattacatacgagttacagtctaattttattatagttacatataaatgttctctaccaaaaaaactgtctgaatgttgatatttgtaatagagttagcacaggtttcttctgtatactattatcatggtttcctacacaataattgtaaaatgttcttttgaatttagggatctccattgcttgtgtccgttttacatttgcaaagatctcaaatatggatgagaactttcaaaccgaacaacaatttcagtttgaaagaaataaaacatgtagtagtagaaattacaatacagcgtccaattgcagaaacgattccaaagtgcacagagcgtctgtgcacataggccggtttaggccgctagcgctacactgtcaactgcagcttgggcctcctagggctgggccttcgtacttttctgatcttagactgttggaagaagtccactttaagtccctcaaataagggtatggtttaaatctcatcctccaaccgtaaaatcaaatatatttcataccttcaatttttaaaactagtataaataaattgagtcattattcgatagttttgaatggcagtattgatcgacatggtgcttacatgatgtattgatccgaacatcattgtaagtggcacttattttgggatgagtctataggtcgggcgtccgatcggtttggagaaaaatcggacactgacgtcagcataacgtcaacgcccgatttatatgcaaaactattttaaactgatttttctcttaaattacttatccaaatcatgatccgattgcaccattaaattcgttgcaattaaatcttcaaaacaggaccacatatggatatattccgatgaaatttttttagcttattattgagttatttttaaatattgcatgatgttccaccaggtatatcggaattgtttcactaagtagatcgaaaatgtttcacttgtttaaatcgggtgttgtttcaccttatataaaaacaatgttttagcaaataggaaaaaaatgtttcagttcaatgcaacatttgatccatacatagtgaaatattttttggtggaacaaaaaataaaacgaattcccttaatagggggtttccaaaatatgtgggttttttttgttgcaatggaatatttcagttcattgcaacattagatctatacatagtgaaacattatgagtacactaggtgaaacatttttagtggaacaaaaaataaaccaaattatcttaatagagggtttctaaaatatgtgggttatttgttgcaatggaatatctggtggagacacgtggcaggtgggaacagagatcttggtggggcctaggatactgcatgcacgtgcgtgggaggcggggccatggggggagcgcccaattttttgcaacccccgtcggtcgaccgacgaagagcattatcgcttattttgtgcaaaaataaaattgagaccgacgtgtcattagtatttccttctttgtcccccataagtggtgaagcaggatctagacatgggggactaacttatgaggtactacctccatatgttaatgtatgacgctgttgttttttttttaacgtttgaccattcgttttattcaaaaaaaattatatgattgttagttattttattgtgacttgattcattatcaaatgttctttaaacttgacataaatatttttatatttatataaattttttaaataaaacgaatggtcaaacgttggtcacaaagtcaactgcgtcatgcattaaaatacgaagggagtattacttaaataaatatatcaagacaatccacaaaaatttaggactgattgtgtattagagtaatttttttcttgtgcaactttcacgatgttggcatgatatttttagaataaggtagcaatatttctatacgtatctcttctttcttctttctatatatagttggtacccactagctataaagctgctctgaggatgagccacgtcaccctaattagctgagaccgttagatcttaaatcaacgcttcaagactgcacatggcaccaccatctacaccaattaggcccatgtaagcaggttcacctaaacagccttccactttcccgtcgttggcccactgttattaaaatccagcacgtttgaatctctactttgcatcatcaaaaccacttgaaagagcaattacaacaaaaaaaaacccgtcatcactgacatgaagatcaaaggtcgtccttaattccatttattgatccccaatctcctcctaagcttctctcaattcatcattaccgtccacctcgacggatgcaatacgtagattaccaatctattaagtctgtcctaaaataattttagtgggcctcatactaactcctatgataattatgttcatgcacatatcgttgctttaatttgccttcctaacattcgtcttaatcaagtttatgccttaattagcactaccaataaaatgaaccgttacacatattcatcgattgaaattttttccgtgacttctcctttcatcttcccttttgatgtccccatttatatttctgtccataacatataaaatgtcttagccatcccagaacaattcatcgtgaaaccttttgctagccagcaatgcaatagctggtgaccttttctactttgttttcgcgatgtattgttctttctactaaattaagttaccatcacaggcttcaaatgtattgttctttctactaaagttaccatcacaggcttcaaatcactgatggttttgttgatatcattcgctcactgccaattaatgccaggctaccgtgtttgctcctcatatggtgcgtaaattatggttacaactccattcaaatactcatgctactgttttgtcccctcctcatgtgttctttgtttctttcctctcaccatgatatgacacacttaaatttttctaatgcattactctttctagcattcttcatatgcttattcactactaccaataaaatgaattttttagttatttatcgagtattaattataattcctattttttctaaaaggcttgaaaggcctaagtttataagcattgaagtgatgaatttcatcaatcttcctttctaatgatctggcccaaaccaacagcacttggaaacatgaatttttctaagttttttgaaaaagttgaaagatgtatttaaatcaagttgcatctaacgctgaagtgatgcacaaattttagaacaatatatatttacgtatatatataagcagtcaaatgcatcttgcacctaacattttctatttatcatagagaaagtcccgcagcaacgcgcgcggagtctctcactagtatagcagatgagctaggcataaaacaacaatccgttttcccctcttcatcatagtctattatattggcaggcaaaagttctagaatttccatggtttttctttcacacatttaatttagaaattcgtaaaaaacgtagtaactactacctccgtttaggttataagactttgcccacattcatatagatgttaatgaatctagatacacatatatatatttctagattcattgacatatatataaataaatatgggtaatgctagaaattaagtcctataatataaaatataaaatagaggaagtatatacgtctcaatctcatcatcactaacgctgcatgataatcatcgttggagggggccgggccgcttcgcccctgctgtctcccatctcctatctctgtcggtgacggtggcagaggttgcggaggagaagcgcgcggacatgctgaggcagatgaccaccccgggcagaatctcctcgttgctcgatcgcctccggccgctgcatcagccagcccccgcacccgtatctttaccgaggccatcaagtgctctctaacatcatgctcttcatcaattatacagtatatatcgctgcatcacctgaagctagaaaacgaagctgaagcagcagtcagcagagatgaagtactcgctcacctgaagctgaggctgagcccgtaggacagagagcgaattgaagaagcgagcacgagaatggaggaaaggaaaagaaaggaaaggaagaagtaggaattgcacgagaagcccaagcaacaagaattgaaattgaagtgcctagtaaataggaattgcatttgctcaaaaggaatgcatatttatgcatttagattgaaccaatccatttccatataagacagcctagtgctatgctaaagtagtacaaataaataaataaagggaatatatccatacatacacaaaaaaaagggattaagtgctgacctagttgtgttgcttaactaaacacaataaatttgaatctttaaaatctggcctccttatttgttcgacctacacaaaggggaccaaccgattagctcaccaacatactatcacaaaaatgttcaggataagtaagaacttaactgggtttgcaagataaacactggtcattgattcatggcgtaagtcaagaagtaattaacatattttttatttagaacccacaatcgataaactgtgaaatggaagagaaaaaattatgcattccctgtaaaatcaaaggtgtttttgattattattctgtgatgaactaaaatcaaatgtgtttttgattattattctgtgatgaacaattggtgtcggagattattggttttgttatttggaatttattcacgaagtggtttcggagatgattggatttacaagtgaattacaggtactgttattttatgtgaccggtcagaccgggcatgtgctgccggtcagaccggcgtgtattgcgcggtcagaccggtgcaacctgtggtctgaccggccgactctgtgtcggtttcggtttcgggttgtttgtttggatgtccgtaattatttcatgattatggcttctagatggatactatacgtatgtaatactgttgtttgctactaatgagtcaagttggagataggttggtctcggaatatggtttctttgtttatttcatgtgtaggtgactcaatgcctcgggagagtatttgcggtgatggaccgggagtcagcttggggataagacgacgtccgtggtggtcagagatcatgtgggatacttaggctagagttgatgcacgtggttgatggagattccatatggcacacgatggaggtattgtgtgcgtatgggatgcggagtcgaatttggaaggagtccaaatttggtatgattggttatgcaaagtttgtgtcttgtactagagagtttcctaaggtgtttaggactcctagtatgagtttggttcgtggctttaagctgcctacctttgtataaatagagggggagcgtgaggcttcccggtatcgctttagagagcaattgagttgagttttgagtttagtcgaaattttttgtaaggagtgctgttggtgcactttgtaaacatagagagaatcaataaagtcgtcatctactttaagagttcttcgatttgtgtttaccgggtttcggcggtctaaccggcgatctaccggcggtcagaccggcgggaacacggcagtcagacctgcggcggcgacaggcgcggcaggtgacatcgatggtcagaccggagattcaacaccggtcagaccggcggctacgcttcggtcagaccggctaatctactccggtcagactgatctccatcgatttcgagggtaacttttatttccgctaaaagtttttggtttttgggtataccaaccattcatcctccttctggttggcttagttcttgtgtttcgattctacgctccccatactcttggcctcttcggatcaaatggcgttggctctgttcagctacatgcatatgattagtgaaaaatctggaagaattaagagagattttggaggagaataaatggcattaaccatggcccatggcctctcatctccttattcttagcgacggtttcttaggctgctaccatcgtatatttctacagagggaggtttttgcactgttcgatatctcacccggagatcttctcatccaatgttcatatgcgatctcatccactgatcaaacagctgataattaatgatgacgtggaacactgaggtttcagctttgggtcccaactttacagaaagaagggattggcatattacaaacttcatgtctaaatacttggactgcacactaagaatatgaactgtgcataaagcagtggtgataactaatacggctgaattatgcattctttgtcctcatgtttcctgatgctgcatgcacttcgtgatcaccgatcaactgctttcctgagcaattgaaccccagattctagactgaccaaatgggggtagtactataaacatgtgtacatcgcctggtcttattccttcccctgccttgcagcaacaagattggaataatcttaaccagctgctgctgcaaattcctttacaaaagcaactaactcacaaacctctttaattattccaagtggtgcatggcccaagcaaaggtgatcacctcctcctcacacagtttaacattctgcagtccgtaagacctataaaaaggccccttctataacacagctaagcccacacaagatcaagagctggtagtagtactcttaccctcttgcattagccttttccttcatcatacaatttatcttgagaaatcaagctgtacctccacaagttgacatgtcgacggtgacctcgtgcaccttcctgagcatccgccccacggtgagctctgctggcagtctcttatccaagaaaccggcagcgtttgtttcccttgcgtcggagaggaaatctaggcctctttcgccgtgcttcgcaattagctccaacaaaccaggggacccaaaaatagatgtgtcgccattcagcatttcacccgttggtgagttatttgtcacattgtcattgcaccatgaatggcacacttttatttatttatgcctttcgaaagaattacgtttacacactatataccattacttcctatgtctgcaaatataatatatgtttagtttttgtgttatgaggtttataaagttattggaatgcatggtattttctcaccctgaaaaaacttaatgccgttatgacatggaatgatcttcaaggacaatattcaaatagttatttctgataaatcggcagaaaacatttagtaagaattatcactagtttatttatttgaagtgatatctgtagtcttattacaacaaaaaaaatgtgttataagtttccctcaatagtttaccttgttgggttgaatatgattttttaaattaaagaaaatatgtattttagactatgttttaagatacttaaaacaaaaaaagctaagatatggaggcataaaaatacaaatatctaataagaactgcaactaagaacccataaaaattggaactgctgttttaggctaggatgcatggcactattgtgtaagtttggattcatggccaactcatagatgtattaattagaaagtccattaaccagttcacaaatcaattaatgacaaaactatatatatttgctgtaaacaacacatacgcaacacatgaagggaaaaaagggaatgaattatccattaatttggttatttgatttccaaatgcatgtgaagttctggtgaacccggtgccggtggacggcgagcggtggcaggtggcggagaacaaagatgaagtgagcctgtggttcgacgtgccggggctttctccggcagatctgatcgtcgagatcgacgaggacgtgctcgtcatcaagaagaagaagaaggcgagcccaaagagcaactacaatactcctacttccggtgccattgcagatcatcaggaggccaccgccgacgagttcagcggcggcgggatctacgcgcggctgctcctcccggcggggtacagtagagagggtgtccaggcaaagctcacctccggcgagctgaagctcaccattggcaaggtcaaggagagtgtccgcaggaagatcaatgtcgatatctctgtcaagtagaattcagtgagcttccatggaattcatatatggtcatctgtgatgaaggatcggagcaacggtgcaagttatatcttgcctaagattctagctcatatatatcaataactggtccatgatctgatctctctctctctatgtatacatcctttgctgttttcctaaggttgagtatgcttatgtatgcaagctttattccggctgcatccaaataaataaaatgatcatctttgttgtgctttcacttgtgcctgcatgcatgtgtgatgtattccctggtagatattctaaaaaaaaaattctatgaacatctctggtatacatctccttagaataactactctacacccccctctcccataggtcaatcccatcgcccccacccttcctagggtccaaatccccccttccacctcagtcaaagaatagtcaaagcctcctcccgctggtcaaacccgagacaaacccgcccattgactccctcccccgcctaccactttgtgttacgtctcgcaggaattccgcagtaacataacggtcatcgtttagtaacaggacaactttctcgtagtaacaacatcgaaaaatagtcatgatagatctagttttgttaagcactttttttcaaacatcatggtgcagatggattagaaaaattatatataacatgagagatattgctctctaaagattgaggtttactttttttaagttctcgtctcgctggaacggcgtagtaacgcgacggccaatgtgtagtaacacgactactttctacagtaacagcgttataaaatagtcatggtggatctagtttcgttaagtattttttgtctcaatcattgtgtagtaacaggactattgtctcgttgtaatgtcgttttaaagcattatggtgaaagcgattctaaaaataatatgcgatgtgagagatattattggttaaagattagaattccaaaagtatacttatactaagcttgctattatgtatctttgtatggacaaagagaagtactttttaacacttgtatttttcataagattgagatttaaaaatttagctatacacaagtagtggtactatagtattaccgttaatatcatatgttctctgttactacaatttcatctcaatgctactgcaaaacgtacagtaacgacctataaatttcacagtaatgacctatacatttcacagtaacatatcgtgttactgcacttctgcgataatgttactaccgaatcatagtaaaaaagtatgattcctacagtaacataacgggtttgtgttcacaaaatttgaacaaatatataaagaaagcaaacaatgatctcaaatcacatagtgtcatagaggtgaataggttagtagagtttgttatgaaccatgagatcatgggttctagtcttgaattcatcaatttatttttaatttttctataaaatagaagggaaaatggttctagtcttgaattcatcaatttatttttaatttttctataaaatagaaggaaaaatggcagatgggagagaaaaaacgaataaaagaaaaaagaaagtagaggagtgcgctaggagaagaaaaagcgaataaaagaaaaaaaagtagaggagtgcgccaggagaagaaaaggcgaaaaaaaaagagggaggaggggggcaatggagagagagagatcggggaggaggaggaggagtaggggaaggcggggccgtgcccgggagggcgggatgggcttagtagttgggctgggaaggaggggtgggggtgtagaatatatatatccgtggagccccccccccccccccgcgccccagctccatgcccttttgctgcggccgccgcaggtaacgccatccaacgagctccatgcctctcccctacagcccagtcaggtgcttgagactgatccctcataccataagcttcatgaggagagctgcggtggagctccgctgtctaagctcgagctccactggcctccgcatttgcctcagcctaattctagactggaaaaggcagcagacaatggcaaccaagcggtgaagatggtgcagctttgagcaagctcgagttggatgcggagatgacacggacaatgacaaactcgaagtggtggaggcccagcggcctcggctcttccatcgagcttgtcgtgggctcgaggcctcgccaccggcactcatcttcttcgaccttggcaagggggcggcaggtgctgggtctagggtggtggcggagctagggacagtagaggccttgtggaggagagaatcgaagagccgcaccttggtctcgtactctcgtagatgttggggaggagagactcccaaatttcaaccagccgccactagacccagatgcagtggggtttgtccacgtccatcaatccttgatagagcttgttggtgaaccttcttttctgtgctcgatgacccctcttctctaacctcgccactcatcgctagtccccctcttctctgacctcagccaatggggcaggctctgcgtcgagctagccgccaacctcgtgcttctcccgagcacgacaaagggggtgagctccgcatcaatctcgacgccgaccttgtcatggccgccgccccctcttctctcaagcatgcgagatctccatggccgcctcaagctcggcgagggtgaaggaggaagaaaacaccatgacaggcagggaccgctgacatggcatcctggggtgtaccaaaaccagggtaaaaaccactctggggtgtaaagtgaatgttattgaaagtcatagtatgtgaaatatccaattttagagttttgggtgtattttagacaaaacgaagaattgaagggtgtaaaatggacttatccctatttataacaaggtgcaatttctttcgcacttattgtggcacattgcatatatggacattacattgatgagtttacgagttagcctaatatcaaaagattattccaagtcatctaaggacaatcatattttggtttattgtgaactactaaatgccttttcttttgttcgccctttctttttcagcatatcatttcaaaaccgtaatctgtgtaataccatcctgcagtaagacgtgggaccggcatcatctagttagatacatataacacttccacctagacattactcaggtatctaaatagaaattctagtgttggctactttagatatgttgaaacttgatttatttttgcacaacttaatttcaactatatataaagatagaacttaattaattaacttggtcaagacaacttcgtgctagttaattaagttaacttggtcaagacaacttcgtggcaactataattaaggaataagccaaacggacatatttgctaacgaaaaataatttgtgaataaaacttttatatacgtatttttagagatctaaaagaaaatgctggaaaataaacttcaatgaaaaaaccccaaaatcaacttgaaatttaagattgaaaatttaaattttagctggtaagcataagcatatgtgaagagatgaggctagtagtttctctgtggggccgattgcattatattgccattagggcgcttgtgttatttgtcagtttaccatctcagttttcttattttcacagattccactggttttcttctagtgttgtcagttgtcaaaatgccactacgattccagtttcaacgccattaacaagggaacaatcttcgactgtatccgtgaccaaaaatacccctcaacaaaatattataaaagttttaaaaaaacattatcctatttgagttgtgaaacttgaagccggataagaggaaaacaaacagaaataagtattttgggagcccatgaattgtggaatcatcgagatgcactctcgagatctgataaacattaatttggttttggattaattggttcatcatgaccattacgacaattagtacctcagttttttaatcgagttacaatttcgactactaacgcagcatgatgatgagtagcatctcctcctcgtgaagaaaggaaaaagagtaaaagaaaaaaggagaaaaaaagaaacactcatggccgacactgatagaacacgtcaaactgttgctcgtacgtactacaaggcacagataatgcagcatccactgatccaccggagaataatgctttacgtaccaaagcagcttcccggcctggtatctacagcccttcgatctgaatttttcctctctttaattataccctgctaacccgaccaagcaaagtgcccaaaatgaccaacacttcagtcctagctgcttttcctttctctctatatataaactctcgcttattagcttccctgtactcagtattaatcagcaacaaatggcttcagatcactagaccagagtgaagagagaaggcatgtactacagctaacccattatacatttcgatctcctcctatacatatgatgatatatatatttgattcttgacttgttaattacttttctttctatgctatagcgcgtgtgtgttgattgtcgtaatgtcgatggttgtggcctcttacgctccggcgagccggtcgccggtgacgcgggcgtcctccggcgcacggcgggttagccatacacagtcatggaggccgccgccgccgccgttcttcccggcttccgccgccgtcaagtgcaggcggcctactcttccggtggcacgttctgttggcccgccggagaaacatcgccctgtgctcaacattcctcccaccggtagtgactctccttcaattcacttctctgtttttttttgttcttctcagctttgattttctcttttctaactgtggctaatatacctagaaatcaaaatgaattcaacaaattaattgcaataaaacttaaggcccctttgattcaaagaaaatttataggaattttagaggattttatttctataagaacttttcctacatagccctttagccctttgaatcaaagaaattgatcctatggaatcctatgaaattcctatgtaatgtgtcttcttattcaaattttggagaaaatttaacatgaggtagaacctcatggaaaaaaatatttgagtctttatctctcctcaagttctcatattttcatgcagttcaatcaaacggttattcctaattaagtttttcgtgtgttttgtatttctctgttttacactattcctgtcagaattctatatttttcctattacttcgtttttttcattccagtgattcaaaggggtttttaatgtgataatatgtgatccaattcagctctactgtaccaagtcccgccaccggaggggaaagaacggtgggaaatcaaggatgacgagggcaacgtccagctgtggttgcaggtgcccggcctgacggaggacgacctggagatcaccaccaccgacgaattgctcgagatcaagcgtaaggccggtcgcggcgacccgcggcggctcgacgacgtccaaggcgttggctccttccatctccggttgctcctgaccaaggagtttgtcagcagccaggtgacagccgagctgaaggccggcatgctggaggtgaccatccccaagaacacaaacctgcgtcgcaccgtagtcaggatagggcagcaatcacagtctccagctgcagttagaactgcgcagccgaaggtcgtcgatcctcctcctgccaattcgccaccgaagaataataatcttgtgagaaacacaagtgtgcagtcgaggattgatcctcctgcgagagagtcgccgaagaatgatcttggagtaggtatcagtgttcaaccgaatgattctcctgcgagagagccacccaagaacaatcttgccggaggtagaaatgtgccaacgaaggatgatcctcctgcaagggagctaccgaagaataatttggccggaggtagaaatgtgccaccgaaggatgatcctcctgcgagagaaccaccaaagaataatcttgccggaggtagaaatgtggcacccaaggatgatcctcctgccaatgaggcaccaaggaataatcttgcaggaggtacaggtgtgccgacgaaggatcctcctagaaatgccaatgagccgccaaagaatcctcctggtacccgtgaagccaacctaggatgagcaaattaaccgtggtgggcatgtgagaataaagattagaatagattaaaccccatgagaggagagaagatatgtttatgtacatggttgtcatgctcagaggggcaattttcactgcacgcagttggttcactttaatttttatgaaataaagttatttgatcgatatgatttgctatggtcgaccatttaccgtttcagtgatggtgtaatgtcccagatatccacataataaccgttagagtgcgcaacctggcccaccaccgtgggccacccaagtcacattgggtctgctgctccactatatgcccaaccggagccataactttaggtcctgggcctacacaacccaaaagactagtctgataggtgagaaccgcccccaccttttaagtcgtgctcctccatcatcaattaccgatgtgggactaaacccaacaataactatagtgcaagaatatcaaaattcaaacatgaaaaccctgctaagatgaagaagagaaaatgacatagggcaaatgagtaggggtcccggagacaatccagatttacggaatcgaagagtggctcattgagtcatacgatctccatcgtgtaaaatcaaagtgtttttcattctttattttgtgatgaacaattggcatctgtgattattggttttgatattggagattattggcgaagtggttttggagatgattgatttttcaggtgatgaacagggttactgtttttgttgggtccggttaaactgggcaggtgctgccagtcagaccggcatgtatcgcgcggtcagaccggctcagcccgcggtctgactggccgactctgtgtcggtttcggtttcgggttgtttgtttggatatccgtgattgtttcatgtttatggcttctagatggatactatgcatatgtaatactgttctttgctagtaatgagtcaagttggagatagcttggcctcggaatatggtttctttgtttgattcatgtgtaggtgacttagatgcctcgggagagtattgtcggtgatggatcgggagttgacttggggataaggcaatgttcgtgacagtcagatatcatgtaagatacttaggctagaggtcaatgcatgtggttggtgaagattccatatggcatacgatggaggtattgtgtgcgtatgggatgcggagtcgaatttacaaggagtccaaatttggtatgattggagtttgtaaagtttgtttcttgtacgggaaggtttcctaggtggattaggacttctagtatgagtttggttcgtggcattaggctgcctacatcatgtataaatagagagagagcatgaggtttcccggtatcgcttttgagagcattgagttgaaagtttagttagggtttcgagtttaatcgagattttcatgaggagtgctgttgttacactttgtaaacataaagagaagtaataaagttgtcatctactttgagagttcttcgatttgtgttttctcgggttcggcggtctaaccggcgaaacaccggcggtcagaccggcggcattgtggtggtcagaccggcggcgtacttacggtctgaccgtcgacgacatcaggcgacttcaggaggcagggtttgatctcagcggttcgactgatattactacctcggttagaccgacgatctccaggcggtcagaccagtgcgactacttcggtcagaccgcgatgcgttgaatttgagggtaacatttaattccgcaaaaagtttgggtttttgggtataccaaccatttaaccccctctggttggcttagttcttgtgtttcgatcctacaagtgatatcagagccttgttttcttctttagattttaaccgatctagagtttttgccatggctaataagtttataactaagccccatgttttcgatggaacggattttccttattggtgtagtaagatgcaatcttacattatggctaaggatcttgatatttggaaaaaagtttctaatccttatgtgattcctgatcaaattaatactgctgctttaaaactgaatttgaaaataattgcaaagctcacaatattcttttgagtgggatttctcgttcggattttgatcgtgtttctcatcttcaaaccgccaatgagatttcgattgctttgagaaattttcatcaaggaactaccaatattaaagaacttcatcgagatcttttcaaaaaggagtacataaaatttgagatgaaacatgagaagctttggatgactatctttctaggttcaacaaaattttgagtgatcttagatctgttgattcttcttatgatataaattacacacaatctaaggtttctcgtcattttttgaatggtcttgacatgtctatttgggagatgaaagttacatcaattcaagagtctgttgatatgtctacgttgactttggattcgctttacacaaaactcaaaacacatgagatgaatattctttctcgtaaagttgattctaattctagtgctttggtttcttcttcgaattctttgaatgttggtgcttcttcgttgaattatactattctttctttaattaatgctatgttcgatgagcaactcaaatagttcaaggaggaggacttggctttggtcactaacaagtttgctcgagctatgaacaatgttaggtacaggagaagaggtggtccaaatcgttgctttgaatgtggtgctcttaatgaccttcgctcgcattgtcctaagctttgaataaaggcaagaagaaagacaatgatggtgagaagaccaaggagaacaagccaaagagcacgttcaaaggggagaagactaaggagaatctcaagaagatgtttgagaaagtctatgccgcttttgagcctttaagcaatatagatggagaaagtgaagatgaagataagggaaagaacatctccggtgtttgcttcatggcacgtggtgaatcggattcagagtgtgaagacaatgaggtgagttcttttgaagaagctattcttattttaagtgctaaaaataagaagtgtgagaagatgtataggaaacaggaatttattattaaatctcttaattctgaaattgctagattaaaatctcttattcccaatgatgatgattgtaaaaattgtgaggttttaatgaatgagatttcaaaaattagagatgtcaatgctgcacatgatttgaaaaatagatcttctcttgctcttggatttgccttgcatacacgcactttggatgagttgttttttactaaaaatttgttgaaaaaaatatcaaattgcttttcatgctagtttgatgtttaacatgatttgtgccaaaaagtttaaacaacaacatgatgttttggatagctcaacatgcacattaaataagatgaaactaaaagatgctttaggacgtgttgagtacatggaggatattgtgaaaaacaatgaagtgctttcttgccccaaattttgtaaaagcaaaggtgtcatggtagattgtgaaaattatgctaatttggaaaaggagctttcttatttgaaaagttctttgcaaagattttctgatggtaagaaacaacttaacatgattttggatcaatctaaagtgactagttacaatagaggagttggttttgatgttcatgaatatttcaccaaaaatcaaccaaacgttttgagtgtgactaaatatggtgaaattttgacaaaaccaagtgctaagaaaacagtttttaagtctgctggaatttggccttctctttctacaacactaagagaaacaaaaacaaatctttcaaaaccatcttctaaaaaaaagtgtacttgttctttttgtggtaaagatggacatattgttagattttgtttcagattagctcgtaaacagaaaaaggagagagaaattgcaattgcaaaatcaaagtggcaaaaatctggttttcccttgaggaaatcggttagaccgcagtgggtcccgccgtcataccggcgactggtcagaccggtggctgtgcatcggtcagaccagctactatacttcggtcagaccggccttggagagatttttctaaaaattctcaaactgtttttgcacgtgggtacatgcctattggatctactggtcgtgtgtctcagtactggatttctaaattcttattatctaaccccagtactgaggcttcgacatcttcttgtgtgtaggctttggtggtgaggaaggagaacatgtggatcgtggattccggttgttcgcgacacatgaccggtgataaaaattggttctcctccctcaaacagacatctaagactgaatcgatgatctttggtgatgtttctactagtgccgttctcgctacaggttagttcaaggtaaatgacaagtttgaattgaaaa

SEQ ID NO: 23257 - DNA, 2300 bp, Oryza sativa
aatggactggaaattattctgaacaactgtaatggaatatctgtctagttgatgaatagtcttgtgttggcttggcatgtccaccactcaccccatccacgggctcaccaagtcaccaatcagtttgttcaccttgctgctctttttttgcatcttcctttgcatctgcgtttcagcacatgacaaagttagaataaatattcatgtgttttctagtttcattttgaaattatccaaaatattataattttaaaccacccagaggttatcgctgtcaaactgggaatttccagtaaataagccatactggatgaaaataacaaaataaaaagaaagtgcatgggaatatgagaaagcaggcaattgagtgagaaatgataattttcttatagcccacaatcatgatagactcatgtaaattcaaatgaaaccagacacatcgaatgagcaaggctggtacattagacttctagggcaagaacatcatgttatcaccatttgccaacataactgacgagacaaacaacagcagtatatgtagaacatttcagatgaatacactcctaagtacttagaaaccaactccctacatgttacttttctcccccattcttttaattttaattatccctgtttcccttctagtccctattacatcatctaaaatgtcagtagaggacctgctactttcttctccttccgaatccagtcaaggagtgagccctgaagccggacaggtgcatgcacagcccaaaggctgaggaagtcagcgacctcatgtctgtgattgtgtgtccggcgatcatgtcgtcgcaacatctttgctttcctggctcctcgaatggttctccgtgtgctccgcatgttcattgttgccttcacagcctgaagaaatgcaccaccatgtttagacttccaaagcatctgatacgctgttgcttttgcattctgacgaaaacaatctacagcccttggcagcatgaacatttgtgtgcaagcaatgttgctcgttaccattaatcacctcaatcacagtactatcaactgctgggaataggtcttctgaagagccatggggcgtatagacaaggataacattcagatgcggaaattctttaagtgaagatttaccctcaacaattgttccctgttctctgaacccaggaggtgaaacttggcacagtaaactcacttcaatgatgggttctagagaaatatctgttaattctaccttgtgcaagttcccactaccacatactttctgaccatgatgcttgcaacacagtggatttgggcggaaccattcagtagctatactatgaatgttctcccaaccgtatgagtgagaatgtgacaccctggagaagtcttgtgtaggtagttgaataagttctttcctaacagtttcagctgtagactcaaaataaggagtaaacaactgcaagcacttaattgtagtaccaactatgtttgtactctctgaaagttgtagaataatatcaatgtaaaagttgtcctcaggtgcactgccatcattgaaagcaaagaacaacttagcttctattcctcgctctgcagagttattgggccgtacccaaaaccaatgctgcttgtttccctgtattgatttgtactctaacgtttcacctgaaataaggtgcccgataagagggtcaaagaacaagtaacggcgtggtgtgcctccaaattccacagatcttagaaaatcattagctccatctgcaaaccactcgaatctttggacagaagatctacccagctcatcactattgctgtgaaagatggaagataccagtgtcttggtggcatgggcaattcgcctaggaaaggaagaattccttacttgttgttccacctcatcttcttcctggatatgttgcctgcacttccgtagtgtgtcatcacactcttcagtagcacgcttcagcttcttctgccaacgtaacaacgggccactagtgatctgccatttattggatgtctcaagtgcgaactccaacttgatttgtgccatctccagcctctccaggtgatcccgtgcacttgattttcgctcacaccggtcaatcaacccagatatgatcctgtttaccgtctcttgaacgatagcagaaccgactatctcttccatcttcagtaatccttccctgatcaacacagagcaagatatatcaatacatcgatcaaaatatagatagagttaattgcatattggaccggctttctttaccatggtcgcagcttggctaggaacaagctattattttcacttgggctag

SEQ ID NO: 23258 - DNA, 8382 bp, Oryza sativa
attcctgcagccctgcagattgagattcacatacctggctagttggttttagtagagatagagctcaagctccaccagtacagtcatgctcgagctctactcagccagtcagccttcgctgcccctgccacattcattcgtgctcaagatttaatgtgcagccttgattaagtgccctagctccaattaagctagtactgccatggatgaacttgggctagaatgggacctattgactagttggtggagcataagtgtggagtgataacatatggtgttagaatttcccaccgtgccaccgtgattcattggctatgtgctaattgagctcaagctggagctctgccgtgtgccgtgttgagctcaagacggagactaccacacactcaagctcaggcgctgacgtaggtcaaacacgtagatggaacctgaggaagtgtggtgagctcgaactaaaacagggaagagaagagaaaagggggagatctagaggaagaacaagactggttcaatatgaaaatttttgcaaagatttctggttcaaaccgaaaagaatgtcctacctctagtccaacatgcaacaatggtcaataaaagtggcccaggatgcaattttctcatatagataagtgaattcctgataagtacttataaagtatacctttgaagtatatgcaaacccaaccttctgagttgaattagtaggaagaaacttgagggaacacaggtgccttctgagttgaattagtaggaaggaacttgagggaacacaggtgccttctgagttgaattagtaggaaggaacttgagggaacacagatgcaccagagagtacccagctggcagctgccagcagacgataactggattgaatgaacggtgagcataaaggtccatgtccttggtggagaaaactcaagtaaatcaaagatgtggacgttaggtaagccttattctccagttgattatgccctctttgactgaccaatagtaaattttgttattaagactgaaagaccaagaacggctatagagggggggtgaatatagcaattcaaatcttgcccccgaaaatactcatcaagccggatttctcaaaatccttactagaaccgcggctattagagaagccggatctagaaaagaagatagaaggaattcccgaaactagaagaggaagagaaaaggaattcccgaaactagaagagaggtgaggaggagtgagcaaaactcatcatcgcaaagttcaaattgcaagcggaatttaaattgtggaatttaaatggacaagacaaaaacgaaatccttcaaatcatttcattcataggtgatgcaaaataaccgctcaactaggagcaaacatacaccttcagaggaacattaacacaaacttaaaatctctcggacaaacacactccaaactaatcctaatacaaaagcctctcgggcaaacacactccaaactcacacgaaaactctctcaccaagcatctcaaaaggattaccaaaggagcaacctccacccttgcatccatctctctatttatagcctaagacccctaagacattgtctcaaatacccctaggacgaaaccctatctcagatgcaatcctggctgttcattcttccttacatgcgaaggaaacctcttagatgcttgccacgtcgtcgatccgaagactcctcgcacccccgatccgcgtcgtgtccatccgagcctatccacatgcgccatgtgtccacgtgctccgcgcgcgctcgtgctctggccagcgagcgaagtttcccgcgcatcccgtccaaaatctgcgtaggacccacgcggtatagctcccgcgagagagcgcgcggtcaagtccgcgcctgccgcgtgtccctcacgcgcgcgcgccgtcgccgagatctcccgcgctcgcctccgagttgctgcctgccgcgtgtcacgtcttcctgccgatgccgtggtccgtcgaacgggaggacgccacgtcgcccgtacggctcccgccccccgcatgccttgtcttcatgggcccgtcgccgtgggctgtctccatcttgggccagtcaggaccggccatgtggcctcctgctgaccgaacacccgagccggacaggccggttggcctctcttccagccagcccacatgcagtcatgcatggtattggaccatatgcacgtatgcactgccgaagcatcacaagctagctagctaatcaactagctgcccatgcttgcatatgcacacactagtgcatatatgcaagctcttcttccattcaccattttctttgcgcacccggcacttgcacttgaccttgcaaagtccgttgcaaagacctcctcatacggtgttcgtccaccgtgtgcaaccttgtgtccaatcttgtcacccggtatccttgatcgctttggacctcaactcctccctgagtctagtcccgatccaccgttgaccaagatcgaccccgatcacctacacacacatgaaccaaacaaccattgtcttggcacagatgtcgcaacctgaccaatgttagtccacgcacacacttcttgcacttccggtacttgtcaatttcccatcacaaaagaactgtaaccacacatggtttcacaaagacattcaccgcaaccaaaccaaaaaagatgcttccgaatgctgactgaccaatattgcagaaaggctagctgaaaccacaacataatggtaattttccacattccagaagctggaatcatggtaatgagttgccaaggcttgcttgctgatttaattttttaaagttatgcataggatgcattcctcaattagcagacatgtttgcaactccagcgttggcatttgcttgccattccgctggtaataagcctgttcttggtaatattcctccagattacataagattttaaaagtaaaatcttggtatatagttgatgaaacgtgcttgctatttttggtttctaaatactcctcttaatacacattacagaaaaaaaatgctagaaatcttgaatttcacgtagtgaaaagaagaaaaatcatcgtcaccgcaatcacttccagttaggcggctactcatcttgaccggttgaatagatatggcgtaatagacatgatcaggtagtgatatgcagggagatcgagccttacctcgaactagtgcgccacggccgccgagggctcctcctccatccccgcatcgccggcggacgcgctcgtatcgtatatgtggcgccacgtggagacagtagtggcagaggatcgagcaagggaacgccatgcccggacctccttgcgccgccggcgccggtccacgcgcagcctgcctcatcgcggatcgtccggccggcggcggaggccatggctgccggccacggtggcggccgtgtgtcgcctgcttacgcaaatggagacggaggaggatttgtgcggcccagttatcatcagcaaaagagagccgatctcggctccaaaaaagcccacactaacaccaggcaataattacgcagcccgtatgagataaaattttttaggttaattagatccatgccactgtaactttgacaaattaaaaaaatgttactaccattcgtcatatccgctacatgtcactgggaatttttaaaattggaacccagggggaggacggccatggagcagggccttctcggcggttgttggtgatgggagcggtggagccgcgtcgggccgcaacggccgcgaaggcacgcaaggccggtggtgcggcggagtgcaccgggcaacggggggcctgcaggggaggcggaggcgcgcgggtccgcgcaaggacggcagaggtggaggggccacgcatggccgcggaggccgcggagccgcacgtggcctcgtgcagtcgcgctcgtccaccgcctcgtcaccgacggcgacccacactctaccccatggtggacgcagctatgctccgacgtcgccgtcgtgctcgccatcctccttgaccgcttcttcgacatggaacaccgccaagcaaaccgacgacgtcggcctcgcgcggttggtggactttgccgacgtcaagcgcatcaacgacagaatgcatctatgggcgggcaagctagacccgctgctgctacaagggatgtatgaccagggtgccatctgacagtaggtgggcgtgcaggcagccacggggagcgcgagcagcgtggcggcaccgtgccacgctcacggcacgtggggccgatggagccggcagagccgcgcgtcgagcggaggaggccggccggcgcagacggcggagccgtggagaggagggggatgaggacgggaatagagacggcataagagaggaggatagaaattatgaccggagtggcatggttctaattttaataactttcagtggcatatagccgatacgatgaatagcagtggtatttttttaatttggcaaattacagtggcatagatccaattaacccaaaaattttacagccaggtccctcaatgtttaaatgatatcccccgcaaaaaaaatgtttaaatgatacggagtatatggattgctaatttgctatatcattcctaacgatctggttatttacaaccagtcaatcaggtctccatttgggatcgctatatggtaatgatccgaccttttgcaaatcaactccacaaacttttttacacacaggtcaaatggagaaactatttaatgtaaacaatctgaaaactatcgttaattcaaaaaatatatatacgcttgagatttgttcatgtcacaattgcgagtaaaaatttccgtgcatcaccaatgcatcctcaccgcaaaaaccatggcaaattcagctgtaattttactcacagttatgacgtggaaaaatattactatacatctatttttagatccaacagtaaattttcactgtatattttccatgttgtgggtggacaggaagcaaatcctctaacatgaaaccctacatgtcaagcaccatgtttctctgactggcccacatgtcagtcaccacatattagcagaagaggcgagcgccaccgtcgtctctacctttactcccgccattgagtcggcctgcaccttgccatctccgtgcccatcttctccacgcacaggtaggcgacgccatgtcccgacctccagaacacctcgtacgccgccgccgccgacgatccatccaccgtgccatggacgtcgtggcagtggcacaggcgatcgatggcgccaggcagaagaaactcatccacctcgcgcaatccgatgtccgttcgcacggctggctcctccctcccatcgatcgccacgaccgcggcgctctcggatcctgacggcggcagctcctccggcgaggcgtgcggcgcgaagatggccgtcacctgcagcagaggcggcggcccggaatcttcagaggatctcctcctctcgccgtcgccgccgtgaccagatgatgatggtcgcgccgagacatgccgctgcacgaacagtttgatcacctgctccgggaatgtcgtcgtccctgacagctcaaccatgtcactgcttctgctctggccatggcagcatgccggatttggacgagcacggtgagtctcggaatggtggatgctccagtactctggatcagtagaatccacaaaggggaagcagtagaaggctcggtggtgaacctgagtgagctcctgctttgcagcttcagcgaccggcttgaaactagggagaagtgaatccaagcacctggccacaatcccagtcacgttcgtgcttgctgtcaaacgtagaagaattccaagaacaaagttctcctctggcctctcatggttgttgtagcgaagcaacacaccggcttcttgccctcgttctgcgaaactcattggctttgatattaggtagtactgatttccatgagaactttcatactgcagtgctttgcctgcgaggagatgcccagtgagaggatcaacgagcatgtagttgatgctgcctattctgccaaactccatgaatttcaggaactcgccggcgccatcggcgaacctttcaaacctctgaatggttgaagtggagttcaggctatcaacattcttgtcagcggcgaaggaggagaggaatgatcttgtggcaagggcgatccgtttggggaaagagcaccgactgatcttctccgtctcatcgtcttccatggcgcggcgcttgcatctgtccatgacatggctgcactcgtcggaggctcgcttcagcttcttcctccaacgcataagcgaggaatccatggccaaaggccacctgctggacacttccagggcggcctccatcttgatgtgtgccatctccagcctctccaggccatcttcctcgcttgatttgcggttatgattgtcgatgaggaaggtggagatcctgctcacagcctcaccgacgaccgcagaagcgatgacctcagacatcaggatgttcttggtgatcactgctgccctctattaaaaagggaattaaaggtcaggtgacaattattcatcacagaactagagatactggacttcagcacaaaatatacttaccacaccaaactggttgaaactgaaactagtgctttaaactgatagctttgcagattgtgaacagcataaacctgaatccagatggaaatggttcagagtcttcacgataccaattagacagtgaaagtcatgaaggagcatctgtacaatgagtgatgtcatgaagttgacagacattaggtaattaatgtgaccgtgatagcaagatgactagtcttcccttcacaacaccacaagtctgatgatttgaatgtacagttgatttgtcacaatcacacaaaacttaaaaagctgcctcgttgactgtcccaatcttgtaaaaagtctagctattgaagacaaattatcctcgtcaccgcaatccttttccttgaaaattcgtggtaatgcttcaatgtcatgttaatcatgatcttaaaaaactgtgtttcacttgcataaactcctaacagtttcagctgcacatacttaattatagtgccaactatgtatgtacttgctgaaagttgtagcatcaaaccaaagaaaaagttatcctcaggtgtgtctctatcattgtaaacaaagatcaacttagctcatgctcctcgttctacaatgttatttgcctgtatcaaaaacaagtggtacctgtttccctgcactaatttgtaatccagcgtttcaccagcaagaacgtgccccacaagagggtcgaagaacagataatagcatggcgtccctccaaactccacagatctcagaaaatcattagctccatctgcataccactcaaatcttcgaacaacagatctatttggctcatggatattgccgttatagatggataatactagagacttggtggcatgcacaatttgcataggaaaggatgaattccttactagttgttcagcctcttcttcctcgacgtgctgcctacacctgcatattttgttatcacactcttccacagcttcttttgccaacgtaatatcgggtcaccagtaatccgccacttatttgatgtctcaagtgtaacctccaacttgatttgtgccatctccaacctctccagatgatccgctgtacttgattttcactcacagctgtcaatcaacccagatgatcctctgtctcatgaaccacagcagaaacaaccacctcttctatcttcaataatctctacctgatcagcacagagcaagatatatcaatacatcaatcttttgcgaaatcgcaaaagaattgcacgtcaatatattagatcaatacatcattcaggatgctcaaataaaacaaaagatagatcagtgaattcctgataagtacaaagtgcattgttgaattatctgtgaacccaaccttctgagttgaattagtaggaaagatcttgagggaaaacaggtgagccacagagtatctagcagacgataactggtttgaatgaatggcgagaatgaaagtacatgtcttcggtggatagagaatcgagcaaaccaaaggtggttctctttcaagtttggttagtgctctagtctgttctccagttggtttctgcccactttgactgaccaatcgtcaatagtcaatactgaatgctgactgaccaatcttccagaaaggctagctaaagataaatatttttggaaataaacccctgtaggatttgttttcaacatataggtctccatgtacacactcccccttctgccgctgtaccacaccaaaactgaattttacatgtagctctctctcataagtcgatggttgggcgctcgcactcccctcttccggccctcccgctggggcgccgccacaagccaccagccaccacgccgt

SEQ ID NO: 23259 - DNA, 12308 bp, Oryza sativa
  unsure (1)..(12308): unsure at all n locations
attcctgcagcccagtgaaagatgatatgaacgattttgtggcatgggcgatccgtttagggaaggcgcactgcctgacctcctgttccatctcatcgtcttccatggcacggcgcttgcatctgtcatgatttggctgcactcatcggatgtgcgctttagctcttcctccaacgcaggagcgaggcgtctgtgacccgaggccacctgctggatatctcgagggctgcctccattctgatgtgtgcaatctccagcctctccatgccatcttcctcgcttaatttccatttatgcttgtcgatgaagaaggtggagatcctgctcacagcctcgctgactaccgcagaagcaactacttcagacatcaggatgttcttgtcgattaccctagcctgtttgtaaaaggggatggaaagataaggttacaacttacaattatattcacaacagaactagagatatagaggtttataagaatgtagcacggaatgtactcacctcaccaagctgcttgaaactagtgcttcaaacatactgcgattgtgacttgtgaagagcataaatctgtgtggtgaagaggggagttcaattgattcacaatgggacagtgaaaggtccttgagtacatctgtgctggaattgatgtcatgatatagaaatttggtaattaattaacatgaccgtgatagcaagatgacaagtcttccctccacaccgcctgtatttctccaaatactctgtaactgaatcaacttttgagtaatacatatgttcaggccgagaaaattgtgccatagttgtttcaaaaagagatgacaagtcttcatctgtggaaggatccatccgatataatgtgaattaaccaagcaaaagaaaagtctaagattgaacgatagattctggtgacaaattgattagtctcaatcacagactagtcagtcagaagaaataaggcgcaccgcacgacttgtcgacttaaccaaaaacaatgcttccgaatgttgactgaccagtcttgcagaaaggctagctaaagatgaatcctcttcgtcactgcaacatttttttttaaagaaaaaatcattgtcactggctcagtgcaatcacttccaggcttccagctactcctcttgaccggttgaatagatctcgcgcagtaaacgtgatcaggcagtgatatgcagggagacggagcctcacctcgtgctattgcgccgcggccgccgaggggaaacatcggtctcctccatctccgcatcgccggcggacgcgctcgtatatgtggcgccccatggagacagtggttgcagaggatcgagcaagggaacaccatgctcggacctcacctccttgcgccgccgccgcgggtccacgcgcggcgtagcctgcctcctcgcggatcgtccggcggcggaggccatggccgtggcggatgatggtggtcggcgaggagggtgaactggagacgaaggggtggcccagttgtcagcgaaagagagtccatcgcggcccaagtataagcccacacttacaccaggcaattacgcagcccccggatcagatgagatcagaaaatttacaaccaggtccctcagggccgttttggattgaagccaaaacgtgccataccaaaattttggtaatttaaatagaaaatgtgctagtttgaattgatgccaaacaattggtagtgcccatgttcaatttggctatattttagaatcttcctcaccatcctattaaaatttggctttatattggtcccaaaccaaacatagctagctaactttgctctacccaaaaagtatggtagacacgcatgtcaatacatgggtggatgcacgcccccttctaacaccaccggccgtcacattggagcacaggaggcaagcggcaccgtcgtctaccatcagaccagccattgagtcggcctagggacacaagcaagccgacttgcgagctcacttatagatcaaatatgtgataatccgtaggtttttatatcgtggtcccgcttgccacatctagatatgtaaatagatcaacccatatatccatttatagtttaaattaatagataacccgcgagttacccactaaattttgcctataaattaaacgagctcgtgggttggcccgcttgtatctcaaatcggcctgcattttgccatctcggtacccatcttttccacgcagaagttggtaggcgatgccatagtgggacttccagaatacctcgtgcgtcgacgatccatccacagcatcgtggttgtggctttggcgatcgacaacgagtcaatgactggtagaaagaactcctccacctcaaacagcacagcccaatgttcgttcatggcttgctcctcccttccatctatcgccacagccgcgacggccgacggtcatgtttcgggatagcaactcctccggcgacgcatgtgtcacttagaccgccttcatcagcagcatagatgccaaggaattttcagaaaatcaactactctcgtcgttgccgaccagataattgtcgcaccgagatatgtcgttgcacggacaatttaatcaccggccggctttaggaatgcacctgatggctctgaccatggtgctcttgtccttcgcggcatgccggttttgggcgatgtgctagcggctggtgggccttcttgaaaacgaaagggtagatgactattttttaatataaaatcctctaatttttttggagtagaacagagtctcttggagcaaaaagttgttattgttatagttcctttctttatttattattttcctcaataataacgtgtcactgatttataagttctttttatctttaaaaaaaagatatgcctacatatatctaatacgatatgaccgatgacaggtatagccggtgagctggctattctatttgtcaaaaataagtaaatattgtagataattttgaactataatataattttattttgatgatagccacgtaatagcagggccaaccttgctattttttttttacattgagtaatttgtattggtggtacacaaaacttattaggtgggtgcaattaagtatataaatttataaaatgctcgttttaatacacgaacttgtctaattcttgcgaatgaggatcaaaataacttggcaatgctaattatacgaaaccgatgttgattaggatgtgatgtgaatacgtgtagtgagtatgcataagatatgcaatatttataatttgatccttactttatccatgatgaatttcatatatttttaacccttatatcattgcttggtatttttaaaaatctttttctacaatcactatatcctattctatttttttattgaagaggtgtatatctaattacaaccttcttatatactccctctgtattttaatgtatgacgccgttgactttttaaccaacgtttgactattcgtcttattcaaactttttatgcgaatataaaaatacttatatcatgcttaaaaacatttgatgataaatcaagtcacaataaaataaatgataattacataaattttttgaataagacgaaaggtcaaacgtttgtcaaaaagtcaacagcgtcatacattaaaatatggagggagtatatgtttacatagtatcataatcagcccctaaatcaataagattagccatgtagtgtcattttcatctttctccgcacgtaccagacaagttcatgcaccaaaataagcattttacaaattcgtgtaccggcgatgcaatttactctttacattcatgaccctacccggctacttgcaacggatgtcagcaacccacaaatttacaatcaggtctgtcattggatcactaccacaatcaggtcactcatagagattacaaaatttacaatcgaaatccctaattttggcatttctttttttgcaaatcaatacctatcagtttttgttttttttttagaactagggccagagagcccccatttctcttactagaaatgagcatatccttacaaagtcagggaaacaaaaacaaatacgaggaaagaaagctaaagagcttatccagatgcctcacagggctcgatggctgaacacgaataacatcattcggtcatcaaaaggataaaacagatcacaaaaaactaataacatcttcatccttctatcctccagattccaggtctccatccatgtcttgagcagaagatgtcacttgccacctgtcttataagtctggctcccaactgcagtcttcttcgatttgcttccaactttgcaaagatgcccaggaatccacccaggaacaagccataaagaccaaatcagtaggatctcttggaaatttattttcaaaacaagctttattcttggacttccaaattgtccaaatgattgcagctaaaccaatcacaatcaagtgtttcatgtttttatcatgtctatccagccaatgtccaaaaatatcctgatgattcaaagtaggcagtatatccaaagcacaacacatgatattccagagaagtttggccaaagggcattcaaaaaacaagtgctgtatatcctcttttttatcacaaaattgacacttttcattcccctttctccaaccttttttatacaagttttccttagtgagaattttgtttttaacaaacagccaaataaagactctaattttcagaggaatcttanatttccatattttcttttgagggaaagacacctgatgcattttaagggctttgtaaaacgatttcacagaanaaattccatcctttgtcaaattccaatagattttatcttcagagtcatcctgtaagttcagactttccagactgtttttgattctcacccatctctcagtttatctccctctagatctcttctgaatttgatgcattgcaagcctttcattttcacctttgcaattgtcacatgtttggtcaaagctatattgtacagatttggaaactgaatgttaaggggttttccacctattcagctgtcctcccaaaacaaagttcttttcccattccccactttttttgaacaaaatttaaaaaaatcatcctttacttccatcaacccatgccagaaatgagagttaccctgtttaaagtttacctcagacatagttttatttttcaaatatttccccctaagaatctcctgccaccaaccttctttgttttccaaattccaaatccatttccccaacaaggccttattcataatgtccaggtccagaacacctaaacctccttgatctctaggtgaacaaataatgggccattgcactaaatgatattttctgatgccttggtcctcctgccacaaaaacctcctcctgaagaagtccattttttctttcactcctttgggtaacttgaaaaatgagatcatatacatgggaacactgcttaaactagaattgatcaaaattaatcttccccctattgactatcagttttggtttttacatagctctcatagatcgatggctgcgcggagtgggcgctttctcttccatcctcttgttctcccgccgccgccgccaccaccagccaccgcgccgtttccgccgccgcaccagagctgagctcggcgatgccacaacctttcacaatgacacggccaatgagtccgcctgcaccctgccatctctcttcccatcttcttcaagcagaggtaggcgacaccatggccggactgccacagcacctcatgcgtggacgacgacgacgacgatccatcgtacgccgcctcatggcggcacaggcgatcgatggcgttgggcagcagaagctcctccaccaacattcctgtgcacggcttgctcttccctcccgtcgattgcttcgacagcaacgctccgggctctgggcggcagctcctccagccaagcgtgcggcccgatcacggccgttagctgcagcaggggtgtcctcctatcgccatgaccagatgatgatgatgatgaagaagacgatgatggcttctgccatgcagagatataccgccgtacgaccaatttgatcaccggctccgggtatctaccatggtgattgtgtccttggcagcatgcggagtttgggcgagcatggtgagtctctgaatggtgggtcctcctcgagtactctggatcggtagaatcaacaaaggggaagcagtacaaggctcgatggtgcacctgagtgagctcctgctttgcagcttcagcaacaggcttgaaattgggtggtaacaactccaagcacctggccacaatcccggtcacgttcgtgcttgctgccaaacgtagtagaattccgaaaatgaagttcttctccggcctctcatggttctggtaccaaagcaacaccccggcttctagtcctcgctctgcgaaactcattggccatgctgctaggtagtgctgatttccttgagaaatttcataccgtagagctttgcctgcaagaaggtgcccggtaagaggatcaacgagcatgtagttgatcctcctgcctatgctaccgaattccatgaatctcaggaactcgctggcaccatcagcgagcctttcaaacttctgaatggttgaagtggtgatcaggctatcaactttcttctgtccagtgaaagatgataagaatgatcttgtggcatgggcgatccgtttagggaaggcgcactgcctgacctcctgctccatctcatcatcttccatggcacgacgcttgcatctttccatgacttggctgcactcatcagatgtgcgcttcagcttcttcctccaacgcaggagtgaggcgtctgtgaccggaggccacctgctggatatctccagggctgcctccattctgatgcgtgccatctccagcctctccatgccatcttcctcgtttaatttccgtttatgcttgttgatgaagaaggtggagaccctgctcacagcctcgctgattaccgcggaaacaactacttcagacatcaggatgttcttgttgataaaccccttcctgcttgtaaaagtggaacgaaaggtctagttagaactgttcatgacagatctagagaaacagaggtgtacaagaacttagaacaaaatgtactcacctcaccaagctgcttcaaactaatgctttaaacatactgcggttgtgacttgtgaagagcatacatctgtgtggtgaagaggggattcaattgattcacaatggcagggggacttgtcatccggtagcaggatgacaagtcttccctcaataccgcctgtatttctccaaatactccctgtaactgaaccaactttggaataatacatatgttcaggccgataaaatttctttccatactcgtttcaaaataattaaaagaaaaaaaagacaaatcttcttctgtggaaggatccatcaaatataaaatgaattaactgaggaaaataaaagtctaagattgaaagatagattctggtgacaaactgattggtctcaatcacagctagttggtcagaagaaataagtccatgactgacttcgtggagaaaaaggttagcaaagcaaaattgtgttttctcagaagttaagtgggtcatgttggatgtatggtctaattaacatagcacaaggtgagaagtgagaacacatcactttttagactctaattaacatagtctccgtatgatttgtcaagcaagaaaactgccctctatgaccgtccaatctcattgcaaggctagccaaagataaatcctccacgcctctgcaattaggacaatttaaagtaactactcgtcactgcaatcagtttcgggtactagtcttgactcttgtgtggtcgaacagatcttttgccaattctcactgaacttatctttcccctaaaaagaacagtaacccattgcctaaatctgttttgcaggttgtgtacagatcgatagccctgatgcagcgctggagggtgctccaaacaagaaaagactgcgccctgctagagctggacaacgtttttaagaagctgatggataagatgtacaggctgtgtctagtttcttccaaagttgaaagtttggattgaaattggtacgatgtgactgaaaagttgtgtgtgtatgacaggttgatgtaatggaaaaagttggaagtttggattcaaagtttggatctaaacacagccacagctttggcctggagatgccctgccctccgtccctaaatatttaacgccgttaactttttaaacatgtttgactgttcgtcttattaaaaaaattaagtacttattaattcttttcttatcatttgattcattgttaaatatacttttatgtatacatatagttttatatattttacaaaagtttttaaataagacaaacgatcaaacatgtttaaaaaagtcacggcatcaaatatttagggacggagagagtattagggaagatgggtgtgtgggggtgtttttggctggtttactctctgttctcccttcctggagatgggcaaagggcactgaaagctgacgatcccagtggtttaccatgtttccgatctggtagttttatttttctgttgtgtaagattctttcagtaagtttgaggctttctttcaaaaaacagggtaatgaaattacctgcagtttttttttaaaaaagaacagtaaccaaactgcacagaacaggtcgcgacaagcagcagtgaaattgaatgcgagcaaaatgtcgtacatatctgggatggagcgtatctgggatggagcgaattaacgcgaacaccatattacataaaatggcagatggcatttactaggaactgtcttttgtccgtacaactaagtaacataggaatgcgatgcaatagtggtgtggcgtcttgtaaataggtggtggctgcgaagcctcgccatctctgtgcattcttcaaattctcaatatactacggtcggcgtgccgacccggcgaatgcgatgcaataatctaccgtacaaaatgtaccaacctcatcaagctggttgaaactagtgcttagaatatactgtaattgtgccttaaccaaaagtttaagattgaacgatatattctgccattctggtgacaaactgattactctcaatcacagactaatcagtcagaagaaataaggaacacagggcttaaccaacctcaagctttgcaactgggctaagtaaaaatactgaaattattttaaacaataagggaatacctgtctgcttgtctgcttgatgattaaaattgtttggcttgacatgtccaccttcctcactcacccattcacagacccagcaatcaacttgttctccttcttgcaacttttttgtgtttccctttgtttctgtgtttcagtagacgatgaagtcagaataaatatgcatgtgttttaatgtttcatttcggaatcatcctaaatacatataatctgaaatgtaaaccgccccgaggataccactgtatgaaaattactgatatgcaaattacaatttttttacaaaaaataaagtgaatgggaatatgaaatagcaggaaatagggtaagtacaaaattttgtcatcaccttcaatcatggtaaacgcatgcgaattcaaataaaatatgtcacgcccaatgagtgaggatgtacattagattgatagagtatgaacatcatattatcaccattcaccaacataagtgatcagctggacaaacaatagcatatggagacatggagcacacattacagatcaacacactcctaaggacttctaaatttaactacctacaattcacttttcaccctataatattacatttccattcttcttaattctccctgtctccttaaccagtctctgtaaatgatctaaaatttcagacgcaatagtggagatgctaactctgtttccttttctttctgaatccaatcaaggatagagccctgcagctggacaggcgcatgagcagcccagaggttaaggaagtcacagatgaagtcacaggtcacaactgtgcgcctctgcgttctctgatccattccacgcagcagctttgctttcttggctcctcgaatggttctccgtgtgctcgtcatgttcatggttgccttcacaacctcaagatatgcaccgccatgtttagacttccaaagcatctggtacactctagcttttgcattctgatgaaaacaatctacagcctttggcagcatgatctgttccatttgttgtaaggcaatgtttgtgtgcaagcaatgttgctcattagcattaatcacctctaccacagaactctcgactgttgggaataggtctcctgaagagccatgcggcatatagataatgttaactttcaggtgcggaacttctttgatagaaggtttgccctcgacgatcgttccgcattctccaaacccacgcagtgaaacttcgcacttcaaactcacttcaataattggttctagagaaacgttttgtaatcctatcttgtccgtgtttccactgccacgtaccttcgcaccatgatgcttgcaacacagtgggtttgggcgaaaccattcaatagctatactatgaatgttgtaccaatggtttgaatgagcctgtggcacccaggagaagtcttgtgtaggtagcagagtaagttgctttctaacattttcagttgtagacttgaaatgaggggtaaacaactgcaagcccttaattatagtgccaactatgtttgtactctccgaaagttgtagcagcatacccaaaataaagttaccctcagatgcagtgccatcactgtaaacaaataacaacatagcttgtactcccctctccgctatgttattgggttgtatccaaaacaaaagctgcctgtttccctgcactatgtactctagagtttcacctgcaagaagatgcccaataagagggtcgaagaacaagtaatgacgtggtgtgcctccatactccacagatctcagaaagtcattagctccatctgcaaaccactcaaatcttcgaacaactgatctactcggctcgtctatattgccatggaagatggatgatatcagtgacttggtggcatgcgcaattcgcctaggaaagaaggaattccttgctacttgttcggcctcttgttcttcctggacacgctgcctgcacatgcgtattgtgtcatcgcactcttcagtagcacgcttcagcttcttctgccaacgtagcaatgggccactagtgatctgccacttattggatgtctccaatgcgaagtccaacttgatttgtgccatctccagcctctccaggttatcctgtgcacttgattttcgctcacacctatcaataaacccggatacgatcttgttaaccgtctcgtgaacgatagcagaaccgaccacctcttccatcttcaataatctctccctgatctgcgccgagcaagatacatcaatagatcgatcaggatgcccaaataaaacaaaaaatagataagtgaattcctgaaaactaataatgcgttgaagtatgtgaaaacggtaaaccgaaaccttctgagaggtgcaccagagagtacccagcacacgataactagattgaatgaatgctgagcctgagcatgaatgccatgtctttagtggagaaaaatcgagtaaatcaaagttggttgtattggaagttagataaccttttttttagccgggttggccataagaagaggccaaccaaatcttattaagattatgagagcaccttgacattaggtaacccttgacatatggttcgagaagaacaccttaattactattacactatgtgattctcctaattggaactattatactatgtgattctcctaattggaagcattaggagaatctgatgtcttttaatgcgttttttttgggttcttcttagccatggtaaggcgtggtgctatgtttggtgatcattttgccagtctgtctggtgtctgaacttgtaagcagagatgcgtttgacaggggtttgttagggggtagcaacctgaacttttgttgtgaaccttgtaatcgtatcgttttcattaatgaaagcgggaggggcttgacctctctttatcaaaaaacaaaaaacaaaaactatgtgattctccagttttttttaatgaaaacgcaacgattacagaagttccagagaagttcagcacgaagacagagggaacaaaagaaaaaaaaaacagaggacgattctccagttgatttatgctctctttcactgaccaaacgcaaattttgttattaagataagattgaaggcaaccaaaccaacaaggatggatgcttctgaatgctgattg

SEQ ID NO: 23260 - DNA, 1994 bp, Oryza sativa
ccgtccaaaacgaatccaatggagatggcgcttggtcccgcacgcaggcaaaaaaaatctccgtttcggcctaacaggaagcccgcacgcgcacaggacgcgcttaacctcgccctcgtccgcgtacaccggcgcagcctgagacggactcaacttcgcctcgccctcaggtccgcgtacgccggcgcttcacctcgccctcgtccggccaccgccacgagtcagctgggaggcgcgtcgctgcgaccggagaggcaccaggccgccctgccctgccgccgcgaccgggggcgcgtggaggcggccggccgccgggcctgacggcgcggtggtgcaggcgggcagccgcgcagcccgagcccggcgcgtggaggaggccgcgctgctcctgccgcgccgcacgtcccgatttcggcggcctcaactccacgatggatttcagcgtccgagcccgcatccagagcccgcaccagtcggccgcccacttcgtcgccggcgagaggtgacaccgccgcccggcttcgtccagggtaggagtcactgctggttgagtttgtggagaacgacgcaccttttcctgtgcccgcgaggtgtttgtggaaatgccctgccgtctgggatgatgcagagtcctgattgaaagtgaattgttattgtttggctttgtgagattagaagcaaattgattctgtaatcttgattgagattgatttggttgtatgactcatatatgctgtaatttgaatgaatgaatgaataaatcagtaacttctgacgatgttttctaaaaaattttgagatgtttgagatgttgcccaggtccatgatttgttcaggtttaaagtctggaatggacttatagtattgtctggtttatactggacatgagttgtgctgccatttcctccttttcgctatctctgctgtaaatttttagttcatgctaggtgggaggttccatgtcttgttatgatcagttgtcctatgcagcaatgttgctctgaatctctctctctgaagatgctgaatggagtgccgtcgttgctgtagtgctatcgtgaaatttcatggtcagtagttcctgtgcatggtcgccctgatcaatagtgggtaggacatctttggagctgtttttatgcgagattcctgcaaaattcctagtacgaattcatgtgttgcaaacaagcccgtatgtctccttcatttcttgatacgatagggatggattgtgttttggttgacaaaatccaaagagagcaattttgtgaatgaaatgagaatgccagaatggggctgttgctttgagcgatctgatatccatcgtggagttgaggccgccgaaatcgggacgtgcggcgccgcaggagcagcacgacctcctccacacgccgggctcgggctgtgggccgcccgcctgcaccaccgctctgtcaggcccggcggctggccgcctccatgcgcccccggtcgcggcggcagggcagggcggcctggcgcctcccccggtcgcggcggcgccggacgagggcgaggtgaagcgccggcgtacgcggacttgagggcgaggctaagcgcgtgcgggcttcctgttaggctgaaacggggattttttttgcctgcgtgcgggtccaagcgctaccttcgttggattcgttttgaacgggcgagatgcatcgtatgtcacgctgtgacttgccttagctaagtcaccagctgagtccccggcggcggagggcggagggcggaggccatggcggtgggtgaggtggtggtggtcgggttgtgcttgtgcagcccagttgcagtgaaaaacaaggccgagcccaagtaaggcccacactagttcaactcggcccgcacatttaatcatcagagcaatgcaacccagggatgcaagcggtccaacccgcgaacctgcttataggtaaaatgagtgaataacccgcgggttgacttgtggattacctaataatttgatatatgggctgcaggaa

SEQ ID NO: 23261 - DNA, 1245 bp, Oryza sativa
cccccccgcctttgctctcttcgtgtttcatgccatacaattcgttggtcttatgtcaatctttacttattggatgctagcatgactatcgtgcgaacaattgataaacacttgggtagaattaagtgctatttttacttacacttcctcttcgtctttccaagatgatagctcgatcgcctgcctttctgggatgatagttcgcctttctttcttcttctttttttttctttcataatagacagataacaagcagctggttttgcagtgaaatagcaatcgacttcaactgtcattgcaccgtatgtagtccagcttcatgccaatttgtcccaaaatatgctatttttcactcacttttttctctccaggaaacatgtttgtcccacatactgatggcatcctcttttagggcctgttcactttggtgccattttcaaccttaccaaattttggtaaagttgccaaaaaaaattagctacatttagtttgctgccaaattttggtaactatataagaaatcctgccaaaattttggcaagttaccaaaattttggcatagttgccaaaattttggcaatgccaaaatttggtaaggttttttttggcagcaaagtgaacaggcccttagttctttcagctagcaaagatccctcataagggtacaagcaagcagcacatggaactgggtatgtttataccgtgcaccttggtgttgttattactgtcatatggagctggaggcatcaagggcggcgcatcaacgcaagatggggacgtcaatggcacggacttggcctcgctcctagatttcaagcgagcgatcacgaacgatcctttcggagccatgagctcgtggaacaccaacacacacttgtgccggtggaagggcgtcacatgcgaccagcgggcgcatcgcgtcgtggcactggacctcgttgggcaaacattgaccgggcagatctcccattcccttggaaacatgtcgtacctcacttctctgagcctccccgacaacttgctctccggccgagtgccacctcagcttggcaacctgcggaagctggtgtttcttgacctgagtggcaactcgttgcagggtattattccggaggcactcataaactgcaccagattgaggacgttggacgtttcaaggaaccatctagttggtgatatcactcccaacatagccctcctctccaacctgcgaaatatgcggcttcactccaacaacctcactgg

SEQ ID NO: 23262 - DNA, 3440 bp, Oryza sativa
aattcctgcagcccttggtaaactccggaagatcgaacagcttggtcttgacatgaacaatcttgaagcaagagacagttggggatgggaattcctagatgcattgagcaactgcacgcgtcttaagatgctctcactgcaccaaaatctactgcaaggtgtcctgccgaattctgttggcaacctctcctctagcatggacaaccttgtgttgagtaacaacatgctttcagggttagtgccctcgagcataggaaatcttcataggttaactaagtttggattggatttcaacagttttactggtccgattgaagggtagattggaagcatggtaaatttacaggctttatacctagacagcaacaacttcactgggaacattccagatgccattggcaacacctcccagatgtcagaattgtttctttcaaacaatcaattccatggtctcataccatccagcctaggaaaacttcgacagctctcaaagttagacctcagttataacaatcttgaaggcaacatacctaaagaggtcttcacagtacccacaattgtccaatgtggattatcccacaataatttgcaaggcctgatcccttctttaagtagccttcaacagcttagctatcttgatctttcatcaaataaccttactggggaaattcctcctactttgggcacatgtcagcaattagaaaccatcaacatggggcaaaacttcctctcaggaagcattcccacatctttgggaaaccttagcatcctaactttgttcaatctttcacataacaatttgacaggatctatcccaattgctctaagcaaactacagtttctcacccagttggatttatcagataatcatcttgaaggtcaagtgccaacagatggggtattcagaaatgctacggccatctcacttgaaggcaaccgacagctttgtggaggagtactggagttacatatgccttcatgccccactgtttataaaagtaaaactggacgacgacattttttggtcaaggtattggtccctacattaggcattttatgtctcatatttctggcctaccttgcaattttcagaaagaagatgttcagaaagcagttaccattgctgccttctagtgatcagtttgctatagtttcttttaaagatctagctcaagctacagagaacttcgcagaaagtaatctgattgggagaggaagctacggttcagtgtacaaaggaacgctaacccaagaaaacatggttgtcgctgtgaaagtttttcatcttgatatgcaaggtgcagatagaagtttcatgacagaatgcaaagctttgaggagcattcggcaccggaatctacttccagttctaacttcatgctcaacaattgataatgtaggcaatgatttcaaggctctagtgtataagttcatgcccaatggcaacttggatacttggctgcaccccgcaagtggtacaaatgcttcaaatcaactgagcctgtcccaaagaataaaaatagctgttgacatagcagatgcattgcaatatttacaccatgactgtgagaatcctataatacactgtgatctaaagccaagtaatgtcctcctagatgatgatatgactgctcatttgggagattttggcatagcacatttctacctcaaatccaagtcacctgccgttggagattcgagctcaatctgttcgatcggtttgaaaggaactatagggtatattgccccaggtatgtttctctagctgtaactttgtcacttatgtgacagacaactgattatttacatgaactcttaccttaccttgcacatttcacatgaactcagaatatgctggaggaggattcctctcaacctctggagatgtatacagctttggcgtagtactattggagttgctaacagggaaaaggcctactgatcctctgttctgcaatggacttagcatcgtcagtttcgtcgagaggaactatccagatgtgatagatcatatcattgatacttacctccgaaaagatctcaaggagcttgctccagcgatgttggacgaagagaaggcagcataccagttgctgttggacatgcttggagtggcactttcctgcacacgccagaatcccagtgaacgaatgaacatgagagaggcagcaacaaagctgcaagtgatcaacatatcgtatatatctggaatgtagagctaagtatactatacacttcattagtgcgcgtaccacagtgtataaaatggcaggtggcatttacaagtaactgtcttttgttatccatacatttgattataagggcaatgcaagtacaaaatttactcatctgtagacgcgggcagtctccccgtagctgctgtagcctgttttggaggagtttggtgtagaatgtaatctctgtagcttgattcaaaaaaaaaatgtaatctctgtagcttgtaactctcttgccgaaaaatcttaataaactttggctggcatacgccagcctgcgaaaaagcaaaatgtactcacctcaccaagctggttgaaaatagtgctctaaacaaactgcaattgtgactggtgaagagggttagagggaggttcagtatcttcacaatgtcaattggacagttactgcaatgtatttctccaaatagtctgtaactaaaccaacttttgagtaatatctatgtttcaggccaacaaattgcttgccagttctcaaaaaataaaaataaaaatgctgtagtagtttaagaaaaaaatggcaagtttttgtctttggaaggatccgtcaaatataaactgaatcaactgagcaaaagaaaagtaaaaaatattacattccgttgataaactgattgattactctctatgacagattaatcggttagttgtgaaagggtatgtaacctagtgattgcaatgacctgagtagcaccacaaggtcctgagtttaaatctttataggagcgaatttcagattaggttatttgagagctaagttccctatttgatagactaagtttctaattttaaaaggttgcatatatctggttggatgtagaggccagataaaaaatatccttctctaaaaaaaataaaaagaaagactaatcagtcagaatactgatataaggtagagtctctctacctttttgagtcaaaaaaaaaaaatcagtcagaagacaaggtcaagcttagcaactggactaagtacaaaaattttggaattcttttgaacagctgtaatggaaaacctgtctgtttgacggattagaattgttccctttcggagtcatctgttggcttggcatgtccacccaccaatcagctttttctcctacttgctgcgttttgtgtgtttcctttgtttctgtgtctcagtacacgatgaagtagaagaaatatagcatgtttttttttgttaca

SEQ ID NO: 23263 - DNA, 2486 bp, Oryza sativa
agactcgaaatgaggagcaaacaactgcaagcacttaattatagtgccaactatgtttgtactctctgaaatctgtagtatcataccaagaaaaaagttatcctcaggtgcagtgccatcattgtaaacgaagaacaccataccttctatcctctctgcaatgttattgggccgtatccaaaacaaatgttgcttgtttccctgaaccaatttgtactctagcatttcacctgcaagaaggtgcccaataagagggtcgaagaacaagtaacgacgcggtgtccctccagactccacagatctcagaaagtcattagctccatctgcaaaccactcgaatcttcgaacggtagatctagtcggctcgtcgatattgccataaaagatggacgatatcagtgacttggtggcatgggcaattcgcctaggaaagaaggaatcccttgctacttgtttggcctcttgttcttcctggacacgctgcctgcacatgcgtattgtgtcatcacactcttcagcaacacgtttcagcttcttctgccaacgtagcaacggctcactaatgatctgccacttcttggatgtctcaagtgcaagatctaacttgatttgtgccatctctaacctgtccatgtgttcctgcgcacttgattttcgctcatacttgtcaatcatgccagatatgattttgttcactgtctcatgaacgagagcagaactgaccacctcccccatcttcagtaatctgtaggattccctccctgatcaagaatcaatatatactatatcaatcactaaatcaaaagacagaccagtgaattcctaataagtactaacaaagtgcaatgctgtaggatatgaaaaggccagccttctgaattgaatcaattttgtgatataagagatattcatgcagggggcagtgaaatgaaataatgcatgattccatacagaaaaaagtgagaaattcaaagttcaatgtaaggcctaaccttctgggttgaatcaataagaagtaacttggggccttgggggtcagacaggtgcacccagagagagagagtacctagcacaagataactggactgcagttttcaagaatgaacagtcctgtaacacaaggaggtatttatgcaggggggcagtgacgtgcatgattccagggagagagaaaaaaaaagtgagcaagtcagagttgggtgctaagcgcgtctttgtttgatgtgtatggtggagagaacacatcactctagtctaatctcctgttgattcgtcaatcaacttaaaggactaccctctttttgagcttttgaccgtcctaggtgggattgatgatctgccacactcttttagaccggagatttgatggtttgcaatcttgggctaaagctaagcatcagtcgacactgcaaagtctgcaatcaattcagttccggctactaacctttacggcctgtttgaagagaaggaaagaggaatggaagttttaaggagggagttgatagtgggattggtcatgggagttatatttttagtccctatcctttcttttgtttcacatcgaattctctccaagtctcacgaattaacaggcctcctccaggtaagagattggtgggaattggacctcttaattccccatcccaaaccccttcgaattcccaaatctttcaatcaaactacaaacttaaacttccagatatcatacactctcattccccattatcaactcccaccaaccaaacaggccgttagtcctttaccatccctttcacctccttggttgtgcatatacttcgtcaatatagagcctggactaatgaaaatcctcgaaatttggtcggctccttcgctgacccggcaaaaagttaatgaaaatccattatcttaaaaaaaaaaaatctctttcacctcctaaacagaattacagaacagtaattaagcatggaaccaaagaaaaaactggttgcgagatgcggggaaactgagccgtaccacgggctagtgcgcaggcgcatgaagcggccgccgcgaggcgcgagcaaacagccgctctcttcttcttccctctccgcgtcgccgcacgcgccaccacatacggcgccacctagtggtggagttgcagcggatcgacgaatgcaacgccatgcccggacctccctgcgagcgccctcgtcggcgcggactatcgatcgaccagaaaccccgtcctccggcgacggcggcggcggcggccgcggccgcggaggccatggccagccgcggcggcgtgcttgtggtggtcggccttcatgcggcccaagtgtcagtggaagcttggccagcccatcgagggcccaactaaagcccacactaactcacctggttgttacccttcttgcttcgctgccacaatacaactttgtttacaaataaagtcatgcagaatattgtgtatgatcatcgagcacaatattatcatcaccaactggcgtcatcacaccatt

SEQ ID NO: 23264 - DNA, 12690 bp, Oryza sativa
taaccccaaaagaaaggaaaatagaagtgcatgggaatatccaatagcagaaatctgagcgagatactgatatatgctaattttctcatcaccttcaaggcttcaaacatattacacgcatgtaaattcaaatagaatatgacatccaaatatccagtggtgaaactgtacattagatttccagggaatgaacatcaagttatcaccatttactaagttctgcgctgcgcaaacagcagcagcaaatatatggagcacacatttcagatcaatacactcctaataacttggagataactccctaagtcacttcccctgctagaatattactccctttgtcccaaaatataagcatttttatccatattcttagctaaaagtgcttatattttgtgacggggtagtacattttcattctttgaagtatccctatttccctgacaagtccctattacatgatctaaaatttcagatgtagtagatgaggtgctaactgtgcttccttttctttctgagtccaatcgaggattgagccctgcagctggacaggcgcatgcgcagcccaaagatttaagaaatcagagatcacatctatgcgactctgtgtccaatgatcatgtcgtcgcaatagcttcgctttcttggctcctcgaatggttctctgcctcagcatgttcttggataccttcacagcctgaagatatgcaccaccatgtttggacttccaaaccatctgatacactgttgttcctgcattctgacgaaaacaatctacagcccttggcagcatgatcccttccatttgttccaaggcaatgtttgtgtgcaagcaatgttggtcaacaccattaaccatctctatcacagaactctcgactgctgggaataggtcttctgaagagccatggggcgtatagacaaggtgaactttcagatgcggaaattctttgagagaaggtttgctctcaacaactgtgacctgatcttttaacccaggcagtgaaacttggcactgcaaactcacgtcaataactgattctagagaaatgtctggtaaatatgtcttctccatgttgccactactacataccttctgactacgatgcttgcaacacattgggtttgggcggaaccattcagtaactgtactgtgaatactgtcccaatggtatgaatgagaacgtggcacccatgagaagtcctgtgtaggtagttgactaagttccttcctaacagtttcagttgtagacttgaaatgaggggcaaacaactgcaagcacttaattgcagtaccaactatgtttgtgcactctgaaagttgtagcatcatacctagaaaaaagttattcacaggcacactttcatcattgtaaacaaagatcaacttagcttctactcctcgctctgcggtgttatttggccgtatccaaaacaaatgctgattgtttccttgcactaatttgtactcaagtgtttcgcctgcaagaaggcgcccgataagagggtcaaagaacaagtaacgacgtggtgtccctccaaactccacggatctcagaaagtcattagctccatcagcaaaccattcaaatcttcgaacagcagatctaatcggctcgtcgatattgccgtgaaagatggatgatatcagtgacttggtggcatgggcaactcgcgtaggtaaggaggaattccttacttgttgttcagcctgttcttcttcttggacgcgctgcctacatttgcgcagtgtatcatcacactcttcagcagcacgcttcagcttcttctgccaacgttgcaagggcccaccagtgatctgccacttactggatgtctcaagtgcagtctccaacttgatgtgcgccatctccaacctctccatctgctcctccgcacttgaattttgctcatacttgtcaatcaagccagatatgattttgttcactgtctcatgaacaacggcagaactgactacctctcccatgttccctccctgatcaggacagagcaatatatatatcaatcactacatcattatgcccgatagaatcaaaatacagacaaatggatacctaataagtacttaaaaagagcaatgttgtagtatgtaaaaaggccaaccttctgagttgaatcaataggaagcaatttgtggtcacacaggttcaccgaagagtacccagcagacaataactggattgcaatttgcaggagagcttagtgcgaaagacggaaagactgacaatagtgtaagataacagatatttatgcagggggcagtgaaatgcattaatgcatgattctggtgaggaaaaagtgagtaattcaaagttggtgtaagcgagtcttgtgggatgactatgtcatccaggagaatacatcattctagtgacctagtctagtctctagttgaaactgccgtctcttgattttgactgtccgatcctgggctagctaaagttaaatccttttgtcagttgtctcttgtcagtgaatggccatggcactggcttgcttgtcacctgcttacgtggtggtggtcaaaggggtttattgggccctttgtcagtcaaagcttggctggcctatcgaggcccaagtaaagcacatattaactctccatatgccatatggattttccctttttactactattattatgttaataaccctgacctcctctagtcctatagtaaaatggaagaaaataacttgagatagagaggtgtataatagtacaatatcaagatttcagcagaaaatatactcacctcaccaaactagttgaaaataatgatgtaaacagattgcactgcaagcctgaagaccataaatgtgcgtccagctggaaatggtaagaggagagttcagttcagttgcattcactgttcagttcaattcagctggaactgtgcgtccaaactagttaaaatgtcaattggagggtgaaaaggcattattacctctggtatttctccagatattctgtaactgaaccaacttttgagtaatatatgttcagaccggtgaaattgcctgccacactctgtttcacaggattgcaagtcttcttcctttgcgaaagggtccatcagcatcaattataaaatgaactgtacatactagtgacacaattaactattctgaatcatagactaccaaccggtcatgctttgtaattggaccaagtattgggattcttctgaacacttttaatggcatacctgtcttccatatgcattgaaattgttctatttggcaccttatgttggcttggcatgcccacctccacacagacccaccaacagacacaaaaaatgacttggtctcctccttgctgcattgttctgttttctgtttcagcacatgatgaagtcagaatatattattacatatatgcatgtgttgtcttctctcaattcaaaatctcctaaacatatagagtagtttgaactaccatagagatggtacaaatgtcaaactgacaatttctgtaaaaaaaatgcgtgctggatgcaaacaacccaaacaaaaaaagaagtgcatgggaatgtgaagtacagaaatttgagtgagatatgaaattttttcatcactttcaataacgatacatgcatgcaaattcaaataaaatatgacatatccaaatttccaatgatgaaactgtacattatattaccagagaatgaacatcatgttatcatcatttacaaacataagttttgagttagaccaacagcagcagcatatgtagcacacatttcatatcaatacactcctaatgacttagaaatcaactccgtatgagttacttttctctgctagaatattacatttccattcatttaattatccgtgttttcttgaccagtccctgttacatgatctaaaatttcaggcgcagtagaggaggtgctaattgtgcttccttctctttctgaatccaatcgaggattgagccctgcagctggacaggcgcatgtgcagaccaaaggttgaggaagtcagagattgcatttgtacgatgctgtgttttatgaccctgctgttgcaacagcttcgctttcctagatcctcgaatggttctctgtgtgctccgagtgttcatggttgccttcataacctgaagatatgcaccaccatgtttagacttccaaagcatctgatacaatttcgcttctgcattctcatgaaaacaatctactgcccttggcagcatgatctcttccattagttccaaggcaatgtttgtgtgcaagcaatgttgcttatcaccattaattacctctattacagaactcttgatttctgggagtaggtcttgtgatgagccatggggtgtgtagacaaggtcaactttcatatgcgggcattttttaagagaaggcttgcctttgacaattgttccctgttctctgaactcaggaactgggacatggcactgcaaactcacttcaataactggtcctagagaaacaccctgtacagatggcattcctagattgctactttcacagctgtggttctgaccatgctgcttgcagcataatgggttagggcgaaaccattgggtagtaatgctgtgaatattatcccagtgttttttgtggcatgattcagcatatggcacccaggtgaaatcttgtgaaggtagctgagtaagttcattcctaacagattcagctgtagacatgaaatggggattaaacagctgcaagcacttgattacaatgccaagtatgtccacactctctgaaacttgtagcagcatacacaggaaaaaatcatcctccagtgcactagcatttttactgtcaaagatcagcctagcctctattctattctctgaaatacagaagggccgtatgacaaacaaccggtacttattttcagacactaatttatactctagtgttttgcctgcaagaagttgcctgataagaggatcaaagaacaagtactgatgtggtgttcctccaaactccacaaatctcaaaaactcattagctccatctgcaaaccactcaaatcttcgaacagcagatctacatgagccatcgatattgctgtaaaataaggaggacactaatgacttggtggcatgggctattcgtctaggaatagaggaattccttacttcttgttctgcctcttcttgttccaggatgcgttgccggcatttgcgcagtgtgtcatcgcactcttgagcagcacgcttcagcttcttctgccaacacagtaatgaagaatcagtgattcgccacttacaggatgtctcaagtgcagcctccaacctgatgtgtgccatctcaagcctctccatgttctcctctgcgcttgattttcgctcattccagttcaccaagccatgtatgatttggttgactgcctcatgaacaaccacagaactaacaatctctgccattaggactcgatcacatatcactatgcccaatgtaataaagggacagatcagtgattcctgatctgtaatgaattgctctgattatagtagaactacttcagcctgctgagtttgaattggtagaaaagaacctgggatggaaggtattgccaaagagcacatgaagtggcactgtggcagtataagaatctacccagcaggctgagaccagattgcctgaatggcgagctcacaattctgtaatatatactgatatttggaagggacagaagaaagtgatcagattattgtggaattaatgaaatgttcaagtgggcctcttcggccctccgctgatggctcaaaaaagaagaagaaaaaactattgtggataggaatggattgtgatacccaggacttttgagggttaatgggtcaaaagtggttagcgagtcctgcactcagttggttttgttatattctcaaggagaagaaaatggccaaatggggaccatttgctacaacaatctcttgcgatgaggtgactggtctttgtcatttggttaattcttcaatgacccttgtcaaactctggtcattgtttaatcatttagggagaagaacggaataatatctagtccgatgcctggcatcacgttttcctcgtacacgaaagtgaaatcagtttccctttcataatgggatgtccttttctacagcataaaaccgattagacggtagtatcttatcactattgcagaaaatgtgaaagcaaacgtaagtaacttctaaagttgttgacgatgcaactacctataaagcacatccatggtggaaattaaattgacccctagctaattttactcccttagtatgaacagatggtagaaaaatcaaattgatccctcgctaattttactccctagtgtgaaagatggtagcatcattcgagcaggcggtgaaaaatcttctccatcatctgacgggacgccggcggtaacaacagtaaaccaaccggagatgcgagtgaaccgagcgtgcatacctcgagcgctcgccgcggcggtagtcggtgggtgcgcttgtgcttgcgcctcctcatctccgtcgcgccggggcgcagctagcttccccctccatgctccgcctcctacctccccgtgccgccatgcgcgcggcggctgcggcggcggcgccgccgctcgccgccagcgctctcggtcaccgcggcagtggactgggccgaaagcaacagcttgaaagcctcatttggctaggccgaaatgacagcccgcttacatagattaatacacgtgggtgggccagaattgaggcccatccaaataaggcccaagagataaatattgctcatctatttcagcaatgagatagtaatgccgattttgttatatatttgtcgacgtttttttctaaaaattatattgaaattacaatgaaattttttctgtcaacaaattttgctatatataaattacaatgtaattatattgagattgtactatatttacatttgtcaaacttttagtacaatctcaatgtaatttcattgtaattacatgtaactatcatgtaattttgaaccattcgatttgctttaaaattcgtgtatgaaaaaataactaactgtgacagaaaaaaaataagaactgaacaatagctagcagatgtaaaacatgtacatttgcattgaacatacaggaaattaattaacatagactggcttgtcaagagtcaagactaagatgggccttggctaaacctaaacacactggctcgtactagtacaatattatacatcttttaatttgaaggggaacatcttcagtaagcatatacataatacatgattaaactgtccgcccctaccaaaacttacactagttatgtcttgtctttgatactctcctggccttggatctgcaactagaattggttttgcagctccggatgcgcggcttcatcagacaaaggtatccataaccatgaactgaatgaaaagacagtgaataaaaccccaagtcaggttgacagacgaagcaatccattaccttgggcactaacactgccatctcctgcatttcgtgcagactagcatacatacacttatcagttgctccccgactactgtaactcccccgattggcttcagggtgcgagaaatgaggcgaaatattgatcaccatcttcaggatagaccaatccctcacaatattgcttgagttgtacaagtaattgtactcaacagccgaaatgtagctgctgcagcgcacatagataacttgttctggaatatcatatggtaaattgggcgagatggtgttgtcagcacaaggatcgagcctcttttctctgcaacaaaatggatcagggcgagcaactgtagctcgaaaggcaagaaagctccgatggtagtccacggcctgaagtgctagcagtggttcgaggtcttgaggatgtgagtgttgtagagcagcaagttgaccaattgcatctttagccaaacgcgtgaaatgaggcccaagtaactgcaagcaattgatgataatcctaactatgtccgtgctctctgagagtcgtagtatcagcaacagacaaaaatttttcagtggcattctgctatcctccttatttaactgtatcaatgcctctacgccacgcccttcaagagatacaggtactattgtaataccaagggttttgcttccttgcaatggcatgtcatacttgagatgtttcccttctagaagtggtctgatgagagagctaaaaaagttgtagtgccaaagtgtacggccagtctccacatccctcgcaaacttaccagccttctttgcaaaccattcgaatctgcgaacatgggagcaactcaaaagatattgcttgttcatgccaaggaaagacaagacatatgatttcatggcttttacggcttggacaaactgcttgggaaaatagctgtgtgttaccccttgctcttcagcaacttccaaaatccgcaccttgcatttctccaccacttcactgcactcctcataggcacgtttgaacatcctcctctgacgaagcaaggaaacatctgtgatgggtagctttgaagatctctctagggcgtgctccaattgagcgtgtgccatctccaacttctccaagttgtgcctctcggacaccttctcccggttgctggacaagtaggagacggctccgcccaaaacctcttggacaacagttgaggccaccatttctgccatgaggactgtttctacagaaaaaaaaaagaaaaaagggagcattttgacagaagacataaagtgaaagtgattaggttgcagagagagctcgaaatggggcaccatattcgcttaagggacgtagaaattatcacattaattgaagaaaaaaaaagtaaagatattggccatttgatcgtgataggtccaaattataatgatatagattgatcgatatagttgtatataaaaaatacagccatgtctatataaatagtagaaagtaagagttgtctatcaagtatcaaatccaattctaatgttagaatctgttatatacaaattacaattgaatctaagaaacttaagctaagaattgttactaaacctgatcctacttttgaaatctaggtctgctcaaaattgcgcagggaaatcctctaaattatgttacatacatacatacatacatacacacatacaatatgtgcgcgcgtgtgtgtgaagctgtttttaagaagttaaggacaaagtgatttatatttaaaaattataagatttaaaaggaaaccaatttcgggctctcaatttagtggtatcctattaatttaatgaaattaaaaattgacaattagcaaattgtaattgatgtctattcttctttcaatctaagcttataattcactcccactagacggatgaatggatagaaggtgagtgagaaaggaggaactattactagatatgtagtggcagcaatttattcactgcttttcctattaagatattttcttgaagtacccagttagtataagtataggtagatggtatgcataataaaattctcacctttgcctcttaggctcttactaaagaaccgagatactagccactgatcccaactctgagaagatttggaagctggccaggtcacatgcagagaattggcctagtggcgtactggtgttattgatttgtattgatggacctggacaaaccatgcatgtaggacagtaggagtaagcagctgtcttacaaatgaactaactgtctatatatgaagaagtagagcagattgagattattgtaatattactaaaccttaataatataatgagtattcaaaaaagtaatattactgaagttgaacatatgaaagacagaaagagacatgaaaagtttccacgaaggaggaggaaagttcctaattaagatgtcacattcacccgcaaaaccgtaggaagttgcaaacgagggtagatttacattagcatgggtttgtctaatctgtgtttatctacttaagcgcgtcatttagccaaaaattctgtaatcaactatgccatttccgcatttcgtttccaagataggagtaatcaatacttgaatcgttctcccaaaaagaaaataaaacaatccaatccttatcatgctcgctggcggaggctactcagtcatcgacaacaaatcttgaattcttaagatcatcacccaccctaccacttcttttatctggtgtttgttgttacctaatgatgatgggatcatgtgacagaaggtgccttagttccctgcaatttacgatcatatagataaataggataagaccctatagataaatgatctcaattaacgcgaaactacgctataatcgcatcgatgaaaaccaaagtggaaactaacacgcgcttatattaatttattagacccaaaactcagtggaaattataggagactactagaatgaatcaagcggaaaatgaaattgagaaatagtagttggtgcatgtacttgacgcgcggtggcaggtgaagcctccttcatcctcttcaccctttgcctccgcggcttctccggccgccggaggaccgcctcgcctcgccggacccgtaccccgtcgtggtcgacggcgccaccgccgccgccgccttcctcatcgccgttcctctctctctccggttcttccccttgtgactcttacggcctataatactatgggctttatctaatgtagtgtaatgatgggccgggcccattagcgcaatgggccaataaatttaccaacctcgaatgaatttccgagaatttcaggcaaaaatcaaaaacttttctccgaatttgaaatcccaattcgaatccaccggaaggggagaggcggcgcgacgcgaatggcgcggcggcggcgggagaggcggcagctcgctcgcctctgcgacctcgtcgcctgcgcactcctcccccacctcgtaagcagctctctgcactggcctctgatgactctggtctcctagtcctagcctatcactccgtgcgcgccgctcacaggaacccaagccgccggccacgcggctcacacgggaggacgagcggcggatcctcctcgcgctctcccgagtaatcctctcactagggttcgcgattgttactgctgcgctctattgcccttcccttccgtgatttttttgggatttttttaggtaagtaaggcgattcgaggatgggaagaggaagaggaggaagaggaggaggaggacgacgacgaagggtgcgaattggatcaggtattgcctccgatagcctttttttggtcagtttgattgttgaactgctgtaggtttagtcgaaattatgcgactgactgagcatttgctttatattggggttgaggaattagaacgtaatgataaaatctattattagcacatggctttaaccctgtagtgtaaggtatcatcacggagcagagagggagtggtttgggattgtgatgatgatgtagaatggcttgtgaaatgtctttatggcatcaaattacttagttcatgtagtaactgatttctgttttgtgagggaatttgtttgattctgtcactcaggttccaagtattacattcatttgtttcttaccctttttctttaggagattatttcatgttccgcggaagttcacagttgcagtttaccagctaaccagcattttgatgatggatttagctgcctggccaatattatctccatattggtaagaatatttcatatacagctttgttgcgtcagccatcaactttccaatcatagtcagcgggatcctcatatggtcccagttcctcataaccacctgttacagtattaaatatgaagtgcacaatattacccttcgtccctgccattgagcaatggctctttagactaaatacatctggcactttttatgctactatgaaccaataagtaattgttggggtctttgggaagcgaagggttctgggtgctagtgcctgactgcctgagtcattcattgtttatatagcaacacaaagacaatgagcaacactggattagtcttcattttcattaaccttaatcttttacatttgttcaggcatattggcatcaggatatataagtagggcataggcgttatcccgatcacctgtgggtctctatcaacaactttgaatcatgtcatttgatccgtaagtagtgttaatgtgtcatccactcttaccaatagaaaagggaggcatgaaaaaataacaacaaaattaaccagaggaagttgttgaaactgtggctccacaaaaattttaaactacgtatactgcttcagaattagatattattgacaattgtggtgactgtatactgttttattacatttcgtaccctcatgctttttttcttcaacagcttactttgttagtatatgacatcatccttttcaggttggcttctttggtttctgtagcagttatgttaaacactcagctgggaatatcctgattgtcatctctgactctctaatgaagtttgtaagcttctcatgctttctcattttcaatctgatccacacttctctctcaaaaatatttattattccatggttgttgctctattttaggaggttgtttggattcaatttgttgagctggtctggatagctatacatacagtatcaacatgcgctcatagtgctttaccttctttaattgactccatcagcagtttcagaaaagactcgatttgggctgcaggaa

SEQ ID NO: 23265 - DNA, 2242 bp, Oryza sativa
cactattttaaagttccttaaacacactgataatgaactgaaagaggacttcatttgtatatctgctcatcatattcttatggttgattgggatttgtattatcaactcaatgttggagaacctctaaaccttgtcaaggatagcacatttagcttgagtgatgatttgaaacagttaggatttctttcaagcagtctcctccaactattgtgctctttacttgagcaaagtgacctggaagacaacaatggacaagatatctatgctaagcttgtaggtgtaattcctaagttagtggctatattaccagagcatcaggatgcccccaaaagtctctctcagtacttaaagcacaaatttctggtaatttcagacatgcaaagattttctattactgcactgacatttttgttgcttttcattttttacgaataagaattgtaaaacagtttttgattaatcaggtgcatataaagttcttctatgaaattaaacattttgtttttggaccatcatcagtctgctatttatttttcaatgcagatgataatgatgcggctaaagccttacatccagaaggattgctcatatattgtttgctgcctgaaattacttcgacaacatttccaggatcttcttcatgaacctataatgcaacatattgctaaaccagaaaactgtttggaaggatccccatttttgttgagcactgtaggtctgggtgagactcatgataaatccactaggcacttacaaagacaggctatgtatttgtttcttagcttttgcatatgtttggctcacaatggcaatgacagtgcactgcaatgttcatgcaagagagacgatcaaatgcttggtcacaaagttctagactgcagtgatcattgtgactgttttgccttatcagaaatttcagactggtttcagagatgtttcttagataagatttttggcttcaaatcatctacagacaatgctctgtgctttctgcagttatatatggaggaggtatgcatctgttacaattgcctggtagctaattaaccttgatcaatgttcaaggtagaaaatatgtttcatcttgttggttttgtttaagtagtttttggtaacttggatttggcagtagttgcaagtatgctgtagttgtcttcggaagtgggttgttgtggacataatttgtttccttacagtaggatatttctcatacatttatattactctacactactatagagttgcctgttatgtttggcataagccccagtgaaaaggcatgttagttattacagagaggtgctaatgcttttattccagttgtatttgtcttctctgcactttctgtttttccaaaccaattcatctagatgcttaagttatttgtcagctaagtttgttaattttcctagtgttaagtgttaacataatactgatctgttcctttatactttaggatgacatgctgttcaacgttctcttacaacttcttgatgctccactcatttcctcgaaaatgtaagcaaagagtaaagcagtttgtcttagaaagttatccagatctgggtgtagttaaaagttatgctctttttttttctgaacttgcagagatagcatggagaatagatgggcttctgaactgattggtggcaaactgttctcgagcatttttgacccagttcatgttttccatctcttgcttttattggtgagtcagtgaaaatacttttacttcatgtcactaggtttataagaagcacaactctctgcatggtggattggtggcattttaaatttcagttcttgttcatttctctgcacaggcatactgctgtatgtagtaaaaatatagtagcaagctttagtaatcagcagtgttcaaaactgtttaagataggggggcatcctttactatttatttggttgcggattccttcttaccgtagcttgtactcaaaaaaaaataaataagacactcttatttatgttccatgttctttcaagttcagacaatcatatggagggttatacaatgtgtaaagggacattacaaacttaataaagtctcatgcatttgctggctcatgcaccattacttttctgtagatttccaatttcttcttctgattccactctacaatatgagtcttgaggataatagtatttgtttattttaatgtcattctgcagctgcactatgatcacttggtgcttgttgattatctgatatctaaagatgta

SEQ ID NO: 23266 - DNA, 1679 bp, Oryza sativa
aaatttgagtagcatgttgttacatgctactcgtggaatgaccttctggtaatcagtttatcctttgctctggtctttatgttgtatggtccgattcatgcaacaaacaaatgttgaattaatcttctgttctccacaaggctcatccgccgtttggcatccttgtcagggtggccgctgcaaaatggaggtgcaatcagcttgattatcttctcttgatttactagtatacctttagccctacttttctgggcctaatttcatgttgcttatgagttacatgaaccattagcagtgaaatactcattctcctgtctcgccttaaaactgattgatcattttcatacgtgaacactagcctgccccttgaaacgaatgaaattatcctgtacatgttactttctaactgaactctcctgctacatcaatacatataaggcatttcttgcctaagttttcaaaacaagaaaaagaaaagaaaagaaaatgaatgaacgaatgaatgttacttcactagctagtagcctagtacgaagtactatttatttaactagcgtgcatatactagttactttgatagattgctacaattcgatagagaaaatgtgaaacttcttaattgatttgagagagaaacaataattttgtagtgttctatgtagtgcagcttggtgagcctaacgtattggactggaccagcgctagagctgctacataaatgtcatttcatattggccaagttttatagtcgtatctggctaactaacccgtacgttggtttcgccgtggtgtgcggctaactgttcctactatatgcgccgtgacaagtgactcaaatatgtttcttttattccatttgcaggcccggattgacttggtcagtcaggtacttcgtgcgatagacaatgcacggtcagagaaggcgagagagcaaagtcattgctccaagacttccattgcttgctagtctgaaagcaaagcttgtgtctcattcagaatgaacagcacataggctggcctctccgtgcatctatataaactggccctgatcaatctcatcttccatcagagcaagctcatcacttcctgcaaactaaagctactcttcagtgggattgcatttcgaccgagctagagagatttatagctaagccaatggcatcacaggttgagagccaccgtgccggcgcggagatcgtcagtggagacggcgtcagcaggaagaagtccatcgagctgctggaggagctcggcctccccaagggcctcctgccattggaggacatcgaggagtttggctacaacaaggaaacaggattcatgtggctggtgcagaggaagaagaagatcgagcacaccttcaagaagatcaagcagaccgtctcctacgccggcgaggtcacggcgttcgtcgagaaggggaagctgaagaagatcaccggcgtgaagacaaggagctgctgctctggctcagcgtcgtcgaggtctacgtcgccgatgcctcgccggagaaggtcaccttcaagactggaactgggctctctgataccttcgatgccactgcttttgctctcggggagtaagaactaaggtctaatgagtcggctactcctatcgtctaaattatgtaaaaggcttaaagccactttcttacatcaccatgtactggtgtatctctg

SEQ ID NO: 23267 - DNA, 3299 bp, Oryza sativa
ccacccaaaccctcgctccagcgacggcgagcgagccgcgtcctcccgcatggcgtcggcgccggagttgatcgacgacatcgccgccgagatcctcctccgcatcccgccggatgaacccgcgcacctcgtccacgcctccctcgtctgcaagccctggcgtcgcatcctcaccgaccccgccttcctccgccgctaccgcgcattccaccgaacacctcccgtgctcggcttcctccacaacgttgacggcaacaaggcgatctcctccgtcccccgcttcgtccccactaccgccgcgtcgccattctccccaccggccatcgatccccccaactggtggtgggcgctcgactgccgccacggccgggtcctctcccacctcttcaatcccatggaactcatggtctgggaccccatcaccggcgaccagcatcgctttcctctgcccccgcacccgcacgcctactgcactggcgccgtgctatgcgctgcaagcgactgccaccatctggactgtcaccaaggccccttcctcgtcgtcttcgtgggcacaggaaggcatgatcactcatgggcgtgtgtatactcgtcgaagactggagagtggagctcgcaggcctccattgtgctcgattcctatgttgagatgttgcccagcgtcctcgccgaaaacacactctacttctactgtgagtatggcacgaaaattctgggatatgacattggcaagcatgagctttcagagatcgacccaccattggggcatgatggtggcatcctcatagaatcagaatatggtgggctgtgatttgctactgtggaagcttgcggcctcgtactgtggtcgcagtatgtgtgttatgatggcattgaggaatgggaacaatccaggataattgagttggacatgctgatccctaacttcttttactcaggtggtctggttggtttcgcagaaggcacagatataattttcatgttgacagatgttgacttgtttgcaattgagctcaaatcaggccaagtgaagaaggttggtgagagcaggccctactatgccgtcattccctacatgagcttctacacttcaggtaatagcctagatcttgtacagcttgccttagttgaaatttcaaaaattcagactaggcattgtttgagttagtggcttaaaaagtatgggttaccacatatatgccctgtgcttcagaacagtgtttatatatatatatatatatatatatatatatatatatatatatatatatatatatatatatcaaaattcaatgtcacatatcacatagatctctgttgttcttacccaattttttgtttggttctagtacatgttacgaaatgttcctgaaattagctaaattgcctaggcatatcttgatgacttgatctattatacatttatacttccccaaaaagtattgcatgccttatttgggtgttcatgttgagctattatatatggttatgagttctattctttgcatatcttcagatcttgctaggaagaggttagcgcagccagctggaatgcagtgatccattcagaccgatccattgagctgcttctaccttacagagctagtcctttgaactttaagtcttctttttttcttttatcctttttggtggggagtggaagtaagaagaaagtatgtgatcgtgcgcaatgaaaatgtttgatttcagtttgtaatgcaagtgagaaaggatgactcacgcaacttgtttcttctcgtttaactgcttattatcgttacccaggatctatctttcaggtttacatttcttcttatttgagacaatactcaatccatgactgggaagccctcttggaactgatatattgaatattccgtttttgcacgtgccctagtgagtagtgataaatttaagtggttgactctgtgtagtccagacttcgaaaccgggagatttgactacatttaaactgctgtaatagcttcagttaaatggagctgggatttttggccatgttattctaaaaaggatttgactgtatgactcatcattcaatgttcttaagtatagtaccaacaagcctgccatgaggaactccatgcctttagtttgtcatttgaagtaaaatacagcagattgaaagctgtcaatgttgtggttttgcacttgtcttttttttatctctttttgttcctgtagctttttctgaaaacaattgagtggaaataggcatatagcacattcacttgatgtttacttaatgctttaacaaactacatagttttttttttggtctcctgtagcctatcacaaaccatgtgcatcagtctcttgacgtattgattattcctaagccacagtgtggcgcactagcgtatatgaccatatgcaaatagggcacctgactccctgcatttttttaggctgaatttgggtaggtgtgtttgtttttttgacacagatttgggtaggtgttcgttttatttaaggatgaggtttatgaatttgcatacggtgtttgtaaattaacttgatgatgacaggtcacttgcagtccttttggtggcatggcagctttgttttcctccaagctcaaccttttgttgtgtgcaggatttctatatctgcctttgtgaattgtgatcataacttagttttgttgccttcctctggctcggattagttaaattaatattgagctagtaaacttaaactgatgaaccttactaaatggatgttccacaatatctatttcatctggcaatgaagttcattagtgcatgaaaaacttacctgtttgctataattatgctttgcctttgattctgatgctataattatgttttgctcttgatactgaccgaagtgcttgctgcaaggcatgcagtgttcactggcatctctaaaggaactgagggcatgaggtgggctgcaagagaaagttcctcacgacagaaggcaaagctaatgactcttaagctttaggaattcacaaggtgagtaaggatggggtgttgcagaacaattcattgtagtcaatccaatgcggatgctgtgttaaccctttaaattgtttttcacatcgctgaacacacaaaaaaaacttgaaataatatgtactcaagttgtttagtttgagcactacagtctatgtgattctttttttagctaaagctatgccagttattatcactagtagtagaatactatggggatcaacaatcttgtatgtctgaactctgaacatcatttcagattgaacacacatgcattatttatctcaatatgtattgcta

SEQ ID NO: 23268 - DNA, 13020 bp, Oryza sativa
attcctgcagccctgatgttacatcagttggtttagcatcgttttttactatgatgtaggcgtgtcaacatagtgtgtgggtagttctaaagctgaaatctgggaagtaatttgaactatcggagtagtagtgagaattcctgggtcaagtattctagatgggagggttggaaagctgaacttattttcgccgggtgaaagctgaacttattgcaatgtagttttctgtttagctggtagtgtaaaatatacgtgttcattctaatactagtgtttactatgtgctcttgtaccagttgactttcaatggacagccatggtggaatggccataggcgcatctgatctgtttatgcgatggtgattgacaggaaggaggcatcatccctcctgatgcagtaacttgcgggcgatacttcgaggcgaacaagtgtaacaagaagaagtgatcagccacatgatgggtcagtgcctcgctttgtatgtgccgtgcatcttctttcaagacagaaagttaagagttgaagagcaagaaattcagagttcgcaagggaagatgagagctctcccaggagagaatcaaaagcttacatggaactaaaggtggtagacttcaagaatattggaagtgatcagaatagagccaaatcttgtaattacagctattcatttgcattactttgactcgcttgtgcattcatcttaggcttagcaggtttgtaaaatttctctcttgaaattgtattagttggtacttgtaaagtgagcatactttacgaacctgtactgtgcaaaattacatggactgaagttgtatgaaagtgtgtgaaacttgaatgttagcttgttttcgaagaacgggaagtagtattcatgctagatcatgagcccagcgaattggaccggaccagtgctaattggtcagataagtcatctctggctggctgcccagcgtacatccataaccgtgctgtgtaacattgcttgctgagatgctgaagtgtgtagtattcatcagtggatggacttggtcaggaactttgtgctacgtcagagtgaatatgcatggtatggtcagaaaaggctggggtacagttgtggcatgactcgaggctttgttcttcacgacttgaaatccaaagtccataatctttgcctctacagtctgaacaaatcttgtcagaatgaacaaactttcacaattctatataaacagaaccccacatctcatcttccatcacaacaatctcacaacccatttgcacacaacccaaatttcaaactaaaacttcttcacctgaaactacatacccaatggcatctcaaattgagagccaccgtgccagcgcggagatcgtcaatggagatgccatctgcaggaagaagtccattgagctgctggaagaacttggcctccccaagggcctcctgccattggaggacatcgaggagttcggctacaacagggacactggattcatgtggatggtgcagaggaagaagaagatcgagcacaccttcaagaagatcaagcagaccgtttcctacgccggcgaggtcacggcgttcgtcgagaaggggaagctgaagaagatcaccggcgtgaagaccaaggagctgctgctctggctcagcgtcgtcgaggtgtacgtcgccgaggcctcgccggagaaggtcaccttcaagactggaaccgggctctctgataacttcgatgccactgcttttgctctcggggagtagaaattatgaaagaccataatctcaactgtgtaaaaggattaaagccactatcttaggtcaccatgtacttactattatctcttttgtattacaaacattcgagtatagtcctatatatatttgttccctttcatcataaagagaaaagaaaaaaaacagtgactaaggactaacgtgcacattgtcattgctgtttaaattgctgaaaattcttttgggtgccagagttcgaggtgcaaaacaaacaaaaacaaaggacccttcacccttgtactcaaactgatatgagcatattatccctgccaataaataaataaataaaattgagcatattatgagcagctgtgattgtacacgactctcatcgactcgtgggccccactcgagacggttgtcttgtccaccaccgccttctttcctctcgaccccaccccaactccaaattcccaaaccctcgctccggcgacggcgacggcgacggcgagcatggcggcggcggcgccggagttggtggacgacatgacctacgagatcctcctccacatcccgccggacgatcccgcgtccctcgtccgcgcctccctcgtctgcaagcgctggcgtcaactcctcaccgatcccgccttcctccgccgctaccgcgcattccaccgaacacctcccatgctcggcttcatccacaacgttgaccacagcagcaacagctcctacatcccccgcttcgtcgccaccacctccccctctccattctaccccgatttccctccaccgagcatcgagttccccacctactggtgggcgctcgattgccgccatggccgcctcctcctccaactcttcaatcccatcgacctcatggtctgggacccgaccaccggcgaccaccgcatcttccctcagcccccgtacctggacttctactgcactggggccgtgctgtgcgctacacgcggctgccgccatgttgactgccatggaggcccctacctcgtcgtcttcgtgggcacaggagaggatgaccactcatgggcgtgcgtgtactcgtcggagactggagagtggagctcgcaggcctccattgcgttcgattcctatgttgagatgttgcctggcctcctcgtccaagacacgctctacttcagatgtgagcgtggcaagagaattctggggtatgacattggcaggcatgagctctcggagatcgacccgcccccattggggcatgaggttggcatcctcatggaatcaggatatggtgggctgggatttgctactgtggaagattgcagcatcctactgtggtcgcggtatgtgggtgatgatggcattgaggaatggaaaaaatcctgggtaattgggttggactttctgaatccggtgggtaacccgtcgttgtcgtgggaactggccggtttcgccgaaggcgtgcataccattttcatctcatcagagattggtgtgttcacaattgagctcaaatcaggccaagtgaagaagctgtgtgaggagggctactataccgtcgtcccctacatgagcttttacacttcaggtactagcctagatcctgtacagcctcccttaaatcggaccaggcattatttcagttagcagcgtaaaagtataaaattacgccattatggatatttgactgtaagctttagttttcagttatagcgacttaaaaagtatgagttgccatatatgtgctctgtgctcaacaacattgagtttataaaaattcaatatcacataaagtattaaattctgtttctcttaccttgttttttgtttggttcgacatgttacgaaatgttcctgaaattagctggattgcttaggcatatcttgatgacttattctaattctactatttttcttaagtatacattccagaacaggactgcactacctccaaaattgcatgcctcatttggatgttgatgttgagctatttcatggttataagttttataattgtgtattttcagatattgctatatggaggccggaggaaccagctgaagactgaagtgcagtgacccatccattaagcttctggtatcttacagagctagtcctcttattatcttttaagatggggagttgaagtaagaagagagtactatgtgaccgtgctcagataagatgtttgatttcagtttgtaatgcaactgagaaaggatggctcacacagtgaacatttgtttcttctcatttaactgcttatgatcgttaccatgcatatatatctttgaagtttacatctcttcttatctgaggtaatactcaatccatgatttggaagccccactttgaaccgatatattgaatcctttgttattggctccttgctctgatgagtagtgacaaggtttgagtggttgaccctactaccctatagtagttcagactgtgaaaatacagaggttactgacttagtgttctttttattttggggagcacatggtttagtaaaaagtaaactgaataataacttgaagaaatcgtgaatataaaaacctgtgagatttgactggattttctgttatttaaacttttgtagaagtttcagttaatagaactggggttttaggccgtatcatcctgaaaaggattgggcagcatgactcattaaagcatgaacttgatgttcctaaatagagtagacactagcctgcctgccatgaggaactccatggcattaatttgtcatttgagatcactcaatataattatataggagtaagattgaattgcattgacagcagagcactttgccttctggtgctgattgattttgatattattctaaaatggatttggctctatgaatttgatgttcttaaagagagtagatcaaactagcctgcctgccatgaggaactccatggcattagtttaccattcgagctctatataattacacaggagtaagatgccttctattgctgattgaagctgccaatattattactttgattttgtgatctgccttttgttcctatcatcctatggctatttctggaaacattgaattggtggtgctaggggatatggcactagtgtctagtactgatcatgaaccaaatgaattggaccagaccagtgctaattaattggtcagataagtcatccctggttcctcccaaaaataaataactgaatgaataacagtcatccttggctggttgtatagtgcatgctgggatgctgaagaagtgtatgcactacataattagtggacttggtcagggattttgtgcttcagaattataatttgcagttatcaactgcatggtcagaaaaggctggtttcaattgagaactctatataaacagaactcactatctcatcttccatcaccaacaatctctcaccaacacatttacaaaccaaagcattttttttggcctgaaactacatatccaatggcatctcaaattgagagccaccgctccggcgcggagatcatcaatggagatgccatctgcaggaacaagtccattgagctgctggaagaacttggcctccccaagggcctcctgccattggaggacatcgaggagttcggctacaaccgggacactgggttcatgtggctggtgcagaggaagaagaagatcgagcacaccttcaagaagatcaagcagaccgtctcctacgccggtgaggtcacggcgttcgtcgagaaggggaagctgaagaagatcgccggcgtgaagaccaaggagctactgctctggctcagcgtcgtcgaggtctacgtcaccgaggcctcgccggagaaggtcaccttcaagacgggaaccgggctgtctgacaccttcgatgctgccgctttcgcgcttggagagtagctttaaggagtcaatcagctactataagctagtagaaatgatgcaagactgcaagtccttaatcttaattactatgtaaaaatggcttgaagccactatcttacatcaccttgtactgttatatcttttgtactattacaaacatactcctacatgagtatattcctgtagtttattattttttttgaacgagtatattcctgcatttgttcctgttctgagaaacaattgttttgcacaagacaacacaagtcaagttgattaagcaacactggaacagggcacttacaaaattgtaagcttgaatctttaggtctcctttcccaaaaagaaaaagatatgcagagactaacatgcacattatcactaacttggagtgggtttcaacttgcagtttaaactgataaaagttctactggttcgagtttaaggtgccagctgcgccgtgcttataactgggttttgttcgtcttctctgaactttgcgatcaggttctactgtgttcatcaatagatgatgttggtcttttgacagtaatctgatatttcatctcatttaataattttgcacaaatatatataaaaatatagtacatgcttaaagtgcctttaaaaataaaccaagtaaagaaaatgaccattacatatgttttaaaataagacagaggttaaacttatgtacaaatattaacggtgtgatctactccatccgtcccaaaatataataatttttagcacttcagatttatcctaaaatataacaacttcctcaccaacatttccttcccaatcaatcacaaccctctaccattaacttttctcatctacctccacttcttaaccaatcacaacacattcctatttaattctatctactttcttaataaccttgtccaactctaaaattctctatattctgggacggaggaagtattgaaaaaccggctgcccatttttcggttagttataattttgggttgatccattgtcacaatgtgagggcttccttttcattttcgaagtaaaaaaaccgctccccaccagcttacgaaaaaccaaccgaaaaccaataaaaaccgatgattttcggtcaacgccgtacaaaaaccagctaataccagtcggcttccacaaactatacctagcggtttcacgaaaactgaccggttttttactaggtgaatttggaattcattcctatgttcaaactggccggagcgcagctgtgattgtacacgaaaggagtcccactctcactgacttgcgggccccacttgacagcgactcccgtcaagccaccaccagcgtcctcctgcccgcgacgagttcatcgcctcctcaccacccaaaccctcgatcgctcgctcgctccggcaatggcgtcgctgccggacttgatcgacgacctcaccaccgagatcctcctccgcatcccgccggacgagcccgcatccctcgtccgcgcctccctcgtctgcaagccctggtgccgcatcatcaccgacccggccttcctccgccgctaccgcgcatttcatcgaacacctcccatgctgggattcctccacaacgttgacggcgacaaggcgatctcctccgtcccccgcttcgtcccaaccaccaccgccgcctcctcgccgttctccccaccggccatcggttctccccactggtggtgggcgctcgactgccgccacggccgcgtcctcatcaacctcttcaatcccatggagctcatggtctgggaccccatcaccggcgaccaccatcgatttcccgtgccgccgcacccgcacgcctactgcaccggggccgtgctatgcgctgcgcgcgactgccgccatctcgactgccaccaaggccccttcctcgtcgtcttcgtgggcagtggagagcacgggtaccattactcatgggcgtgcttgtactcgtcagagactggagagtggagctccaaggtctcaatcgtgttcgattcctatgtcgagatgttgcccagcctccttgtcgaagatatgctcttcttcatctgtgagaatggcattagaattctggggtatgacattggcaggcatgagctttgggagattgagccgccattgtgggatgattaccaagggggaaccctgatgacagcggaggatggtggactgggatttgctactatggaaacccgcggcctcgtgctgtggtcgtggtatgtggatgatgatgatgggattgcagattgggaacaactcagggtaatcaagttggaaatgctgatcccggtggataacccctcagtctcacttgatctggttggtttcatagaaggcacacaaaccattttcgtgtcatcggatgtcggcgtgttcgcaattgggctcaaatcaggccaagtgaagaaggttggtgacagcaggccctactattctgtccttccctacatgagcttttacacttcaggtactagtctagatccttattgtaatttcagttggtggcgtaaaaagtcttaaattacgccattatggatatttgacagcaagcatgatttttcagttagcaacttaaaaagtatgggttagcatatatgtgctctgcacttaagagcactgaatttatgaaaattcaatatcacataaaagtgtaaaactctgttgctcttacatcattttttgattggttcaacatattatgaaatgttcctgaaatttggtaattgcctaggcatttcttgatggcttgatctattatactgtttattttttctgaattatacattccaaaatagcactgtgttaaattacatgcctcattttgggtattactgttgagcataatatggttataagttttatacattatgtattttcagatcttgctagggggaggtcgtcgcacccagctggagtacagactgtacagtgacccatccagacccttccgttatgcttctggtatcttacagagttattcctttttattatcatttcagataggcaatcgaagtaagaagagagtatgtgaccgtgcttggttgaggtgtttcatttcagtttgtaatgcaattgagagaggatggttcatgcagtgaacaatttgtttcatttcatttaactgcttaggaccgttaccctcaatcttataggtttacatttcttcttatttgaggcaatgctcaatatggaagcccacttggaaccgatatattgaagcatttgttttttgctttttgctctggtgagtagtgatattgttgagtggttgaccctactacctgttgtagttcagactgaaaatacaaaggttactgctcatgttttttctggagcaccttatttagtaaaaataaattgaataataaattgaagaaattatgaacacaaaaacctgagagatttgactgcattttttgtgctttaaattgctgtaactgttcagtaaaagcaaactgttctaattgtttctgttaatggaactaagggttttaggctgtgttattctaaaaagaatttgactggatgactcatcaaagtatggatttgatgttctttaatagagtagagaccagcctgcctgtcatgagtttgttattcgaggttattctatataattacataggagtaagatcgaatcgcattgactgcagagcactttgccttttattgctgattgaagctgccaatgttatgattttgtttttgtgctctggctttcgttcatatggcactagtgtccagtattgatcataagcccaacgaattggaccggaccactgctaattaattggtcagttaagccatctctggctccttgccaaaaaaaaaaatacagaacaaataaagggtcatccttggctggctgaccagcatacatccataactgtattgtatattgcatgctgggattgaagaagtgtatgcattacaccattagtggacttggtcaggggctttgtgcatagaattaatatgcagttatcaactgcatggtcagaaaaggcgggtgttcaactgagccatgaatcattgagtcatggctcgaagctttgttcttcacgagttggaatccaaagtccataacctttgcctctacagtctgcacatatctttatcagaatgaacaagcagacaagtcttgagaactctatataaacagaaccccatatctcatcttccatcaccaacaatctctcatcaaaccatttgcaacacaataccaaaccaaaacttctttgtgtgagccacatatccaatggcatcacaaatcgagagccaccgctctggtgcggagatcgtcaatggagatgccatctgcaggaagaagtccattgagctgctggaagaacttggtctccccaagggcctcctgccattggaggacatcgaggagttcgggtacaacagggggactgggttcatgtggttggtgcagaagaagaagaaaattgagcacacgttcaagaagatcaagcagaccgtctcctatgccaacgaggtcacggcattcactgagaaagggaagctgaagaagatcaccggagtgaagaccaaggagctgctgctctggctcagcgttgttgaggtctacatcaccgatgcctcgccggataaggtcaccttcaagacaggaaccgggctctctgataccttcgatgctgccgcttttgctcttggtgagtaaggcttaaggagtcagtcagctactgtaagctagagatggtgcaaatctgtaatcttaattatgtaaaaggcttaaagccactatcttacatcaccatgtactgttatataaatcttttgtattgtaatttgctaacatatatgagtatattcctgcatctgttccagtattaaaaaaatactgttttgcacaagaccttagtcaacttggttaatgaacactgggacagggcacttaaaaaatcgtaagctttgtagactagtgcacattgtcagtaactaggagtgattttcaacttgtagtttaaaggcaaaatttgctacgggacatccaaaaaacgtgtaattagctgggagacaccgcaaaaatacttatttgctataggacaccacaaaaaactggtaattagctgctggacacccgtgggattattttactatatccggagaaattggagagagaaaaaatcattaaagacaagtttgcccttggctcaaaggaatccaaacatgggccccacatcgctggtggcttctccgagttcgagtccaacctgcagctgctggccggcggcgagattcgtcaccccgcgcagcctcttcaactgcggcagaagcgcaccgccgccaccggagttctagtatcacgatgtcgcgccgccgttccccatgtccctcgtcgccaacacccacctcagaggcaaaaccaaaatcatcttgttcttgatgatgatttaattcttgctcaattactgatcggtaagtaattcttggttaattattaatttccgtgtgcaggtcgcgagctgagatgctgctacaaggccaacgtggacggcttcagcgcgacggacttccaccgtcattggctgcatggccaccgccgctgccgccggcggggtcatgccgtcatgttcggcaggttcagcccacaggggtaccgaagcacggacgactactacgacacgctcgacgccttcctcttctactggccggacacggacacggatgccgcagcgacggcggcggtcgtgctgccaaaggtgggcgggagtggggcggcgctgttcgactacgcgagggccgcagttcggcgccgacgggctgctcatcgggccgccgctgatcgccgtgatgggggggggaggtgttcacggggcccgactccagcaccggcgccggcgacctccgcagcacgcggtcgcgtttcgggctgtcgtacgcgaagcgctccaccgtcttcatctacaactcggcgacgttccggtggaccaaggtgcccgcgcaacgccgccccaaccgaggtgcccgcactggcgcgcgcctcgctgcgccggtcaccggcgctccctcgggctaaagagagaaagaatgagagagagaatactaacgaaggagtagagaaggatggagaaaaaataaaaataaaaaaaaattcaaagggtagaatcgtacttacacagctgtttctctctccaatttctccggatataataaaataatcccgcaggtgtccaacagctaattaccagttttttgtggtgtcctttagcaaataagcgtttttgcggtgtctcccagctaattacacgttttttggatgtcccacggcaaattttgcctagtttaaattatcttctctgaactttatgatcaatttgtgttgggttctttttttttatcctttcggatggggagatgaagtatgcgatcgtgttcagaggtcagttaagatgtttaatccagtttgtaattcaagtgaaaaaggatgactcacacaatgaacagtttgtttcttctcatttaactgcttatgatctttacccatgatctgtttttcaggttggcatttcttcttatttaagacaatattcaatccatgattgggaagcctaattggaactgatatattgaattgctctagccccactgagtaagcattaaaattacagttctttttttgttttttggttgtacctggttgaccaagtagtaattggtaagctgaataataacttgaacaaatcgtgaacacaaaaactatgagatctgactgaagttgctgccttttaaactgctgttcggttaatggaactggggttttggctgtgttattctaagagatttgactgcatgactcatcaaggtagggttgatgttcttagatatatagcagaggcaagcctaccatgaggaactgcatggcttcagccttcagcttgtcatctgatattttgaatcactatattatactacagcggagcaagatcgaacctcatttaacagcagagcactttgccttcttttgctgactgaagctgccaatgttatgagttttctgcactatattttgttcctatagtagcttttctgaaaacattgaatggatatggcacattcgctcgatgatttgttttatgctttcctgccactctgtaggctgtagcaaacggcaagttttttcagtctcttgtaaccatgtgtatttgcgtcttgacgtattgcttatccttcagatattgccggttgccgggcaccatcagcgaggaaatgagcatgtgttggaccagaccagtgtcatgacaaaagaaattcctgatcagcaagcaacatcgcagagcagaggctagcagatattgtacagtttcaggctcagcccttactgtatgcaccgaagtgatgcagcaactgagaactactcttgaggaaacgcaaattaaccgcaacactgcagaacgggctgcaggaat

SEQ ID NO: 23269 - DNA, 22556 bp, Oryza sativa
aaaacgatggaatcttgtcatgatcgcagcaatggacatataaaccgagatataggctgcatatttactgagcaattctggaaccgaagatctcaatgctgaagatatctggcagacaaattctcctcaaacttatgcttgcccgtttctgttgcaacaaaaccaggccgcatcgtggcctccgccacgtccttctcctctaggcctccctgacgtcacggtcgccgtctttatctctgcaacgacctcgcatggatcggagtcggactctgggctaacatatcagcgaattttaattcccatgtgttggatggaatgctgaaattttgttgggatttcgcaagcgacagagatgtgtttcatgtgtttcaagtggcctgtcaaattgagctaccagcagcctgcaggcaggcaggcaggtaggtttgttccgacaagtgaattactgaacatcaatcaacatttgcaaatctacagactgcagcttacaattcacagttcagtccagctccagcagcaatagaattgactgcaacagctgagaacttgaaccctcagatcgatcgtgcacacgtgcaaattaacttttgaattcgagtctttgagattttcgtctcaatctgttgaaatcttcaggataccttcaacgatacacaacggcactttggatgatactcactgatacaataacaatagttgatgatacatgtttatacttgcttatattgattaatgcacgacgtgacgacaacactcaaggataatgactgagtttttattataaagaacacgggtttcttcatcacactatgggatacactaaatctcagtatcatgggggatctcgcaacatctgcagcctggacagatcttcatcacaatgaacaaacaaattaacatgatacttgggaactctatataaacagaaccctacatctcatcttccaccacagcaatctctcaacccatttgcacaaacaaacacaacacatttccaaaccaaaaacttctcttctaattttctccgaaactactgctccaatggcgtcacagatcgagagccaccgcgccggcgcggagatcgtcaacggcgatgacatctgcaggaagaagtccatcgagcttctgggagagctcggcctccccatggggctcctgccattggaggacatcgaggagttcggctacaatcgggagaccgggttcatttggatggtgcagaggaagaagaagattgagcacgtcttcaagaagatcaagcagaacgtgtcgtacgccggtgaggtcacggcgttcgtcgagaaggggaagctgaagaagatcactggcgtgaagaccaaggagctgatgctctggctcagcatcatcgaggtgtacgccgccgaggcgtcgccggagaaggtgaccttcaagagtggcgccggaatctgcaagacctttgacgccgctgcgtttgcacttggggagtaaggacttggaattaatttgcttgcattgttcgaaatgatgccaaaagtttgtggtaaatgtccgttcaaagaaagatggtagtacttttgttgtttcatgcattaaactcgagtaatcagcagtgccatgtacatgtacactgcgttgtgatcaaatctattattttaaaaaatgtacattatattttttaacaaataggcgagccgccaatttcattgaaaatgtaaggagtaaactgtacaggtccaagaaagtgtacaagctcagtacctttggaccaagctatctataaagttagtcagttgccgaggatttctgcgcccgctagttgctagaacccatgttttttttagagaaaattccctatctagcataaaaaaaattgctcttccctctatagcacccaaacttcaaaagttccctatctatacaccatcaaaatttttgttccctatctatcacttccgttagttttgagggtgacggtgttaagtagcatgaggaaagacggttttgcccttctgtattttatacttttttctctttctctgttcacagtttttttttgttctttatttttttcatttagtgtcctcccgtgccgccggcgctgcactcccatgccgcgacgggctggcttcccgtgccgctggcgctgcccatccgggggagcccgccggcgccaatggccgcccgggggcttgccatcctcgccgcctggctgattcgccgtcctcgctgtcctcgccacccggggggtcgccgtccttgccgccggccatgggggcggtgatctagggttttggcggcgtggatttggtgagaggagcgcgcgggttggggagagcaggtcgcggtcgcgatcagtcctggagaaagagcaacaaaaaaatcctgagggtgggtccatgcttgttttgacggtggaggctaacgggagtaacggaagtgttagatagggaacaaaaattttgatggtgcatagatagggacctttgaagtttggatgctatagagggaagagcaattttttttatgctagatagggaattttctcttttttttattcacccttgatcttggctagaaggctagttgacgggagctccttttgttggaaggtactacgattccttccattccatatctcccagaccactagcaacataagggtccgccacgctttcttggacgcatctttggtatttacagtggcctcccaccactcaagcagcgtcaaggcgttttgccactaggttgtcctaagctggccgcatgctgttcattccgctagtgccgtccagattcttttcatgtatctgcatccccctagtaggtggagggctgtttcctggttcctacgacaaagggggcaaatggagtcattctgccatcctcgtatcacgaaccatatggtatggtttatctaaaaaaaattctccagaatgtgcatctttgcattagagcatcaccgacaacatcccaaagttttggttatgagaatggtaaacagaatttgagatgtcaaaattttcatccctccaaaagattaattaaaattagcttcctaaaaactaaaaagtgagtcccctaggaaacttccaacataagggggtgtttagatcccactccaaaattttacaccccatcacatcgaacgtttgaacacctgcatgaagtattacatataggctaaaaaataactaattacacagattgcgactaatttgcaaaacgaatcttttaagcctaattgctctataatttgacaatgtggtgctacagtaaccatttgctaataacggattaattaggtaataaattcgtctcgtggtttactgacaggttttgtaattagtttttttttgacccaacaccctatgcgacaccttatataatacccgatgtgacatgccaaaactttacgcccttggatctaaacacaccctaaatatttggtattttggatatgggtgaatagccaaagtggtccttcaagttctaaggctcagtctggtccttcacatttcaatctgtccatatcagttcttcaaattttattttagttcaaacttatccttagacccacttaaaagccatatgggtaaacataaccaacagctctctttaccccctcattcacatatataagaaaaaaaaggtcttaccattcatacgatgaaactgtatgacgagaccctccccgcaacacacacaaattcccaacttcctattgaagtactgatatgggtgtttttccattgaaatttgtgtgcaatgaattcgttttcccattttattttacttcagcctgacgtcgcatgacgcatgcgtgcaaactactttaaactattttttcttttaaattatttatccaaatcatgatcatattgcaccattaaattcgttacaattaaatctttaaaacaagaccacacatggatatattccgacaaaaaagtttagcttattattgaattatttttaaatgttacacgctgttccaccaagtatatcggaattgtttcactaagtagatcaaaaatgtttcaatcgtttaaatcaggtgttgtttcaccttatataaaaacaatgtttccgcaaatagcgaaagaatgtttcagttcactgcaacatttgatccatacatagtgaaacattataagtacactatatgaaacattttttgtggagacacgtggcaggtgggggcaggacacatggtggggcctagggggaacgtgcgtgtcagggggcgggggagcactcgattttgctcccttggccggtcgcccgagcagagggaaaatcagttagttagtagtagtagtaatatgatgttttattcacttcatcccaagtaatagaatggaaacctggcaattcaggatgtgttttccctcaccctaaccatggctataaattgcgtgattggtttgataatgggaaaaccttcttcttcttcttcgtgtaaagatctccttcctcgcttaggctttttcaaagtggatcttaggggtttgagtttgagggtaccttccgggtagctttaccttatgcttgctactcaaattttccataaggccacataacctgctatatagaactcaatttttccataaggtcacataacctgctacatggatggtgacactaatttgggagctttcttcatctcttcttggaatgagttctttttattgatcgacttggcaagcatattgcacttctgccttcttttttttctatgttaggctaatgcatttccaattgtgttgtaacattgaagtaagaaagaaacacattttcatcttgggctcctagtctcctatcgttaagcctagttatccgatcatacttctcagaactaaaattttaagcagcacctcctcgtgtcatcatgatatatataaagtcagcaacgccagctattaagatagacttttaatgcgtagatgatgtgatggttccatgatattgttttcatctaacggttgagtttagtaaatgattttgctatgattatgtgttgcccttaatattgacaagagcgcttgtcgtgtcatatctaaaaggtacaagagcgcttgttgcagggccagcgtgtcatatctaaaaggtacaagagcgcttgttgcagggccagcgtgtcatatctaaaaggtacaagagcgcttgttgcagggccagcgtgtcatatctaaaaaggtaccaagggtatgaagtgagcatggcagaagaggttcctctcggcagaaaggaatgctaacagtggtgctagcttatggaatcagcaaggttagtaatgattagatgtaacactatagttcgtgtattcaatgcaataatatatttgctattttaaaacccagctggttatggtcaagttcgttattgttactatattagccataaagatctacctgaactttgagaatgtatagtattattagtatctctatatatcttaatttagaatgcttattatatcttgtaatatatattctcctatggatactagctagctagtgcattattgtaaatagaatgtattgtatcttgtacggtaattagtaccaatagtagatagaatacacttagcattattgtactcctagctccatacttgtttaaacattatttgaaatgattagatattttggtaagctaaccaacgctgtcttttttacttacccttacatgccgacagctaggaggatcaatgaatggggtagtaggccaattagatcaaaaactgagtttgttcttatagcaatatttaatgtgatatgtcttgggctgttgttgtcagcatactatgaagacgataacacagaaatgtatcatagtatgctgcaccatagattggaaagacttagcgctgagataagagtgagatatgatggaaattaagccggtcatcaagtgcccttgagttgataagacttgttgcgggatagagtgagttgtatttgattaaggtggtgtttggattacatggactaattttagtccctgtcacatcggatgttcggacgctaattagaagtattaaacgtagactactaacaaaacccattctataaccctagactaattcacgagacgaatcgattgagcctaattaatccataattagcttatgtgatgctacagttattgtacaaacgaaaagcttcacgtcgaaggacgtggttctctcagtggaatgattagaaagtaaaacattgtattaattaataattttttttgggatccccccattacatggtcctaggggctagttatagtcttagtacacgctcatatcctctagggtttagtgtgtacaggggaatttacatagatactctttagatagggacaccagtgagggcatacaatgtctattctaattatgggcccctaggtgggtcctttggcccagcccataagaggcaaatggccttcatgggccacgctagcttgatgggcttcctagcgaagccagtcttccatggggcgaacccttcatgcttcgccttaaggcttcgcccagagggagaccagatggtgagccctccgagcttggtggcgaaccctcttgacttcgtcctttggctttgccttgaagcttcgcttaaggcgaacctcctagacccggttggcgtcttgctgatttgatggtttcggtaggttcagccgaaggccctcatgacatgcctccaacatgcccctcacgggcaagggtgagtagggagtttcggccgagaccgtgcaaacatatggtatggcaatgaggctcaccctttcggccaatgttcctaccgaaacctctcttaaccaacaaagccttaaaacttattattacatatttttcattttttatgtttctttctactctacttgatttcgcacccttatttgaatcagtaactcgtttggagttgagtcggttcggatgcttggacagactccttctctttgcctcccccttctttatttagatcagttttgggccgtattgcactgtttccgcggccttttactgttcagcccatccggaagaggaagttactgctgcctcccttcaagggcaccacgtgtttggccactattggccggtagccaaaccgttgcgtcttcggggttatatatacccctctgggtcgctttcattcttaccgcagtcattctcatttcaactcccccgctcttagtgacctctcttctctcttcctcgtttggttgccgtgcgtgttccttcgcccccgcaacctttcgccacttgcaacctttcgccctgctaccgatggcagcgtgtaagcctgctaaggccgccgctaccgtccccgatccaggtcgccttggcgaagatctctcctgcttccttggcaagtctctcatcaaggagtcggatcttgcctccctggtggcctccggagccatcgccgaagggcagggcttcgtgtcgggcgaagctctagttccaactccgggcgacaggtgaacgctggtcttctccacgttcttcgacaccaggcttcgcttctcgtgcgatgatttccttcccgacgtcctccagctttacaagatcaagcttccctagctgagcccttccgccctggcgcggattgcagtgttcgactaggcatgtcataccgcgctggcttggccccaaccgcggagttgttcgacgccatcttcactgctaccatcctttccaaaactgtgcagacggctgctgggccgaagatgatggtcttcggcagtgccaacttcattcttcgaccggaacggtcagatgtctagctcgtccatgcttccatgcccaagtggcatcaccactggatgcaaaagtggttctaccacaacattccatatgtggtcggttccgaacgggcggaggccttgcactgccgtcaccatgccatctccatcgaactgaaaccgaacgtggaggtggaaggcacgctggagtcgaggctcatacttcttcgcaagatcgccctccggctaagcacccgcgatcttgttgaagaatactacatgcttcgcatatgccctctgtcccgagactgcggtgtttagcttagtgcaaacgaggaagtctatggcctcccccgtctcgtcttgcctgcatgttttattattacttcgccatcattcgcgccttttcatcttcgcaacccgattggtgctggagacacctctttcatctttgtttggcttggacagtgcagtcgctagcagaggccgagacaaaggcgaataatattattggcgagctaaccgcacgagagtatggtatgttgctctcgcgacaaactagcggccgcgcgaaccgtgttttcgacagcgagcctcccgctcgggcgaacccgatcaaggttgtcacgatcgtcgacggagccgagtcgtcgaagaagcgtaagagaggtgttgcgaaaaccacgctagggggttgaagcaaaacccgccgagcaaccagatccaccgccccttcacctgctgaatcggatgcgaacgatgaggaagaggaggacgagagggatgaggaggaggaggaggaggtggtggtggtggaggaagcggccgaagaggatacggagggcaagaactattcgccaggttacaccccaagtccggatcatccggaaactggcgtggcctccagctcgtcaccccttcgccagaaagacctagagggggcaaagaccctagctgctatagtgggtgccacctcgaggaagggtacttcggctgccggcaagaggccagcgaaggccgtgaccaaaggtttcgtgaagatatatattcaatgttacatctaatgaagctaatttgacgttgtatatgttgttaaattttctataaatttgatcaaatttaaagaattttgacaaagaaaagtcaaaacgtcttataatataaaacaaagatagtatcaactaagcatatataaagataattataaacaattattattattttttcacgtccattctacctatgcaacctctatgggtggaaaagaaccgggttcatgagcggcaaacgagtcaagcccaagcctcgtccatgaacaaagccagagttggcttggcttgcgagcattggctgtcatgtagtattcacatttctcgtttgtagaatattattcacgtaacgcatattagtctcatcttttcatttatgcttatatttattagacaaaatttaaattttcaaccttaaatttaaattgattttaagatttttttttcatcataatttatttttcaacttttattggtagggaggaaagaaggcgatagtggtagcagctgccactgcctccatggtagaggtaacgttaccaaaacttttagtacaaaatttagagtaaaatgcataggcgggtcttaaacttgaaaagttatgtcatctagatctcctagctctcaaaatacggattcaggttccagaacttatctaagtgtatcatctaggtctcaaatcgacacagcctctctaggatcctacctgatgctatagatggccatatggcccatggcccacggcccggcccaaagcatggctgtttggcccggcccaagcatggcacggcccaactggggtcgtgcccgtgccggcccggcccgacagccgggccgtgcttgggccgcaccttcggcacgctgggccggcacggcacggcctggtcaaataaaaaaaatatagggctttaaaatagacttaaataatcatataaggcaaggcccaagataagaggtatacaaaatagacttattttccagccatttaaacacagcccacaaagttgagggaccaaaaatagactttttctgcgaggaggtatacaaaatagacttgttctccagcatttaaacacagccacaaagttgagggaccaaaaatagactttttctatgaggaagcacggtgcgccgtcgtgccttcgggccggcccggcatggcccgagtagtattgggccgtgcctgggccgcggatgctgcccatgggctggcacggcacggcccggtatgtcggtcgggccgtgccgacccgacaagccttggcccaggcacggccgtgcttgggccgagccgtgccgggcggcccatttggccatctatacctggtgctgatgtggcatgccacatggacgtgacatgtccttttcttttgtttttcttttttgttttcttcgcattcttcttttttgttcctttcttctgctcgggtcacagagaaaggagaagaaagaaaaaaagagaagaaggagaagaaaaagagaagcaaaaagatacactatcgccttcttccctccctacgataagttctggtatttggatatgtattttgagagtttaaaaacccagatgacacacccctacaagtttaaagaccgcccatacactttactctaaaatttaagtatctcgagatacttcctcaataaccataaaatttcttttcatataaaagcgaaaataaagcttgcatgtctcgactttcatgaacaaataactaaggcaacttaaccagaattcagtcatagacccccaatcttacgtgtcaacttctactccccaagagcaaatgcagtggcgtcgaaggtatcagacagcccggttcccgtcttgaaggtgaccttctccggcgaggcctcggcgacatagacctcgacaacgctgagccagagcagcagctccttggtcttcacgccggcgatcttcttcagcttccccttctcgacgaacgccgtgacctcgccggcgtaggacacggtctgcttgatcttcttgaaggtgtgctcgatcttcttcttcctctgcaccagccacatgaatcctgtttccttgttgtagccgaactcctcgatgtcctccaatggcaggaggcccttggggaggcccagctcttccagcagctcaatggacttcttcctgcagacgccgtctccggtgacaatctccgcgccggcacggtggctctcgatggcctgagacgccattgagatcgatagaatgtgtgatgaagcagagagacacgaattatatgttgtgtggaatgtttgatgtgggttgatgctgagatcgagttggttcttgtttgtgatgagtgcaaggcagcaggtgcaggttgcatatatagcagcggtgtgtgatggagttgatttgagtggagcgtggattgtttgaccgaaaatacatattactcgttttgttagcccagaagggaatttgtcaagcttttgtgctgttgcaggcagatatagtcttttatgagtataatacatatatagtggagtatacgccaaaattgacttcacatgggagggaggagaagaattggtgtacaaaattgactttaagttctggcttcagagtcacttttcacattttctgaagcgagtgtgcacggttacctacttgcctatcgacttgagctaccggcggcacgtaggcaggcagttctgttcatcacaacatatgttactaatccttgacagatgattgattagcatgcagattgtggagatcaatactggaagatgtcttcttggaaagccactgtttgaacttgccaatagtggccttgtttagattccaatttttttcttcaaactttcaacttttccgttacatcgaacttttctaaatacacaaacttctaacttttccgtcacatcatttcaatttctttaaacttttaattttggcgtggaactaaacacagccaataccaagaaaaaaatgtgttgtcagatacaggaaagtatggactgaaatattacaaggttggactagaaaatgtcccactcttgttcaagtacactgatgatcaaattcaaggatgctacgttgagcgacaacatcaaactaacgagcctaattaatagctgaaaaatgttgactgttacatggtcgtagtctcatttgtttcctgacccctaggctcatcatgcagacactagctcgtctctcaagcaggattgttgatttgaagcagtagcgcccgtgtagcaaaacaaatgatacaacgcattgactactccctccggtttcattttaatcgacgttttggacaataacatggtctacaagatatatctttgaccttatttttctactataatatatataataaataaatgcatgtttacttttattatagtgctttaaaatataaatatatatatgttgttctagttcctttaaattaaatatttttaaagttattgatgatcaaattataaaagtttgacctcaatcttgtccaaaacgtcaattaatatggaaccggagggagtagttgattagattaagttatttcgtgttcaaatacgagaactatttattccagtgtttggttggttcatggataatatataatgtggtactccatgcgaccagtccaagacttctatctattgcagttgcaggtaatcttgagtcctgaaaaggattaataacacagtaatatatcactctttttcagctgaatggatgatcttgttgaagcacaatattcatggtggcatttgcatttgttgcatatggagaagtttgatgcagcaccacattaaagtgttcccacttccaactgcactcaacaatgcaggtgtatttccccattcgattcaaaactttgtgcgtttgcaactgtttgccaggtgtgggcctagttagggcccaggagcaaaggcccacgaagaataatcggtgtggaccgcaaaaggcccgatccaatggcatacaaaacgccatacgggtacgaaacacatattttgacaatttgaacctttgcaaaaattaaggggccctttgaatcgaaggaatgagaaaacataggaataggaaaaacataagattttgataggaatgtaagtgtaaaacagaggattgcaaaacacaggaaaaacaaatgaatgaaatcctctaaaatttctatgaatttcctttgaatcaaagggggcctaattatacaacgagcaaatgaaccgtggccaaaacatatttcaaaaataacccttttcagcgctaaatcccatggcgctaaacttaaacacctcggcgccacatcaactggcgctgaatgtcgtgccactgtggatagaagtctgagttggcgtgccaactcacattcagcgccacgttatttggcactgaggtatctaacttcagtgtcatgggatttgacgctgaacaaaagggtcattttttaaataagttttagccacgatttatttgtataattagttttacaaagggtcaaattgtctaaatttgtggatacgaaacatccgcagccaaagccgagcgaaaccctccaaaaagccctagccctagccctcgccgccggcgagcatggcgccaccgccgctgcgcgttcgccgggcgctgatggacgaggccatagccggcgagatcctcgtccgcctccctcccgacgagccggagcgcctcgtccgcgcgtccctcgtatgcaagccttggcgccgcctcgtcaccgaccgcttcttcctcctccgctaccgcctcttccaccgcgcggcgttgtaacggagggagtagcttatattcttacccaacaacccagaagtcatatccatcgagatgccaagactgcagctcgttctccgtgttctggaacaccacctcgatgaactcgtgcaggctgagcctcaccaccggcgtccccgaccgcggcgccgcgccgggacgctgtcccagccgatgacattggcgatgttgtagttgtccacgagcttgagcggcgtgtcggggacgacgaacgacacgccgctgacggcgtaccggcgcggagctggcgagcatcagcgtcctcgacgtcgcgatggtgccgtagtggaacgacccctgcgggttgggcctcgccgcgctcgccgtcaggttccaccggaacgacatcgcctggtattatgctttattataatatcatgtattatgacggtgcctttaggttaatacaaaccgcaaccgttaataaggtgtctgttactatgagctactccagcagagttgattttatttttctttcggtaatagtatatactgcaggagtagttgaaaagtccgattctaattttggcaattggcatggattagagtttcaaatacggaaggccgcgtggttagacttaccgagtcggagagggaacggcaaccctatctagtcgtaagtaagatcgagagagaagaaaaaaaaaggaaaagaaaaagaaggaagagggttgaggaggaggaggagggaggtgatggcgatgatgcgatcggctttggcgagggtattccaccgctccgcctccggatcctgttctgctccagcgggggtgtgccgccgccggccggagatcatcgaccaggcgccgccactgccctccctccgccccgccgcgatgccgcacatgtctgtagccgccgccgctgcagctgcgcccactcgccgcctcctccaggtcttcttcgattcgcttgctcccctcgcaccttttctttttttaaaaaaaattattatatatatctatctatctatctatctaaaacgtaggataaatttctgatgcttggttcgcttgctaggttagtttcttgtacggccgcccggtcgaaaaatgttactaatttcgtgtaggtgtttcttttgattccagagtagggttttatgatcaatatgaggttaatttcgtgtaggtgtttcgtttgagcttttgatttcagaagaatagggtttatgatcaatccgactacaaattgattgcgagctttgtctacagtggaactttgctagtctatggcagatctcctgctgctttaacaagatctctagaaacaatgaaatgatgttctattattcactccattccaagtgcttctgcgtatacacaactagattggaggaacctggcaacgcagcacatgttttctaggggctgtagtggtattctgtggagctctagcttccattgcgtgccacctaataatttaggcaggtggcgtaacacccttcaacccattttccccttgatttccaaatggatgttacctggaagcactatattttgggctgctaatgtaacttctatcggtacatacttaaaaattttcatcagtctaattatgaaagcttttggatcattgctagagaccacagtccacaaatcggttcaattcatttttctcttcccttgctgtttttctcagtttctctattagtgtattgggaatcgggactaaactagtgtttttttcaatattttctataacataggttgaggtaggaaagatagatagaagcaacacttttgttgtggcatcatgatatatttaagagtaaattgcaacttgggctcggtattattaccaaagtttcactttagactagggtacaaccaatattttcactttgggctaagggacatggcttttgtttcagtttagacctcctcaatctttcttgtccgctcctagctcctcaccaccgcagctatatccaggccatgtgttctcatcctctagtctagagtctagacgcaatgacaactcaatgaggaatgtgcccatggtgagcaggtgaggtccatctgtgcacaaccgatcaaactccatctgcttcctcctagaactttgctccttgcttcctcttccttcacctgtgctgttgctcttcacaccttgcggcagcagcaacagcttcatggtgtcggcgatggtaggatgtgcaggcagtgcccagccgggtggtgggaaaggtggcacaatgtgcaacagaaggaaagaaactctagcccaaagtgaaaaaattggttatgcccttgaacaaagtgaaaatttggtaactaaatctgtcccggtatacaatttactctatatttaattcagtaaggctggctgctaagatagtcctgtgatgcgtatgctggctccgcaatttttatttcttctgatgattgggtttaagtaaataattttgtgtaacaatcaagctctgtttgctatgattacgtgttacccttagcagtattgaccagagtgcacttgctggcagggaccgcgacaattcctcgtcatctctgaagcaaccgagggtgtgaagtgggcagggcagaagaggttcttctccatggaaaggaatgctaatggttttaagcttatggaatcagcaaggtgagttaaggatatatataggatgtaattaacaacacacttccttgtaacctatgcaatatttatgcacattgtgcttcatattgctcaacgaaccgtgcttctgctttatgcacttaggttgttgctagctagtcttaaaaccgatctgatcttcgtgcttgccccgctatgctaattactactactagtattttctttttacaagaacggatatgaggtctcaatgtcttcgatttagaatgcttagctcttttattctaccattgatacaattagcgtgatactaattagggtccctactacttaacatgcatggtaataaagctaaccatgcgatgcaattgcttttttctttttctaatcttgtgtaggctggcagtcaagaagatcaaggcattgggtaatgcaaggatcgagattgatccacggaatgagttctatgttgtagcagtagcaactgcgatatctctttggctgatgtcaagacaatatcgaagccttggcgaccccacatttcctggtggcagcatgaaaaagcttcaggcttggaagcgtgtttctaaacttaactctgggaaatctaataatgctgatgagtgatgtcgatggcactcttgatggagggtaatctttgctgcaatatgcgtggtagagttggtcgtatttattagttaagtcagtaaagaacatgtagtagagtgactggtattgtaattttatttatatgaatatttactgtgccttcttctcgtactagttgactagctaaactgaatgaagaacttatccagttggccccttgtccatgtgaaaaattccatacaatggcctgttaatggttgttttgccggatcagccaaagaaatataggctgaccaaattttattaggattgagaaattttacagattacaagttgagaaaaacatggacaagaagttgttcgtgctatgcagcaatatgtattatcttcgagaagtgagaattaatgccaacctgatctgtaatttccggccgcctcctcatgggatcctcggcagccgcatcatcggagttaaaatttaactcgcagatttactcagaagttaaaattttaatggagttaaattttaactcgtgatgacatggacgaatcttagccgttggatttgttttgcaggatcaagatctaccttatatcacattatgacatgtctaccctgtatcacccagtctgaatcttatgggttgttcctcggcagtgagggaaacggccggagcagatggatggaggcttgtacgatgagaccgagggccgacgagcactcgggcaagcggcgggtatgttcgtgcctgtgccagctgcggcacaataaatcaaaaaaaattacagattagtgattacacaacaggaaagagagagagaatgcaagataaatcaaaaaaaattacagattagtgattatgtatcagcaatcaaactgacaagccttatcgatccagaaaggacgagttacatctaaaaacaaaaccaatttttgacaactgctccgtttgaaccctcttgcagaacctactagtctatcaaacaaaatatcattacaagtcctggcttaaatcaatggatcgagttcttgaaaatgagatcaaacatgtaaaatagatcaaataggataagagcagttgcagaaaactcaaatgcacaagagaagaccatgcccaaccatgatctacctccttaattacctcacgggcacaaaccaccaatctgataagcataaaaaaatattatttttagataagcatcaagtagtaaacatgatgaacaaaaaaaattatattatatgggtaacgatagatggatacatgatccgctaatgaattgaaatcaaatcccccataaagaagacacttccggaactagtacaggtttcttatcttatctcaaaggtgcttatcaccattttctctcctcaatcaggaagagagaagaagctagagaaccaaacaaagggtcatcggcctgaagaagctcttccccgcactccgccatggccgcgccgatgtagacctgattggcttcctcgccgacggagcacatgccgccattttcgttgagattttcatcgaagaaactgaagaatgtcctgatgagaaattcaagaaatcgaaatcggagatggcagcgttgaacagagcaaatcttggcgtgttcatgatcgagctcaaatcggagcaggtgaagaaggtagcggagggtggtagattctacaccatcttcccatacatgagcttctgtacaccaggtatctcatcttgttctatataatcgcataagatactacccgtatttaaatatggcgctgttagcttttgaacatatgctttgcctatttattctattcaaaaattttatgcaaatacgtaagaatataggctatgtttaaaatacctttgatgataacacaaccaaataaacgatatttagaattttttttaataagacgaagctgtggtggagccaccgcccggctagcccaggcagccacccaggctcgcctgtgaaaactccacaaaattttaatattgatgagtaaattgacgatgaaatttgtacagtaaatactgttatattgaagtttgctcagactaaaaaaatctttctggctctgccaactgagacgaagaatatgtcataacaaaataaatgatatttagatatttttaataagacgaatgaccaaacacatgtttaaaagtcaataatgttatatatttagaaatgaatcctataaggctacaagtacaccaattttcagtttgctcgagaaaaatgtgcattgggtatatatgtatttggatcatgggatcggatggaattaatggtgtcatcgaagcacctgctgtttaatttgttaagacaacattctatggtcttctttattgcccattgtgagcgcacaccgaagtagctctagttaacctaggtacttattgatctgtctgtacatttatcttgagctatatcatcgttgtcctcctaagtttttactcgttgtgtgtatttgtagatcttgcaggaggtagcagacaaccatagccagctcttctcagtatcttctaacgagccacttaatgagagtggcttcacctggataattcatgattagtctgcaggagtttcttcttgcctagttgatgccattaaggtgttcagtcatcgtgttgaattgtgtttatttttaattcgttgtgatcttggcttcatattcaggtcatgcttaacgcaacatgcatggaacttaaattattctgaactttggtccattgttttatcctgaattgtgaatccatgggtgttcaatttttccctattgtctgttttattccttttatgacttacatggtccagtttcagtgagaagcttgcaacttctcattatatgaagctcttgttgctgcagatagttctatagatcgttagtgattgctcctactatgtaatttagttgtaaagaatcttttatttctgaactgaacatttgaatatggctcttctctacactggcaatatggtatgggagaagggattcacagaacaaagtcaaggagaaggagccatcagcgtcagttcagaaatcagaagctagcagaaactattcccctcttcagtgtagctagcagaaactattcccctctccagtgtcctttctaccaaaatttgcatcagttttgcccaagcgctcgctcgattcatgtgattgagtttgaaatagtatactgaatctataatggttttttttacccatgtagtaaggcacaatagttgctgctgatactgtcgtaaaaacatcactgaatagcataataatagattgatgcggcatcagaaacagagcactctgcaccattaagcctgaggccttgtccacaggctacaaactcaagagaaaaacactgacatatgatcaaagaatagcacatcagttttagctacaacaaacatatatccgaaatcgtaattctgaattctcatcttcactttcacctatagtagtagtagtatgacttattctactagacatataccaaacgacgaaggatggatcgaactatgcaactctgaatttcttcttcatcatcttcctcagtgtccaaggccggcagctctaccgcagagtatggcgttggtcgggatactgtactcattggagaagctctgctgcggcgtccacactctcatgtacagctgctggccgaggtattgccggtcccagttcgccgacctcaggttccacatcccctggttgtccaatgacaccaagattgccgaccatccattcgggtaaacctgatgaaacgaacatcgtcaatgttcagaattcagacttcagagttaactgttcttcaaatgcattggaatgttcagacttcagaattaactcttcttcaaattggttaggaatgttcagaattcagactaaggagttaattgttcttcaaattggttaggaatgttcagaattcagacttcagagctaagtgttcttcaaattgattaggaatgttcagattcagaattaattgttcttcaaattgattaggaatgttcagacttcagagttaattgttattcaaatccattaggaattttcagatttcagaatttctttttttttagataacagaccacccatgtggcccagcttttataacaaagccaaagcatgctttctgaattaactgttcttcagaagttcagattcattacgagtatgtcaacacatacctgaactgtatgcctcgcttgcgcatcaaccaagttgtaggttgtccgctgattctcagtccactgaccattgccatacctgaatccatttatcagagaaagaaatcatcaaaggtgaatgaacagatctttctcatgttgatgttcatctgagaattgatgcaactgaaaatctgaaagtttcagtggttgatgggaatgtagcttacccaacaacccagaagtcatatccatcgagatgccaagactgcagctcgttctccgtgttctggaacaccacctcgatgaactcgtgcaggttgagcctcaccaccggcgtccccgaccgcggcgccgcgccgtcgggcctcgccgggacgctgtcccagccgatgacattggcgatgttgtagttgtccacgagcttgagcggcgtgtcggggacgacgaacgacacgccgttgacggcgtaccggcgctgcccggcgagcaccggcgcggagttggcgagcaccagcgtcctcgacgtcgcgatggtgccgtagtggaacgacccctgcgggttgggcctcgccgcgctcgccgtcaggttccaccggaacgacctcgcctggttcatcgaccactccgcctgctccggcggcggcgccgggagcgggccgggcgccctggacacggcgctgctgtagtgcagcgtccccgtcgccatcagcggcgacgcgcccgggctgaaccgcgcggacgccacgacggcgtagtcctgcgccgccttgtcgagcgtgacgaggaacgccaccgactggccgacatggacgtcgagcgagtcgtacacgttctgcaccgggtgcgtcccctccacctccaccaacctcagcgagtgcccctggatcctgacattgacggacgtcttcaccccgacattggacaccctgaacaggtacgtcctcccctggtcgccgacgaacgccgccgccgacggcatgccattgatgagcagcgcgtcgggcggcgggagcgcgccaccgccgccggcgtcgagcgcctgcctcagctgcttatgcccggccttgtaccagtcgccgacgaggagcgtgaagtcgccggcgggcggcgggtacgggacggggatggccgggcgctggtagacgttgagcgcgccgaagccgccggcggcgcggtgcatggcgacggaggggaagtagacgaaggtgccgatctggtccttggcctggaacttgtaggtgtagttggcgccaggggggattgggcagttggtgcccagcacgccgtcctgccacgagttcttgcgctgcttgatgccattccatgtcaggaggaacggctcgtccaggttgttgaacacgttcacgatgatgttgtcgttcgtcacgcagtcgattcgcggcccaggaaactggccattgatcaagatgcccttcgattcgattcaaccaagcaaccaaatcaattatcagagagagagaatgacagaattcaagaactgcatctgcatttgcaagaagaagaagaagaacatctagtggcgttgtcagtcacctgctgcggggtggagccgagagggttgatgctgccgtaggtgacgttccaggtgaagaagcggtaggggtcgtcggcgccggcgagggtggcggcgacggcga

SEQ ID NO: 23270 - DNA, 9311 bp, Oryza sativa
  unsure (1)..(9311): unsure at all n locations
attcctgcagcccctgtactcgtacacaaaattacaactggaaagcaaagcaaagaaaagcaaaatctacgcgtagatggatggatggatggatggagaagaagaatgctagtggtggtggagaagatggacagatggggcgctttaaattggaagagaattctccgcgtttcgcagcagcggcggccattggaggagtaaattaaggtcgcgaggaacatggcggcccagcctgtctcctcctctcctccatggctaccatctttctctctggccatctctctctccagtacagtgatcagtgacgcagtgatgctgctgctgacttgcttgttgaatccggcattacgctgtcgtacatctcaatgtgctagatactgtacagctattgaagaatttaaaggaggaggatttgttttctgccaagaattttcatgaacatggtaacaacaattcctacggttgaggaattaacaaaaaggggtttcttttgtttctgcaaaaaaagttcatgaacatgaaaattgtaacaattcctacggttcaagaatgaacaaaagacggcttttttttttggttgtgccaaaattattcaagaatatgttacccattttctgtactgcaattacagtttcagggcgcattatgtgctcgaccgtatcatcatttcatcacggaccatgaacatttcgtatttaccagggaaattaatcgacgagaacaaaatctgaaggtgaatcgggaggaaatgcacttgccacgtgtgtacgtcgcagtacagagtgaatttttttgtccaaaagaacctccattcttggcctcgtatcaatcaactcctccatccgtattccgtagtaattgtaccaagtaatcttaactaagggtgtgtttagttcatgctaaaattgaaaatttgattgaaattagaataatgtaatgaaaaagttgaaagtttacatatgtaggaaagttttgatgtgatgaaaaaattgaaagtttgaagaaaaagtttgaaactaaacaaggcctaagcaaatggcatgaacaatgcatggatgaatggtacggtttggaaaaagttttttttaaaaaaaagggagggcaaaagttttgcctcatatatattgatagagcaggtttttcaaaaacgttttaacttggagtaaagaaaggtgcattcggcagcgcaaattttcaatttctacctcctcatttttcacacatacattttctgaacccgctaaacaatgtatttttttataaaaaatataagaggttgtttttaaaaattatattaatcttttttaaaaaaactagctaatacttaattaatcatatactaatgaatcacttcattttacgtgtgcgggaggagaagttttcaaccatgttcgaacacgagacctagtgtaattaactgcctgcaatttcatcgaccctctttctttctttatttcttttgtttatttctttatttcttcttctttcttttcttttcattttgttcggcttttgcttctacgagtgggcgatagttctagatgatcctatgtaggagtggctcttgtgtactctacaataattaaattctttcacaggacccttagcttggaagacaaccaaaatgaaaaggtgcttacaagtatgcacaacagtcaaaagagggaaaatttaaaggcaagaagataaagaaaagaagggaacaagttaacatgcatatgtgtaactcttttgatgggcacatgtataatgatccaccactaccttgccttgaggccctgttctttttttttaattctggtattttaaaacaattcttaacttactacacggtgtgtttcgtaaaaattaaaagtatataaaatttccttgaaacacttttctaaagcaacattttaatttttctaataattaattgatttgtttgtaccctccaataactataaaagaattagattgtgcataaattttagctatctcaaacaggttctaatagaaaatggtgtgtcacgctaactgcatttgcatcgaagtttctcattggtgttggcactagttttgcatttggctcgcttaaaacacatgaatctttcttcttttttgtacacaaaataaatcattttaatttatgtgaaattcatgtaaagctaatgtagaattcgtggctttacaaaggagtgtgtggtccctccctcacggaggtatagacggccgtgaaaacccacttgtttaaaagaaaaatgacaagaatattctggttttaaagatctgaactttggtcatccaacaaccagcccctgatacacatgcttttttttcttttctaaaaggaatgtgtgtctcttatataatgatagtatcttttacactttacagatatgaactaattgcccaattagttatccacaaagacataccctgatactcctttcttttttctaagaaggaatgtgccatgtgtggtgcttattaatactaggagtatgttacatttatttgcaggtatcctatgaaagcatccatgtaattaatattgcagtaactaattaattgtctagttgacaagagaatgtaatacagaaaaatagccaaccaattggtcaccttgcatgggagaagagcagaaaataagaaaataagcttgcacatggtcgccagtttgttaatttgtcacaggcatgcatgactacaactagtacgtactacacttttgcagacaaaggctagaatggaggacaattagtattgtcttatggctttaattaatatacgcgtggtgattagtggagcaggattagttataagtggaaatcctaatcctttgaccatgctgtcatgcaggcatgtggccgttgaaccgtgtcgaagtagtacaggagtagcaggcaggcagcttgcttttttttgcttaattaccctagaataattaatggataaccctaccatggcattatctggcctgccctggcctgatgatgatgcttaaattactttttacaaatgttttgctgggtgagttcaaaagaagccgtaatttgtgccgcttaattagatggaggaggacaatagagttaatgaatgctacagagacttgcgtttttttgggtgaaggtaccgacatttttttgcgagaggacgcaagtggggagctgcttgttgccagctttcttggtttcaaacgatgtacggttttactacaaaatcttgatcaactgatgagttacaaaagaagttggtgaaaattttgacgttcccgagcttggtaatgcaagaccgtattaatttaagcatatgcaagcctatccaaacgatggttctgtactgagtaaactttggctctgtttgggagattctaggagctgtaattttttcaagaatttccagctcttaaaatagtctatattctcacttagactctgagaatatatagctataggatccagaaaaagaacttgattttttcagattgtcagaaactacctaccagtcgactgctaatattaaactctcccaaatagaactttaaatgcgtttgtaaggattaatcatattattaaaacaaatcatttgtttcatgcttcaaaaaacatgttttcttaaaaaaaatcttcaactgttgtgttgcttttatttcttaaaatatttaatttatacttataataaaatcaataatatgtgataataatatgcttaccctaagactatgtgcttatagattttctttaaatactcccaaacatttgaaattctcatccagagaatatataacgatatactaattcagaaaacaaagtaaaagttgataaacctaacccttttttttcatactcttactagctctttctaatcttaatatcctcaaacagtgtgactaaaccacgtactcccggtggtactagcagtatagtaatttaatggagaaaagttccatttctataatttatatattattatgcgcaaattaaggagccctgaaagttgagacagcggcattgcgtatttgcgtgcttgctcatcagaaaccgcgggagaaatcaggggcacgaattgcgtttccgcgtggacggcagcacaaacagctggagtttgcttgttctgcgtgcacgaatcacgaggcaggcagcacctctcttcctttctttttgagtaaaccctcacatgcagccattttgcctcgtgatccataccaatatactccatccgtgatccatcctgccctcgtaaacccaagttaccaacctcaaatccacaaaagaaatgtgtctagtttactgcaacttactcatagattataatacttcaacttagtttgatgatgattagtgttggagcaagcaaagcatgcctctgcatcattttgccttgtagagaccgttggtgaggactgcatctgacggcactctgcatgcttacttttccatcatttctaggaactcatcgctgcctgcccaaactcatactggcaagttcagtacaacggcagaaactcataccagaagaaactagtggcaacctagccagcatttgaaactccttcaagattcagatttcaatcacctggtaaggaattcaagttttcagtctgaacttgctgagatatcaagattttataagcctgaaacttcctgggagtttccttcagttttccgaatttctagcagtcaagcccaatatccaataataggctttagagttggaataagttcacctgccgtccctcaactttacaccgagtttgtttgacataccttatcctaaatactagaaatctttgcctcttaaatgttcagaaccgtgcaaattaggtcctataaaatcggtggagtttcatgatttgggcataatagcttacctggtcgtgcaggtttgggttttcttttcggcccaatgctggcctgggcgcctggcccaacaactcaagcgttcatgtgaaaagcttgcttgcagcttgtatcagttggttgcaaggacaagataaggaaggcctcctttgaaactaaggaaaagcaataggaattcttgaggattttatcctacaaaaaaataatccaatgaagccatttgaaacaaaggattgtttttctttgaaattcctatgaaatgaatcattctagagcaagtttttctcttcaagtgtatagaattcctgtattttctctgtatgctaatcaaacaatgtttcgaaacattcttgtgttttaaaatccctaggaatccaatgagtatgaacattattatattcataagttttccctattcccgtgttttctcaatcccacatttcaaagtggcccaaggcccatctcacatatttgtgtatttggccttcacgcaaaagccgggcctctggccttctctctaaaaatctcacatatttgtgtcacatttttttccctttttataaattctgtactttgatctactactgtgaactcagtttgtttcatgtttccagttttcaaaatgaacgcaaacaagtgtacgagatactctgcaactctgctgattgacattgactaattctactcccagcaatgactaaacttttaaaatttatttgaaaagtacatgtaaagtcagcctgaagatttgaacgcgagagacaaattgaaccagaattatattcatgtggcacaactgcagcatcatcatcaagataaggaataaaatggtagagggtgttgaaaagttcagctaatgcagtgcaggtggtctacatcaaaccaaaaaaaaaacaaaatttaatttctgcagaagaagaacatccccattagtgagtcagcaccaacaagaatataccgattgattgatgaaactagcttctggttgttgaacattgggctgtctccactctgcagagagtgacagacagaaagatccacgaatattcaccagcacatccaagaacaatcccattttcaacattggatacaccagcaaccaactgatttatatgctccagttaattcatatctgtacatttgcatgaattttctccttttcaacacacaagatgaaaccccaaagtagcacacactttacagcattcatctgcaggaagatgatggaactgttaactgaacattacctgaaacacactaatttcatttcagctcctctgaagaagtcacaaaactgatgaaaactgtcactgtcagtaaaatatcgatcttgatacacttgtatgttacacacaagacacgaccagagaccaacataaggatgaagatcataaataaaaatgcaagtgaagccatgcttgcacaggtcaaggctggggacaagttcaaagcaagcatcaggaatgctaataatgcctcagaatacaatagattccggataagaatgggtgatcatcctgccctnnnnnnnnnnnnnnnnnnnnnnncgaacaaatttatagtaatatttagcagtgcaaactttggcttgattgcatgcagaggcatgcataaacgagaggtgaagatgagttcagatgtgtcatgtgtgacgcgacttctcggaactgaaaaacctcacggcaataactaaaatcacaagaatgttactactagcgaagaaacctgcagacttgcatgccaagaatgctcacagtttcgtcgagaaataatcggagtcagaaagatgcagtctcgcggttttacagctcatgagagattcttggtgtgtgatcctctccgtcgcctcctcttccggcgccgcatcagattcttggtgtctgctaatctttttctctctctctttccttttcccttttgtttactctgatcgcatactttttttttgcagcaggtatatttatactatcttgatgtaattgtctaaattcaataaaaacttcaattatcttaaaagaatgtacgtgtgtaattgtttaaattcaatgaaaacttaaattatcttaaaaaaaatgtacgtgtgtaattgtttagattcaatgaaaacttcagttatctttaaaaaatgtacattttcagatatatgtggtgaaaagaaaaggattgggatatatgtggaagacagaggtgttgttggtgtcatggcttggctggtcagttggatgaaacgactctgctgcggttctggacaagaaacttattatgatcaggattcattcaggggtaaggaccacctcaagtcccaagaaaaaggatgaggatccaaagttttttttttccccttttcaattcaagaatccaaagatttttattattcttccttgttctggctcttgatgccgctggaatgttgatggccatcagaagccagaaacatgccctcttggctcttgctaaaataggcctaaaaccactgtccatttcatatacttcaatcagcaagaacagcaatgtcaagcttatcagaactatagtaatatgcttgattgaaatggaagatatcaagaaaatcactcaagagaggttggaaacacgatatgggtaaaattctcagggcgaaaactgtagctctgcccgaatcctttaaccggcaaaactcgccgcaaaactgtagctagtatcatctctttcgatatacatgacaacaaccaactcaccatcagtttcatctcaagcactcaaggctcgatctcactgtatacaaacacctacactagtctctcctctcaaactcctccctgaagatctggtattatttttcatcgccgcgccgcaattaacctaacccaccaaagctgtgatgaaaatttctgatgcaacatcatcttggatcatttccagccatagctctcagacctgccatcctcctcctcgcagctgaccgtcgccgccgatgagccgccaccggccatgcctgagcctgagaaatggagaggaccctcaggggatccagactgggagctgctttgctcttgaggaatgtaacagagcccttgcatgagcacaatcggttggttcacaattgttgagcttggcactctcggccggttgtgcaggcggtacttctgcgcaatcagaatcgcaaaaatcgacatcagtatcatcgcaaatccgtcgcgagaagtcatgattgttactgaacattgatgaagaaaatcttgtggtaaacaaaaaaaacagtggtgaattttcctcacctgaagatggcttttgacctcgtcatttgtcagtccatccaccttcatcagctccctgatttgctttggagtggcaactgcacaatcaatcaatcaatcaattcaggaatcaatcaccatgagcaactaattactaattccaaagtaattaatcaccacatgcagatgcaggtgctcttagctctagaaatggcaattaattaatgaattaattaagtgtaccttgagggccaccgagttgctgcaaggcggcgacgaacttgcggtggaggtccggcgaccagcaccgcctcgtcttcctcgcctgctgctgctgctgcgccgccgccggctgaggctggggctggaggctgagagcggggccagacgccgccatggcggcagccctcgccgcggcctgggagaagcccacgacctgacggcggctttcgtcggcggcggcggcggaagcaggcggcgagagcagcgacagatccggcatcctgacgtcgtacgccatgtcctccttcctcatcaagctctgcttcggccgcgcgaaagccggcgcgccagagcccacaaacgcgccgccgttggacttcgcctccgacgagatcctcaccttgtcctgcttctgcgacgatcgtccaaatttcagccaccgaaatccacgcaaccaaacaaaaaagcatccattgaagaatcaaacgaaacgaagtctcacctctggatcagcggcggcggcgtctgggccgccggaattcccagtccagagctgcgcggtgctcatccagttgctcttgtcgccggcggcgtcctcctcatcctccttacgatcaccacccttcttctccacctcctccttcatcacatcaatcactgcacgcaagccatgcccaaatcaacaactcgccaccacaaaacaaaacaaaaaagaaagaggcttttttttttgtttaatagttattaccgtcggcgaggaggcggacgcagagggggagctcgcggcggaagacctcgatcttgcccatctcctcctcgagcctccggatgcagtcacccatggcggtggtggtggtgtccttgcccctgacgcggccgaagctcttggcggcgaacatcttgagatccaggctcaggtccgccgcgccgacgccgatttcccccacatccagccccatcgcgcatacaccacccctccacctcgatcgagaattcttcgagaagcttgttg

SEQ ID NO: 23271 - DNA, 9377 bp, Oryza sativa
attaatgagatacaggcgtgccagtcagtttaatcctgcaactgataagatttgtaaataatagatcaaacagccgatcggctgacaagccgatggagtagttccagccgatagtcgataatagccgatgccaataccagccgatagcgatagggtttaagcaatcggctatatgtccaatgtagataatgatataaaggcaatcggctgatgatgatgtaataaaataacaatataatccaatataaactaatcggctagcaatgatatgataaataagcatcgatacgaaggttaaagcacacatcggctagaggtccgatgtcatgaaatccacaagattagattaaacaatgaaacctttgttgtcatcggctaaatccaacttatatgtatatgcaatcctcatgagccgatgcaacgtccagataactcaccggctgaaaccccgataaaacccttattggcaatcaataagcaggctagagattatggttctaagcacgacttagtagatcaaaattaactgatgcagcactaagtataaaaagaaacataatatctagacaatcaagccgatgactgattttcagggtggtagatgcctaggctaatctaatctagcaacgcgatttagccgataccggcagaaaccctaaaacgagaagcagccgatagagctaaattgatatgctaagactagattaacagagacatatgataaataggtaggcaagtatatcatctaaaccagagcaatccaagaggtcgaatgtactgatgcagccttgaacgacgccgatgtagacgatacaattgcctgggccgacggaacattggacttatcccttcgccggagatcgaagacgatgcagccccgcgtcgggtgccaagtcctgccggaacgtaaaaacaaaagtagaaataaaaatggtggcgatgcgccgaattgtattgatcgtagagatcgattacatagaccccgggtgtacatatttatacccatgggttgatacaagtccttgtcggacaagaaagaaactacctaaagataaaaggaaaatatagagtccttatcggacactaaacaaacttttctaaagataaaagaaaactaacaaactattcctaattaatagataaactgccatgccgcatcctctttaaactcggtcacttaggaataagcttcctttagtagattgatttccttaaccgaatatagcaggaatccgactattggtgacttgataactcacatcggctgattccgagatgctgcagccgataatgattctaagccgatgacatctttgccgattaccaaatttcactgttaacacgaggccagcgagcatggcgcagacggcgatgcagccagggaggcgtgacggctggtcggatcggtgtcggtacgccggcgaccaacgttcgtcggcgtcttcttcccccttttcttttttccatttcttctcttctttgtttcttgttgctccggcaattcgctcgtcatggcgcaaccgtgcggcggcggcgcgtccaggccgagcggctagcgtcatgggcagccggtgctgcagtgcatcggcgtgtggagcggatgcatgaccggtttccatggcgccgatgctgccgcttttcctttctttcattttgcttttcttctttgtttcttgtcctctccggccgggcgttgtggcggagcgacggcgccgccaagatgcggacgcgaggtcgccgctgggcgtacaggcgcggggttcgctgccggtatgcaggtgcaggctcgctgctaggacggccacggcacgaccactccccgccgccgatgcccagctcctctccgtcagtctactccccgttcgtcgctagcgagcaccgctgctgcccatcgccggccgcgcccctaccccaccaaagtgaagagaaaggccgggggagagagagataagcgagagagagctacacactgacatgtgggtcccaccacgctgagtcagcctgtcaacgggtcaacaacgccacgtcagacgaagtcgccagcaaaaccaccaagggaggtgatttgctctggttttcagaaatgaaggaggcgttatacccggtttttcggttgagggatgttattcacgcaaacgcaagagatgagggaggcaaaatggacttattcctataagttttgggctttttcacagtcccactccgtgtctgagctctgaacttgtgggcttacactatctcttgctccttccagcccatctttttgagtttacccttcgattaacctactgaagttgcaggagtaatctgtacgacatttttaaccataccattatttaacaaattaataattatgtggttatatttagtttgttatcaaatattggcaatgtgtatagaattttggcaacattattaagccaatcctaccaaaattttagcaatgttgttaatttgtcaaatttttgatattgacaaattttagtaaggttaattttgacattaatcagaacagaccctaagactaaagagtctgtgatcgactgaagttgtgacttgtcgtgcttgttggcaggctggtggccttctctgcatccacgggaaagcctgccgcgaagaagagcctaaggatgaaagggaaaaggtgtaatgtctgcaactactgctactagctgaaacctgaatgttaaaattttgtgtacaaaatcatatacgagtaaacatctgaaaactgagggctgatttggtttgaagccaaaacttgccataccaaaatattggtattttgaacagtaattttggtaatgtttgttttgctaccaatacttaccaataccacacaaatgttgctaaaatattggcattggcaaaatcttgcccatgatttggcattgccaatagtttggcatggttgcaaaccaaacaatccctgaaatcgtcgtggtgtcgttacttcgtcagtggaccgcatgagattcggcgcgtgaagcgcaacttcctacgagagacgctggagaacgagctgccggagggcaccatcaggttctcttccaagatcgtctcgactggggaagatagcaacgtcaagctcctacatttggccgatggttcaacgataggtgtgtgagatcaacaatggctagcagatcacttgtacctctcttcttctcactaagagcagccatggcctgatgcattgatgtgcttttgttgaaggtgctgatcggatgcgacggcgtgaactcggtggtggcgaagtggcttggcctgccaaagccaatcctctcagggcgctcggccaccaggggcctcgccgagtacccggtacccctcccctgatggtgcgcaccgttgctagttacttctccttgacgagcagcaacaatggcggattaattcgctgatcaatctgtcacgtgtggtgtgcacagacggcgacgcggaggagagcgtggccaagatgcggagctacgtgctggcgaaggcggcgaggatcccggcgccgctgaggttccggtcgccgctcgcgctcgtccgcggcagcatcagcaggggcaacgtctgcgtcgccggcgacgccttccacccgacgacccccgagctcggccagggcggctgcgcggcgctcgaggacggcgtcgtcctcgcccggtgcctcagcgaggccttcctcgccgacggcgccgagcacgacccggggtacgaggccgtcacggtggcgctggagaagtacgccgaggagaggcggtggcgcggcatccggctgatcacggcggcctacgtcgtcggcttcatccagcagagcaccaacccggtgatcaagttcctcagggagaagttcttgtcaggattgctggcaaaaactatgatcgccatggctgattacgattgcggaaagctatgattctgttcacgagaaatcaagaacccaagaagagaagaaagaaattggcggtgagcgggaacagtcttaattagcacatggaacaatcttgtgatgttgttaaccaagcacgagggggcgagcttaaagtccaccgtacaatgtactagtaccacgtacacactcaccatggcagatgctcaaggcaaagtcttatgtacggttttctatgcctctgtatcaaagttgagttcagcatttgacttgtgggtatgtgtccgagacaagttttgttctagaaatttcgtggacaaaataagttcttggagtacaaggtaaacccaaccttggcataatttagacacaataacaaaattgattaaaaaaaaggtttatttagagtgcaaatagcacaaacagagttttttttaaccaaaacaagtagtcttgagatatttttttttcttttgattatatgattacatgaaaatacatttaccctcatttagcacattattaagacattgaggctagaaataattccacgaaactaactaaattaaccacattaggatttcaaacacagtgggtaaagtaatatgcccataaacttagcgtcaccgtttttcgctcacggtcaccagaatgtttagaatccgatactcaattcgcaagcctcataatatttgacacccaattcgtatatgtcttccagaaattaccaatttgtttggtgacattatctcccatttttctctttttccttcttttactctacgtttttttttcccttctcacatgattggagtagtggacagttttttgcactataacaggggtcaggccagttagcagttatcgagctaaaatcgtcattcccggtttcccaccgccaaaacccactggcgggtggcggctgcctgctggcccatcgttgagtgactcaaagaagccgatcaatctcagtggcgcagaggtagcaacagatcaagctgccataatcacatggcgtggttaatcgcccgaacatatgctgcaaatgggtaaaatattaacaaaccggtttgaccaagtggcttcatccgcatccaagaatcttatatggaacccatgatttaattaggagcaatttgcagtactgccaagtgtgaggaatccctgtctagtttgttatagtgcttatcatatagccgaccataagccagtgtacatgcatggttctgtggcatctttaatatgcgaaaaaaggttgtatactagctagataagcttgtagcccaaaaaatgaatcttgaagcatctgtagaaatcggaagcaaagtgtaacgtcccgccgccttcccccaggccgggcccgcttacatctgatagctttcataggtcacacatcttttctgcacactttgtcctcactcgtgtgcacccggaaagaatttcccggtcggtcccccatcccaaattgctccaggccaagcacgcttaaccctggaattctttggagattggcttccagaaaagaagttgcaacttgttgatatgagtattctattaatcctattaagccctagaccgggatgttacaccctcacccccttaagagagatcgacgcccccgtcgatcaaccctaggccaggaacgtcatctcttggccacgtccatgtgtgataccattttgtaacgtcccgccttcccccaggccgggcccgcttacaggccaagcacgcttaaccctggaattctttggagattggcttccagaaaagaagttgcaacttgttgatatgagtattaccctcacccccttaagagagatcgacgcccccgtcgatcaaccctaggccaggaacgtcatctcttggccacgtccatgtgtgataccattttgtaacgtcccgccttcccccaggccgggcccgcttacatctgatagctttcataggtcatagactgccctcacagaccaacacatatcttttctgcacactttgtcctcactcgtgtgcacccgggaagaatttcccggtcggtcacccatcccaaattgctccaggccaagcacgcttaaccctagagttctttggagattggcttccggaaaagaagttgcaacttgttgatatgagtattctattaatcctattaagctctagaccgggatgttacacaaagggctagcatcaaccctttaaacagaccaggttgccaatcatgtaagactgtgtattacgcacaccatagcctcagcaaaagaaaaggcttctcacggagtggattctaatctctcgagaggatatcctctcatgtatctttttctttcaaatttgatacaaatagttgtgaaaaattctaaaaaaatatttggcaatgtagagtatagtgatatctactaatccaaaaaaatcaaattcaaattcgatttacacattgagaaaccaaaagaaaaggcttctatcatcactgtcagtcaagtaacttaaccagaataaaacagagggaaatatgaatttgtcagctatttctgtcactgcagctctcaccattcaaatctagaggtttgaccatatgatctatcatggccaccaatagataaagtgaggtcttacaaactaattaaaaaatgcagtacatcactacatccacaaccagttgccctaatagtccaatggagggcctcggtgacagttgacttacaagcaagcaatagtttcttttcgtagatccccatcaaccaaacaaaaaacaacaaatctgagcactgggagagctccactacccccatcatctgaaacaaaaattaatcacctatttgcactgctaaattccctagcttccagacctagctaactgatacctaccagtggggaccacctgcaattccaagaatcaaactgtcatgggcgcaactagtggtggtgatttgtctgaggggagccgggggttggattaacgcgcgtcaaccgcctaaatccaagggggtgcaacatgattaccgacgcttctcgatccaatgaccctaggtaatcacgcgacctccccggccgtaatcccatgtgctccaggcagccgagtctcgtgacctcacgtgacgcttccgcctctagctctcgatcgatcgatcccaccactaattatccactcccaaatgattgtttagtggcccgtatcataagaccggccacgtcgtgcagctagtgtgacttgggagagacagtgtaccggccatttgccagatttgcttcctcagaaaaatagcagagtcggccgggtttgcagacttgcagagatcggaagaatctttctctttcgaaatgttgaggatttttggaaggaaaacaaaagggaaatggagatataggaatcgtggcatttaaggcggcacggtgcagcgtcgtctgtgggttgcaacatgcatcggcatgtgagtctgcctcgggaggcgcgcgctcgtcgatctcgtggccgccgcacttcctatttaagcaccgccgcgggtgacaccgtcccctcctcctcagtactcagatacattacccgcaccgcctaattaagcgctcgcatctgaagccatttcgagggacgtcatggcgcggagtgccttcttcttccactgcgtcgccgccgtcgcggcgtgcatcgccgcgacggccgcggcgctcagtggcacggccacgttctacggcgggagcgacgcctccggcacaatgggtatagtttagacatttgctaattaagcctgatcagttttacacacaccaatggactggtgctgacaatggcgtttgttgttgatcgacaggcggcgcgtgcgggtacggcaacctgtactcgacggggtacgggacgaacacggcggcgctgagctcggcgctgttcaacgacggcgcggcgtgcggcgagtgctaccagatcacgtgcgaccagtccaactcgaagtggtgcaaggcgggcacgtcggtgaccatcaccgcgaccaacctctgcccaccggactactccaagccgagcaacgacggcggctggtgcaacccgccgcgccagcacttcgacatggcgcaacccgcctgggaacagatcggcgtctaccgcggcggtatcgtccccgtcaatttccagaggtacgcacatactccggtcaccgtcgtttcgccggccggcggcgcacagaatcaagtagtgatcacgtacgtatacgtatgtgtgcagggtgtcgtgcacgaggaaaggaggggtgaggttcaccatcaacgggaacagctacttcgagctggtgctgatcaccaacgtgggcgggccggggtcgatcaagtcggtgcagatcaagggaacaaagacggggtgggtgaccatgtcccggaactggggcgccaactggcaagccaacaactacctcaacaaccaggccatctccttctcggtcacctccaccgccggcaagacgctcgtcttcgaggacgtcgcgccgtccaactggcagttcggccagacattcaccagcggcgtgcagttctactagctagcggctcgcgcgcgcgcgcggcggcgcatgagccgccgccgccgtcgcgcgcttgcccaacggcgagcggcgcatgccacctgccgccatttccgttcaatttttgcatttggaaaacttgtcaaaaagaccagcttatttagcatcattctgattggggaaaaaaatgtattcttagctaggggaacgccactgtggtttgcatggctgaggcgggttccaacggtgttcgtctggccgggcggcctgatcgatagcccgccatgcctaaccgcttttacgatgattgctgggaaggaaaactatttagacgactttgcttggacacgaggtaaggagtgcaggcactgatcgatccgtgtaatgctgaaatatggcgctcattggaaggcgcaaaccacatgcgagtttactgtttgacccgatgatgatctcaatgaaatgaattggccattggccctgtaaattgactgcagtatctttgtgctttcactgtgtattttgcgttgaaatttagctcatcctgcatgtggtgaaaccacgccgactcgtgtgcacgtcccgcgagtggaggtagagtacgggatgggggtgctaagaatcccgtcaaaaaaaattagttgtatctggatgttgattttcattcctcgaggggatattccctcattgtttgtatgtcatctaaatagttattaaatttttttaaaaaaaactgataacatagactaatatgaaatatatcacttcacaaacatgcaaaattaaattcaacttctacaagttgcaatgaaaataacaaattaaactgaaaatagttatcgcacattcacaactatagttgtctcaatacaaatttagacacccccaccaacttaagcttgatctaaagtagagtaaattaagcaagaagcaccctcctttattttgttcttattccgcccttgcgtgaggagcgttatggctatgaaagacctgct

SEQ ID NO: 23272 - DNA, 9338 bp, Oryza sativa
tatgctatgtcacccaatctgaatcccaattttattgggttgcagtgtttgccactaacacgtgggccgctttgattgggctggaacatgataacggattgatggtggtgagaaatcacccattcaagatggtttgtgttagagggcgcggtccagcctgaaggttatattatacttgctttaccataggtctaatcgtagttataacttttggtaatacacctatacaactaaaaaaaatagtctaatggatgaggatcaactctatctttaagtcgtgcccctggtaacaattactatgtaggacttaggggctgtttggttgctagtcaaaatttgcctcaatttaccacaagtatggcaaataggtttgaccaagttagtatagtgtttggttctagccacaagttagtcatgccaaactttcctttaacttgaccccacatttcatagatacaataatgtgtggtaaggaggctaagatgtggcttcaattttcttggccacaactttggcaacttagccacaaatgtttggctggcttaggtagtgttacacaaccaatcaaacagcccctaaacccaacagtttcattcttcaaatcaaacagcatgaacgttcctttgtcagactttcgatgagtttgaatcttatacaacaatgctgatttcatgtatgaaaaaagagcgacggcccgctcttcttcccccaactatatacatagccaacatggagaggtcatgcgtcatggccggtcgcagagtgcgccatagcagtgtgtgtcgatgtcatgcgccaacgaggtgtcattggagaggcagctcaacgaccggcagtccggcacagggcatctttggaagggtaagtgcaggcagccgtcaatgggtgcgttcaacggtgcccattgccaataagcacgcccgtgggagttctatgttactagactagtcgagcgcttctcttcataatattgagtgcagatcggctatcatcgtactgtcgtcgccaccaccacctattactagttactggccaccaacagagccaaccgtactaaaaattttgggagatcaaggatagagaaagagaagaaaaatgtacgaagatgaaggataatgttatcatttcgatgcctttttttttttactaaatatgcccatttaacgtggtgatgaaaatggcataaaaaataatgaaaattttatcaagtagcatataagggaatagctactttttgacatcacagaatgaaaccattcaagttccatgctatctcgtgaacaatgcctcttttaagttccaagctatctcgtgatctctaaactagcgagttgctttggtgcgagtttttctgtgtagatttgggctgaaagcctgcctgagtgtctggcccgtgagagaagcccaaggctggaaatctgcagcataaccatgggccataaatcacatgtagcccatatgacactgcatgttaacaatagcacatgttaacatgcaaaaacgcccgttcaaaaaaaaaaaaacatgcaaaaacgtggtacatatgtacacgcagcataggtagcactacttgctaaacttggatatggacggcacaaacccaacgtcccaacctgccacatttccctagtggcgacgggtctatttttttcgagacaacatgcacaaaatataaaatagtacgacgtttttattgatatagcataaaaaatataagttagaaaacagaaaaggacagtcacactaagcgtttacgtctgatcctgatgctgaaaaataaaaacaagcactcaacatccggaatgggtattctaaatgacgccaagactatcgctgtttgcctatcctaaaatccacgatgtagttttcacttttttctaatatattgacgtgcaatcttttttgcgcgttcgaaaagaaaaatgtgattttcatccgaagaaaccattgggagaatagagaaaaacaaaacctcgctctaggcggaaagcggcgtccgcaggcgtcgtagttgccgggccgaagacgacgggtgtctactgtcctgtacacatacgcaacgacagtttgccggtgccggtgccggtgcggctgccgtatcgcgtggctgcctctggcaccggcgcggccatcgaccgttcaattcaagccgcgatgaggcccgtgagcaggtctcgtgtgtttctctcccaagttgggcaaaatttctcagaatcgcgtggtcaactgctgatagcctgataaccgacagagtgattaatagcaccctgtacgtaacagcagtcctctcctcttgtagtcttgtagagtagaagtatagagtaacagtacaggagaaatactccgatccatatataacttctagcatgttcacatttcttcagatttgtattagctgttgggtagccatgcatgttagctgctaatcaagagtcaagacactgctgagttcaaataattaatatatttgacgaattcaagatgtacatacatgtacaattaatccaaaaaaagtactaacaaattaatttcccagcttgagatcatgcagacgaacaaattcctctccctgctaataactgaactgctggttgctggtgaatgtcatgccgaagctccaccagctgggcacgacgttgtagatgtagagcgtctggccgccggtggatgtgacggcgaaggagagcgcctggccgacgagccccgagttgcactgccagttggcgccccagttccggttcagcgtgatccaccccgtgcttccccccttcaccgacaccgacctcaccgacccgctccccgccacgttcgacaccagcaccagctcgaagaagttgaaccctcccatcgtgaacctgatccctccctgcctccagcacttcaccctacacatcaattaggtataggtgtttaagatcgacgaagataaagttagtgcacacaaaatgagaaagttattagcgtatgattaattgattttttattattacaaactttagaaatagatttatttgatattttaaagcaaccgttcatccgtttgaaattaacatgttagaatgtacttaagagcagtaattacggattactactagttgtaatacactgtaagtacttactgttggtagaggacggggatgatgccggccttgtagatgccgatctggagccaggcgggctcggccatgtcgaagtgagggcggggcgggttgcaccagccgccgctgttgctggggagagcccagttgggcgggcacaggttggtggccgtgatggtcaccgcggcgcccgccctgcaccactgcggcgtcgcggcggcgtcgcacatgatcaggtagcactgcccgcacgaccacccgtcgttgaacagcaccgagctcagcgccgccgtgttcgtcccgtaccccgccgtgtacaggttcccgtacccgcacgcgccacctgaacacacagagtcacacagcagcaggtctccgtgagaaacactgacaacgcaatgacagattcgtagcactccgtagttgatagagcaccaaaggttttcttacgtacccatcgtgccggaggcgtcggcgccgccgtagaacgtcgccgtccctttgttccagccatgcgccggcgcgaagccggatgctgctagcacggtgatcaccaacgacgtggcgaataagatcgcgtactccatctccgtcgagacgatagagcagagaatcgaacactgatcaggaggttaccgaggttctgaattttctgatggttttgcagtgaacgtggagggggttatataagagcaggaatgagaattatggtcagatcagagcagggaattgcagagaacatgccggcgatatctcagtcagcagtgcaagctaggctcacatgcatgcaaggaaaatgtaagccgaaccctggagatggaattgcgcgttcaatcaggtgattgatacgctgtaaacctgcaagctgggcatcatcatcagcacggcttagcattttctcctgataatcatgacctggaaaataatacatttcatgcatgtaccttgcatgttcagtaatccgtacttgccggcataaaatggatctacttagatattagtctgataatctatggacaaaaatataatttggaatgaactgtgcatgcatgccatggcttatcagcatctatgtggaatttgcaaattcttggtaggaaagaaactctgagccacatgaggccatgagggggccagcactgtcagcacatggaagatagctaggaggtggataaacaactgatcagattgattattaactcagcgcctacttagatgtctaatcatttggaaaaagctgactaaaagagtcagcagatttaattagccaccggtaccgcgcgcggtacggcgttgaaattgattacatttttaagcaggaaaaatgctgtcaagttgtgcactattatactgacttctatttgctctccctttgaattaaaccatcaggcgtacgaaaaatgtttttctttctttgggcaaagacgcatcatatgctacgatagatgcctctgcaggaactagttgcaaacttgcatacggggtacttgtgtgtagttgtgttggcatgcatgagcttgtctgtgttcgtaggatttatcattcatatccagtaaattccactgccagttctcttagtggtagagtccttagactttccttcttcccttccccactgcaaaccactaaatgattcttaatgttccctgtttttgaattattgaaatgattcctcaaaaagtttttggtggcaggttgccggtcttgatgtcaagatcgtcagaaagagggttacaaggacatacaccgagttcagctagattacagaaaggcgctggagctagaagaaatcagcaccttttgctttggacactggcaattagcggatcaaagcattttgtggcatccaagtagacaataacagtgtcagtgtaagacaaagtggtgaggactaatcgccatttggtgtagccatgatcgtgtcttccgtgtaaacataaaagtttctcaggagtcagcaggaaaatttccgcattccaaatgagaccctgatttatatcacggtagaaatgactggtagccgccagtaagtagtaactcatgaaactcagcatataatttcatttcccggtgggaacaatgtacatcaagaatgtagttttaacatcatctacgtacagaacgaatgatagatcggtcacaaacctcgagtgagattactagttcgacctgccttgccatgaatggacctgcgtagtactactactactatacacattacataggctactagtcttcactagctctctcctggtgcatgctctttccccactatgtaagcttcttcaatctgcagccttattatactgatcttgctctgcatgccgttgtagtgtgcctgttagtaggaaaactggaggttggaggagaatgactggccgaacttccaccacgccggcacgatgttctggaagacgagggtctggccgccggtggaggtgacgccgaaggtgagcgtctggccgacgaggccggcgtgcgactgccagttcgcgccccagttcctgctcaggggcatcctgtcggtgttcggccccttcacccacaccgactggatcgacccgctcccggccacgttcgagatcagcaccagctcgaagtagttgaaccctcccatggtgaaccgaacccctccctgcttcacgcacggcaccctacatacgtccacaaagaatcacagatcgtacgtagtaatgatgattaattagtgaatagttaatggcattggtttgacttaattatcatggacatggagagtcaaaccgtccaatattattgtagtatacgtacctctggtacagcaccggcacgataccggccttgtagatgccgatctggagccaggcgggctcggccatgtcgaagtgcgtgcgaggcgggttgcaccagccgccgtcgttgctggagagggcgtagttgggcgggcacaggttggtcccggtgatggtcaccgtcctcccctgcaggcaccaccgcggctcggcctggtggtcgcacgcgatctggtagcactgcccgcacgacgcgccgtcgttgaacagcgccgagctcagcgccgccgtgttcgtcccgtaccccgaccagtacaggttcccgtacccacacgccccacctgtgcgtggtcacctcacctggcctctgttagctaacgacgactctgaaactgtacctacttactggtgcgccaatgcgtatacgtacccatcgtcccggaggcgtcgctgccgccgtagaacgtggccgtgccactggaccagcctgccgtcgtcggcgcgatgagcgacgccgcggcgatgacaacgacgagcggcagaatgctcggtgtcttcttcttcttccacatcgccatgaatcttgcaggtggactagctcgccgagttgctgcaatgtagttagtgacagtggtagtagtaactatgaagaaatgcgagtgatcttaaataggagcgggatcaccggcatggaatttttgcctgcgctgcagcgcgaatggcgcatgtacgtacactgcacacactcagctccaattaattgcgtcgtcagatcggtgatctccttgtttcttcgtagcttctttgcaggcacactaacatgcaaacgaagaagaagattctctcatttctctccaccagatcgatctgcagctacgcgtcttatattcgatccgtaattaagctgatcacgctgccacttccgcatgttctctgctgctgcatgctcagctcacccaagggcaaggggaatgattagctggaactatttacgcttcttaaaccggctatcttgtgaattgtttagttgacagagttgacacgccatggaaggatttggtgagatatgagaggcaagcaagcggcagctatggtacttgctcacatgagggagagcggcaagccgggcgcaggaagaatccaagtgcgctgtcacacggatatggcgagaagatggtgaattatcaattatcaactcaccggatttgcagaagtcgccggcagcgttcacatacagtaaccagattgatgtcatttttaactatactattttttgataaagttgctaaaaaaatggtacgtttagtttgttgccgaatttagtaaatacataagaaatcctaccaaaattttggtaatattgctatcttgccaaaatttggtaagatttattttggctataatctgaataggccgcagattttctatttactttttcctaactttttaacttttaattttaaaattatccatttcaaaaacttaaatatatatcgtttaattagctaacgacattgacacatggcaacatttgtcttgccaagtctccttaatcggtgtggcaggataaaactgtcacgttcgttatgggtgatgtgacagtgttgttttgtcatatcatgtgaattaccatggctaagagatttagatcttaaaataagtttctgatgatttatttttgaaattaaaaagttttaaaaaaaataataaaaagggtaaaatatctccgtcctcgccgggttaggcagccgaaaggcccagatgattacatcggccgtcacgtgaagcccaattcacatgggtcgcagtgtcttcccgtcccaactaatacggctcgttcgaacactgaaattccgttctgaccgaactgggccgtacgttggtgacagtcccgctcaggcccaacttcaacgggccgcagattggcagcaatcccgttcgggcccagtaagaacatggctcgggcctcaggggttcggagttgggaaaagtacactgaaggtcgctcaacttgtcatcgagttacaaaatcgtcctccaaccgtaaaaccggatatagcgcatcccccaacttacaaaaccagtacaaactaggtcactcagtggttttgacttcggttttgttcgatgtggctacacgtgtagtacctcaaggttctgagtttatatctccataggagcgaatttaagagattgggttatttgcggggcaaagttttctatttcaatggccgtatatatccagttggatgtagaggctggataaaaaatatcgttctctaaaaaaagaaaagagaaatggaagatttaggtggggaacctctctcctatgattattcaaaaaaaaaagcctcgacaaacatttctttttttttctctctgttttagtctccttaagtctatggtttacttgttatctgacttgactatcacaagctcagaacggttgtttgacggaggcctagtttagttcccaactttttctttaaatttttaacttttctatcacatcaaaactttcctacacacacaaatttttaacttttctgtcacatagttctaatttcaaagcaaacttccaattttagtgtgaactaaacacaccctgaaactgcacatcatcacctgtgtactgaattctatttgtctcaaaaaaagaaaaagagaaacgaactgtcagtcacctgcagttgctgtccaccactgacaagcatttcacttttagttcgtgtgccaaaattttgaaaaatgaaatggcatattggactcaaaaagctacttcagcctgccgctgacagaaaactctccaatccgacccatagggcgcgcttgccttttgtctcagattacaggaatagtgatgtccccttctgcagagcaatgtgaagcatgagtgcatgttcagtggagtgttaatagatggaactcaaggagggaggagactggagcaggagtgcaggacacgggcatgctatgccgtacctccggcacggccaatggcacaggtgccggcacgctttgctgctgacattagccgtcctcgccgcggctgttcatcgggccgttttgttttgatactaaaaatatgcactaccaatttataggcaaattgcaaattgaatagtatgcgttagttttgattgagccaaatatttaacagtgccccctatcttatttggtcatattttagaagcttcttccttatacaataagaatttggctttatatcggtaacaatctaaatgattgctaaataattttatcctaccaatattttggtagtgccaaagtttacctagactttgacactaccaatgaattagtagggtaatgaatcaaacaagcccatcatctgtcacccagctgcagtcactctgggcatatggagacgagctaaggcctatggtctatggcggtggctaagacaccatcagcagcgatgagggggacgaggatgctgaccgactca

SEQ ID NO: 23273 - DNA, 3997 bp, Oryza sativa
tatcagttcacccagttaattaatttcaagtttctgtaaaaaaaaactgtatggttaaacttgtaaattcagctgctatacttttaatagatctcctcttagttgtactctctcttaataattcgctggaaacggctggaaactaacctgttcggtctaaaaataacttgcacaaaataaactaatggagtctgttgcgtattcttaaatttttttaaaaaaatcaaatgaggtcaggacaaagtcgatagtgcctggagctaatcgttctgttccaggaatatgtgctcaacttccatatgaaaacgaactaaaatcgagatcgagaggaattgctgttatgcacatctgtccggaaaaacttgtactataatcgtctgagagaacataaacggtttgtcgttgcatgattatagttaattagagtagattcttcagttgatgataataaaaaacgacatggttacctactactacttgataatacttgtcattttggatgagactaatatcaaactttatttttttttaactaattctaaaatatgtcttttttttcacgaatgcgcaaaataattatatgtcaatatatcagaaaaaaaagtgtttatttacacagtgcaatcaaccagaccggcttatgccaagcgaagggagaaaagacaaaataaaaaaaaccaaggaaaaaggaagatactactacgatagtaaacacaactctaatcaacggaaagggggtagagccacactacctgtcacaccccaatctggcaccgccgtacaacggcacctgataggagcgtgtcgtaggaaaaacggcgcgaaccgctccctacgaaaccgcgatctcagtaccagtcccaggacatagcgctggtacccacggtgacaaatatgaatcattacaatccttaaaataaatagaggacttatttaccttaacttaggttgcagctcagacagcccgagaatgcaaccgacgacacggacgaggcaaacaccaacaacaacagcagcagcggaaccaacggtctaacacccaacaccacaggcgacggctgggaaccaggacaaaacccttaatcttcactttacttcatcttcaacttcaggacggaggaactatatatatttatatagagcaagggtgagtactttcgtacttagcaagtcacgggaatttaggtgtttaatgcaagcttggaagagaggcgaggttgttttgcaaatcctttgtttgaaatcattttgaaatcactaagtgatttacttcttgttaagtttgggctgaaaagagacttgcgtctcaaatcgacttaagagatgcttttcaacaactcaattggtaatgtaccgacctcccgggttagatcattacctctcggctcccagagccatttcacttgattaatcggctcccagagcctttctcattttctcggactcccagagtccagctgcccagcagcaccacattccgcttccactcgggaagcctagtctatgatgcccgtagacatcccgaatcacacagattcgtttctgaccactcaggtcatccatctgccacataggctgattctggttacgattcccatcccacaacttttcacaaagcacaggcaaacaaatctacgcaacggaaaccacctcacatccgcccatgaccgtgggcacggctgttcgaacagttagttaacctccgcagaggggtacactttacccacaagatacgaccttattccgaacacccgtcggtgtcggaggttcgcaacaaggcctttcctaagccggcccagggttacctcatgccacatagaaggatcaaatcctcacataaatataggccattttagttttcacaaatcaaactccaaccacctcgatcggtaattcagcaagcttctcttccttgcttaccaggaacccggtttggctccaaccgaccccgccccggcgttccccaactattggcatgcgaggtttccctgaaccgactaattacttagccagggtgtcccattccaccttgtggttgcactttgattatgctcgatgagtttcccacaggaatcggtccttatatgcgaatacaggacagtgccacgcaggcacaacccccgcatcgtgagttttcacaattcattttatgtttaaacacaccgacaccacatgtcgggttttcaaggcttctcaaacccatttcccaagttttcgacaatcaacggtgcatgtgagatatttggtatacgcgctcagagagcacgaataccaaagtaccacaagggtggagcgacaaggaatcatgatagtacagcctacaggaattagtgcgactactgggtaggtccgtcggtttggcacgcaaaccgaggccaagtaagttatgtgtgtgactctaataatgcaagttgtaaacaaaataataatgattttctaattataggagcaattgatcaaagggtgacttgccttgctcaaggtcttcacggagcttcacgaatcttcgagaaaacccgcgatcggcgaaaatccgataaccgcaactatacgcaaacaaacaaaaaccaaaacaaaagaccaagaaaaagaccctatttagactaaataatagtgcgattaaatagatctcaattttatggaaatactggaagttgaacggaatcaatcagagctacggattgagagatatgaattttggaagtttaattggaatttttgggcaaaggaagatatttgtggaacaaggggaaattgatttatgaaatttatagaaataatattctcaagaatattattgtcaatttatagaaataatattctcaagaatattattgacagtcacggacgtgcgggaccaagggaaatgattcatggaattttggaataaggaattgatttatggaaaaggaaatggacgagggatgtatattagactttttcgggcggcaagggcgcggcctaagggttgaaggaggctcggccgagccatttaggccggcgcgggcgcgggaaaggcggtccattagggcgcgcggaagggagagggagcggtccggtggactgagtgcacctcgcgggttccaggtggggcccgcttgtcggtgacatggcccacggtgggatgggcgcacgcgaggtgcggcgctagggtttcgggtgcgagtggcttaggagcggtgcaccgggtggatggatggcggcgggcccacgtgcagccacacggcttgccgtggaccgcgcgcacgggagggaagacggagggagggggcggctgactggcttggcccggtcaaagccgaggtggcgccgacgtggcgcctacgtggcagccacgcgggccggcgggaggaggaagaaggggaggccgagatggacggcggacggcggccaagttcaccggagctcgtcgcgacgattcgagagagagggagtacaccggaacaatgggaaggacgagagggagtgagccaccggatcggatttgccgaaggggattcgatggcgacggatttcgacggtggcggccggcggcgatcaagagggggaatcgcggcggggcgacgataggtcgattcaaggaggagggagcatctccggggcgcggggaactcatttccggcaccggatggggcggaggactgccgaggagggctggcgatggcggcggcctccgggagcgggcggcaacggcggcaagcctatggcgggcggcggcgagacctggggcggtgtccatgcgtgttcgggggggctggccgagctaccacgcgagctagggagggagagggcgagcgaaaagagagaacggagggtggcactaccaagccgggacgggcgcagttgtagcgcccgttccgtcgtggcgcctagcgggaaaatgtaatttctaaaaaccttaattgcgaaaattgtttcttcgcttgcagtcagtctccgtgccattccggatctcaaatccccgacctatcgtcacgttcaaatggggcgcaggaat

SEQ ID NO: 23274 - DNA, 1957 bp, Oryza sativa
atctctatccccctcccccctgtgtctctctctccgtccctctctcccccggtaagcccgcgcgccgcgagagcgtgcgcgtgatccgcaccgagccgagcaccattcgcccgcgctgcccgttgcttcccgcgcgcgcaatccgtggtggccgaccgcctggttgccgccgctgtcagcctctgccacgcctgccgcccgagtcgccgctccgctccacactgcccccgccgtcatcgccgtcgtcacaacccggccccgccactccgcgcgctagcctccaagggacggaggcagagctcctcctcctccctctgccgcgtcgccccctctccctcctccttttctcaaagtggcaaggggcaagccccctttccctcctcctttttcccttttctctcccgccggcgtcatcccccccctgtcgccgttttggccgcgaccgccgagcgctagccctctcccttgaccgccctaggtcggttcccaaaccgacatcgccatcctataaagcccaggcgccctccctcccttctcctcttgtttgtcccatcgcctccactccattgtcgccgcctcccgtgctctgttcgccgccgcctttcgttgccacgcgtgccggaggagccggcgcgttcgtggacgcggaaggggactccgggagctcgtcttcttcctcttccccggcccgaggccggagagatcactcccgtgccgtcggcctcttgtcacagcgccccgcctcgtctcggtagtgcatccctccgttctccctcctcgctccatctcttccccttagctttgagtagccgctcgagtagtaccccagtagctagttggcgccgccccagcccgcgccgccgctcgcagtaggctcgccgctgtcgccgcccgagctcggaagcgcctctcgtcgccggcctccctcggtgcgtttcctcctaatccggcgcaagggacggattcccggagtcgcgtagatgctctagctcgcccgaatcgatctcccgtcgcgccgtcgccgtttcccccttccctcgccgccggttgccgccgccgcaatccaccgccgtcgagccccgtccgacgaatccgagccattggcttgtctctcctcgtctcgtgcaaccacccggtgtgctcgctttcgcctgtatcgccgtggttcgctccgtcgctcgccgctgtcgaccgccgtccgttccggccggcgtcgtcgtctacctcccgccggcccgcgtggcagccacgtaggcgccacgtcggcgccagctcagcctagaccgggtcgagccgaccccggtcagtccctccccgtgcgcgcgttccaccgcgagctgtgaggctgcgcgtggacccgccgcacccacgtccaccgcgaaccgcgcgcgtgcatcacgtccatcctccaccctagcgccgcgccgcgtgcttcctccgcacggtgagccgagccgctgacaagcgggtcccacccgggaccgcgcgaggtgagcccggcccaccggctctctctctccttcctccgcgcgcgcgcatcttgggccgctctgggccgccttcttgggccggccggcccgttaagctcggccgagccgctctttctctcgggccgcgccctagccgcccaagaaaagtctgttttctctccctcctttcttttcttttcttttcttttccaaaaaggatttaattaaatccttttcctttagaccaaaaatccaataatcttagaaattcaatatcttcccaaccgtaaatccgattgactccgttcaactcccaaaattcctcaaatcccgagatctatctaatggcacgcttagaggtcatcaatagggctttattttcgccgtttgttgagttgtcccgtttgcgtgtagtttcggagcccgaagacccgcagtgcgaggatttcgaggatcaagctccagatctcgagcaaggcaagccacct

SEQ ID NO: 23275 - DNA, 3468 bp, Oryza sativa
gtagctgatgggatcagctaggcccgggtggccgtttgaaaagttgttggcccgggtggccgttgaaaagctgttggccgggtgccaaccttgtttcaattctaaagactgatacattgcacatactccgaccggacgagacgcactgtctcatccgtgtcgtttgagaagcactcacttagttgtttcagaaaagagttcgaataaaatcaattgcaaaaacaccagcctttctttgaagcctgcattaaacacttatttcccctggcttgctgagtactcccgtactcacccttgctctatataaataatctccccccccccctcagttgctgaagaagatgaagcggatcccgctgatgaggagttcttccaggagcaagccggcttcgatgagttttagggtttcggcctagttcccaagtcgcgcctgtgatgtttggtccaagtcctggcttccgtttcccttttgtaatgcagttgtgagctcgggatctgtccgcagcccaacatgactgtacttctactctataataaagagacctctgttgttgtgatattctgtctccctatgataccagcactgtttcctgggactggtatcgattaacaggttaatttggagcgtcacgggctagttccggtcggtactagttcggggcgtgacacagtactaactcctttgtcagaaatgatatgtcctaagtattccagttgagtgcaagcaaaagagcatttagacctcttagcaaataactggtgttgcctcaaaatagcaaaaacttgctgaagatgatgcaaatgactatcaaggtcagggctataaactaagatatcatccataaacaccaacacaaacttcctgataaatggtgcaaagactgagttcataaggcactgaaaggtggagggtgcattcgtgagaccaaatggcataaccctaaactgaaattgcccatgatgtgtcttaaaggttgtcttggcttcatcagtttccaccattcgaatttgatgatacccagctttcaagtccagtttagagaagaatttagtgcctgagagctcatccaataattcatcaacaaccggcataggaaacttacttttaatggtgagagcatttaatcttctgtaatccacacaaaaacgccaactaccatcctttttcttgacaagtaaaacaggtgatgcatagggactcatactaggtgtaattaaaccagcatcaatcatttctttcacctgtttctcaatctcgtctttttgtaacggagaatagcgataaggtctgtagttgacaggagtagcatcaggtactagagaaatagcatgatcaaaaaccctatgtgggggaagacacttaggatcgtgaaagacatcgtcaaagtcagttaacaattgttgcaccgaagaaggaatcacatgctggacatcatcctgggaatgttccaacaaagcagcagcccatatttcacaacccttatgccatttcaaaagttgtggcagagtgacagcagcaatttcagaagggactgcagcatcttgtactccttgaagagaaatccaagacccttgatactgaaacttgagtgttttattagcccaatgacaagacatttccccccattgctcaagccagtccatacccaagatggcatcgtgaccccccaaagtgaccaccctcatgtcataagtaaatgtgtgcccctgaatccaccaaaaaaaaccaggaaccacatactgacaaggtaagcaatcaccattagcaactttcaccagagtagaaggaattggttttagaggtaaacccagcatctgtgcaaagttgtaatcaataaagttgtgagagctgccagaatccaccaaaagtaacaagactttactatgaaccaatgctctcaaacgaatagcagtaagaaggtaagctcctgtcaatgcattcagagaaatatgacagtcctcctcatcatcagattgttctgcagcaataacaacatccaatatgtcatcagtgagcacctcttccaactgcatagctttgatttggcctccaacagcacaacgatgttcaggagtatatttgtcaccacacttaaaacaaagaccctgagcacgtcgatagtctttcaactgcttagccttccatagatcccctttatctactcgacctggagtagtatcagaactgacatcactcttgtactgaggaagtttcacaaatttccctttgagagctttggtagctctactagccaagacagattcctacataagagcaatagcagatgcttgctgtacagtgtcaggcaattgaacaacaacagcagctcgaatttcttcagtaagaccattcataaaacgagtcactaacattttaccccccacagatggatcaaacactctgatctgatagacaagagaatcaaattgttgtttatactcagtcactgtactagtttgagtcagagtatctagtgcagacattttcttacgttccacaacaccctcaaattctgttgcgactgccattctaaattgatcccaagagttaacctcattcactaacttataagaatgataccattgagccgcatttcccgacatatgcaacacagcagcagagactttgaaattttgagtgatttggtacatgtcaaaataagtctcacacatatccaaccaaatccgcatatcagaaccatcgaaacgaggaaaatccattttaggaagtggctgatgacgccaataaatcccatcaccaaaaccacgacccaaatcaaccccatccaacataggaggaacaggtggattcaacggcggaggagtcgcagaaccacttgtactaacctgcgagatcccggaaggcgaacccaaaatcccggcctgatcagagcagctggccacccgcttcatcgaacgggccaactcagcacactcttgctgcaccttgccgacggaatccatggcgagatccaccttggtagtcaccttctcaagactgccaccttgggaatccagccgctgatcaatctcgtgcatccactttgtgatgccttccaacttctccaagagtttggactccatggagtccatagcttgcttcaaaggggctgaaagttttgcgggcgccgtggcgaatcaggaagaatccaacgcacggcgacacccacaacctgtctctgataccactgtaacactacgccaccgcgaaactcgccgccgacgagagagagagatatttagacgagatcggagttggggacgaagagaaacagagctgaggcagaggagagacagagtttggagagagatagatttgatttctttttgccaggttggccacagccattctctctctcgagtatttatctcctgattacatggaccgtttgcccaaacgatttaaagcacgcaggccgcattctatttgataaagtctagcccaaaacacacacactatcattcaca

SEQ ID NO: 23276 - DNA, 6460 bp, Oryza sativa
gccccctttttctgcatctgaagtttggacgcaactcgggatcggcgcccgatgggattcagcttgggtgactttgtgttggcatgtcacaacgtgacattgtgaggatctctgccatcaaaaacacatccaacggctcgtttggttgggcccgcctgcaggtcggaaatttagccgccgatccatccgtcccgcgggagatggcgcccgccgatccaacccatcccgtttcgcctcgcccgagtccagccgtcgccatcgccgtgagccagctgggaggcttgctgtcaccgcgcgaggccgtcgggctcgccgcgagtggggaggggaccgggcggccgccgcgcaaggccggggtcggggccctgccctgctgccacgaccgaggagagaagccaagccgccgcgcgaggccaactccatgccctgtcggcctgtcctgccgtgacctgtggagaggcgccagggcgtcgaggccctaccctgccgccgcgaccgggggaccgggaaagctaccaacagtacgatagaacatttttctctgaaactcagtcagtcaacacaagggagatagctatatccaattcactcacaaatgcagtgaaatcattgcatttccctccatttgaatggcacaaccatacatctcctttgaagtcatatatatcaagcatcagcgcgcgaacaccattctgcaaaaaaaaaaagaagctatttctatgagaatcaattgtggctagatgtatcgtcagacatgtagaacaatggctagaacagatgatgcatatagcaggtgcgacatttaattgatcagtgactgtatcctcttggttgtcaaaggtgatgcgtggaactccagtgtgcgatggctccccaacaattgcaaatgaattgtgtgtcgtgagataggcatactagttgaatggcagcgagttgttttgaagaacaaatcaaaagcaaactccagtcaggatgcagcaaacagaagctgtttgatgtccataggctgatgcttgtgcaggtagccggcaggggcagcgcggcctccaggacgtcccctcctccacgcgccgagctgcagattacagaagaaaaatgaggccggttcaccacggctgcagatcaccacgactgcctggactggctcggcggcctccaaccgcaaccaccaccgcacgagggcaggcctggtggccgaccgctgctcgcgccggcagggccaccgcggcgatctcgacgctcgcgcgcggcggccccaccggagtcccgcggcgacaacccccttccgagcggtggcaccggcccccttccaagtggcggcggtggtggttctgggggattcgcgagcagcgtgctccggcaggaaacggagcaatgcggggtgaaagctgaggcctgcaggtgggccagcgcagtggacccttggatttattttcaacggcccagatcgctgcaatgtcacaccgtgccataccatggcaatgtcacagaatctgagtcccgcccgatgggagggggaaaatcggaagctgacatcagtataacacatgcgcgcaaaatcactttaaactattttttctcttaaattatttatccaagtcattgaaaaccgcatgtcgtaatattgagtcgatggttatgcagttgttcgctaactttggatggagattcataaataggattcaataatttttgtgatctttttatgctgtgagttttcattaatctgtatgcttttgtttattcaggtgtgagtttttattgagttggagtaataattggctatagctttttgagcaaaggcaaggattatattccattatctaaaaaattagatctatacatagtaaaacattatgagtacactaacatttttttttaaaaaaaatgaaacgaatttccttaacagaggatttccaaaatacgcgggcaatttgttgcaacggagtatgtggtggggccacgtggctggtgggggcaggaacatgtggtgggcccacagagcacgtgcgcgtatcgtgggggggagagcgaccgatttttcccctcctcgagcgacgatcagcagcaattctgctgaagttctaaacgtatgagaaacttttggtgacagctcaaacaacgttggctagatgtaagttagtaaaatttattgttagaacttttgatttttttaatcctaatttgtttttagcttggcttttaaattttaagattgttttacctggaatagctctaatttacaccacctttagaataggacatgactatatagcgcacgatcgctggtttgattaaggccctgtttagatctcaccctaaaattttttgacctgtcaaatataatgtttgaacacctgtatgaaatattaaatgattatacactgtaattataattgttaaatttttagaaaaaaaattgtcgacagatatgtagccaaaagtgaactggcaataccaacgccgaacgcatacgcaacggcgtcatagcacgagtagcaccttttctcatggccctatgtatcgtggagtctgtgtgatatttgttgtaagtattgggaagtggaggaccagactttgcctaagctgtgcgtcgtcaagtttcaaccaggtcaggtgtgtgcctctcgctgtagtagtctctaccattcccagcgcatgaaaccgaccgtaatgaagaaagcccacgacgcaccccaactacccaagtgacactcgtcactcgtgccgtcggtcatgtgcatgcaccacgcacgcatggaatccacggcaacagcggcgacgcacgcccaccacctctagactctagtagttgtagtacaccccaatgccacatgcaaaagcgaggggttgtttggttggcatactcacattactaaaacgtgccatactttatttagctaaagctgtttggatgctatattaagtttgccaccattcaccatactttttatgctacacttgtctaagttgtgacttacaaaaagtgagccacaccttagctagcaaaattgaattatgccacactttattgagttgatgatatgtgggacccaaatagataagaagtaatactgccacaagtgtggctataaaccaaacaatatactaacttggtcaaacttatctaacataagttgtgataacctttggcaaactttgggagcaaaccaaacaacccctaacatgcctaacatgtggctaacaaaattgaagccacacttcaactataggagagcaaacttgccacacttttatgtgtcaatgatatgtgggacccacgtcatggtgaagaaatcttatcataagtgtggcacgaaccaaacgaatgcctaacttaattaaacctggctaatttgagttgtgtcacagtgaagcaaattgtggcattgagcctcacagcccctcaattctgctgcgggtcgcgactttgcgaattgcgagtagttggcgcacgtactactcctactacacgtccactgcgtgtgtctgcgttcccggacaaaattgccagccagtgcacaagtgcaggcgtgcggccacttcccaaagaaacccaagtagtggaatttccggaaattaaaacagcataaagtgctcctaccactcctactagtagtactactacttctacccaacaatcattccaaccagtctccaaacaaaaataaaactattgcaaccagcctccaaaaaaaaaaaaaaaccttaccccaaccgccaactcacgggctttggcccctggcacggcagccttaacaccctgtttaattccatctccatgcctcatacctacccactaggctagcacccacgacacacataaaccgagcaacctgtgagcagatggccccatttgtcactggcaaatcgtggaggcgacaccggtgtgaaacaacaagccgcacgaccccccagaaatctcctcctttgcctcggcccctcccacggcgagagagcgtccacccgacgctcagcaactggagcaagcacgggcaacgagtcgcagtaaaacagcagtgcggactcggagacagtacggggaaaacgcacatcgagcggtggagagtggagtggagtcgaatgcagcgcgagtgagtccaaaacgactcgtctcgtaacaccgaagcgaccgagagcgcctactgccgcctactgcgcctgcgctgccgccgcgcaagcccaagcgcaacgcatccgcctctgcctcatcctctcctccacttgctggtcgctgccattgcctgcgcctccactccacttctcgcggctcgagaggctgacggcggggcgcctcgaatttcgccctctccgacgagcggaggcggaggagggagcccaggaagaggatgcgaaagcagtgaagtttgtagaattttcagttgcattttgctgtttctgcttgggagttgctttggggcgataagaattctcttgttgatttgttcctcgcaggagaggaggagaagaggggggaacggaaatctcagctgctgcgtcagtctcgcagatctgctccgttgagctgctgtttcacggaatcaccatgggtggaaatcatcgccatgggtggtaggattggttgggtgtcgccgatcttctcgcttcacgccaactaatcgagtgaattgtgggaagaagaagaagaagaagaagccgagtagacgacggcaatggcgtcgtgggagaacctcggggatgtggcgaccgtcgtgcagctgacggggctcgacgcggtgcggctcatctccatgatcgtgaaggcggcgtcgacggcgcggctgcacaagcgcaactgccgccggttcgcgcagcatctgaagctcatcggcggcctgctggagcagctgcgggtgtcggagctcaagaagtacccggagacgcgggagccgctggagcagctcgaggacgcgctccgccgcgcctacctgctcgtccactcctgccaggaccgctcctacctctacctcctcgccatgggctggaacatcgtgtaccagttccgcaaggcgcagaacgagatcgacaactacctccgcctcgtcccgctcatcaccctcgtcgacaacgcccgcgtcagggtcggtaaaaccatatccctttcagcttctctcatcagtgttcatttgtttaatcgtgtagttgagtgttagactagtagcctgggcatgtaggcttttaagaaatgttggttgcatcattctttgattctaaagtatggtatatggaatgtttgcttttgaaattggatggaaaatgatttgtcttggattcttggtggttttcctgtatggtctcatgggttctttgttttctgttggttggtgtgacccaaaggattctattttagaatctatcttctgaatataaccgacgctgcaaccttttggtgctccatcattttcatcgtctatataatctgatttttttgttggtgtgaatgtgacccaaaggattgtgaaggtatatgtatatgctaggaaactgattttttttttagctccagcacagtgagctcaatcactaatcatgccacttgggactagtgatctgcatcggatatcatgtttatttactcctatacttgtcatctttgcttcacaatccttttttttcaggagcggatggaatacattgaaagggatcaatgtgaatattcttttgatgatgaagacaaggaggttcaagatgctctgttaaaccctgatccaagtacaaatcctacggtagtgctcaagaagactctgtcatgctcttatccaaacttgccatttaacgaagcgcttcgaaaggaaagtgagaagctccaagtagaacttcaaagatcacaaagcaacatggatatgggccaatgtgaggttattcaacacctcctaggagtgactaaaactgtggcaagttcgattccagagaaatgtgccactcctaaggtttctgaaaaagctgactctaatcacacaaaagtcagtgaagatagtgcaaaaacatatcatgatgactctccaaagaagcaaaaggatgcctgcactgcaccacggttagtaagtttaactagtttctttcggtgactatcttcttatgatgtgggttgcagtggtaaaaaaggcagtgtataaaaccttttctcattaagtaacattaacctgaacaattactatggccatttctgggtaaatcatgaaaaatgtgcgcattcttccttattttagaggtgtaagtcttgtatactcaactgtgtgatccaacaaaagagaacttcactatgttctgttctagacttgaaatagaaattttgttatgtgcttatgcccctcaaaatgcgtatgcacattataaaaattttgatagttcctatggtgcatatctttctcagaagttctccgccatcttcttatggccatgatctggtctcaagcagaggatcatacagcgacgagtggcatgcagatttgcttggttg

SEQ ID NO: 23277 - DNA, 3236 bp, Oryza sativa
tcctgctgttgttacacttgctgtgtgaggagaaagcttcgtcaaaagctaaatattgcggtaaattttcctgtcccttcatatctgttgtcaattgattttttttcctgcttctctaaagtagaagtgcttcattctgaccctacaatgtgaaactgagctacctctggaattgttacagctccatgttatacactatgggtcatttcagaactgattaactgaactagactataactggggctatgggtcattttggctaaaggattataaatgaaactaacttaacaaaatgtctgtctgtccattgctaatgcagaggtttgttaaaagattgggtagagttttatctgaaagaattaccatgcacactatggagcgttcgtatatcctaagagccttttatgttacttaaaactctgtttatgttatgccgctgacagggaggttgcattgatgatttcctatcacatttgatgtgttgttgctgtgcgcttgttcaagaatggcgggaagttgagattcgtggagcttatggtgagtttcctacttccatgttatccaattaaccagttgagcacgtggatattatagggaatatacatggatgatggagtatatataacagtccacatttcctccttaacagtatcctaaatactagtatatggcactgttgacttttatttggtcaatcttttgaaactttgaccattaatagctctgaaaacattaaaaaaaacaagtggatatatttttctttataagtacatttacaatattacaattttgttagaaatgatcttaaattctaattgataaacagtgatcagcgttgctcactgaacacggaatgaattcaacagtgttatatatttaaaaacagatgtagtaaatgggaaggaagattgtattatagtgatatggtctcgaatcttctacggttgaaacattgctctgaaacatttcatgtcatcataaccctgccgatctcaaagacaagcacaacatgatttaaattgcacaagcaatattaatcagtatgcctcatttcctgcaggagagaggactaagattagcccaccctcatttcagtacatggaacactaagcagcgatgcaaggcttgagcttctgtgaagataatgacctaaaggctagagcaacccggtatcgtactacaatagtaatgatgacacagctacaacattgttgtatttatgcttaccctgcattgtttgtgttggtactctgtttatagtaacatcagttggtgttgggcacagtatgttgtatgtagtactttgtaagaaaaaacacaagttacatgccctcgttgtgctcgtctctgttgaatcccccatgcataatttaacctttagcttcatttgcactataaaacagtaacaatattaaaaaagtctcaaattgcaaaggcaatggggtccagaaactcggaggaagaaaactgttaacaggtttctcaaaaaaaaaaaaaaactgttactagtagagataaacaatgcgatgctgggccatgcgaacatgatgcaacaattcaaacaaagaccatcaactaaaaaacattagactttcaccatgagcttccgtttaccacgacgtacataagcttccaaggctcaaggcaggatgtatattttggcaatttaagcaggtcgtcactggccgccatcttatttatcagtatcttggcgaaatccatttcataatcgtcatgtgaagaattgttaagcatgtgaacagtttcacgatgacgcgatccacgggacacgcagacatacatcaacgaaggtcgttgagttgagatgaccgtcctaccagagttcctccaggcttcctgtcgaaactcaaacaacaccggcagatcgatggcctcaccgggcgtagcagcctagggtgagtgcaccggatgcaatctggccgcacgctactgctttcagcgaatcgaacggaacaaggagttcggataataaaactccgaaccccttttcaggctgcagtagaaccaaagcaagggttcgggaacaaaactcctaacccgcgtagcgcaggtgaccgtcgtctttgtgcccaactatctctgtagattgccatctcttgctctcgcaggctgcagcagaagctcttgataatgaatcaatgctggatgaatacaaagttcagcacattattggacgggatcgcaatgcaaaatcaccgcgctcggaggcagcgttcagcgtggccgtgagactgcattgggcaaaaagcgaaatccaacaactccagcgtctcatgctctcagccctgtcaaactcaaaaaccggaaaatcgatcgatggcctcaccgagccacgtctccgccttcctccagaccacgcagctgaaacaccgaatacgaggcccgcgaccaatgtaccttaccgaagtgagtattagtgtgggccatagtaactgggtagtagtagttgttcatagcatccacagtgtttatgtaggggatgggaagtaaggtggggcccgctttgaaaaaaaacgcaagttcgctatagacattggcttgatgtgtcagaaggtgcttatacctggtggtagcactactatccggtattagttcttcaccacctccatagtggttattacccgataataaggtaatatttaatgcttactactccctccatttaacaatataagttattttagcattttccacatttatattgaagttaatgaatctagacatatatacctatctagattcattaacatcaatatgaatgtgagaaatgctagaatgaattatattgtgaaacagaggaagtacctgctattttgctacactgtagatgccctggggatcagagaataaaactccgaaccccctgcaggcagcaagagaacctactcagcacaggtcacaggtgatcgttctgtgtgttgcgctgcgcccaactatcggctcgccttcgccgccgtggcgtctctgtagactatcatcccttgctctcgcaggctgcagcacaagttctttagtggaaatggacaattctgggctaataatgcagttatgtgtttggttgacttgtcgatttcttgataatagataggatcttgcttccgaatcgagctcttagtcatcgtcttgaaggcgtcgatcgtcgacggacaagaagtttgtcaagttagaattcctgcctttcaaatttcgaaggagaatagtcattttggtatgaa

SEQ ID NO: 23278 - DNA, 2866 bp, Oryza sativa
catctggtaagaacgggtgccatcctagcagaaatccagactcctgttagtgcactcgacgaccgattcgctagctggctgaagtcttcgttcttctcagagacatgtacgctagaaccctgtagccgatgatcatcgcgaccagagctacaacttctgtcacgccgttgtcaagaggtatggcattgatcagaatgtccgggacaggatgatattgcaccttcagcagtagcctgtacgtgtggtagttgaatgacaggtagcggagccaggatatgaatggtggaactctctgcatatcatgatggagaagagggcaatgcgtaagacggagtaaagacttgttcattcagtatgttcttcagcattgcatcagtaacacagggaagtgcttgctctcacctttacaaagaaccctcctgctagcatgaatgtcatgactgtaactgaagctagagttgttgccttcttgatatccaagaggctagctccaattgccaatcctaatccctgcatgattacttttttcttgagtaacagatttctaatcactgctaatatccttttgaaatatctaagatatatgatggatcaaccaaaatgttccctaacttatgaataaacacaggtgatgactacaacttcatgggaaaattccttggattttgttcccatctcaccatctatttagatagttttgatgttcatcatacattctttttctcatgtaattggtgtgtatatagacagtacaagttcaactaacagaataaacttttagaaaaataaaaaatgctataattcatttcttatataggtttcctcctttagaaaagattaagggccagtttggttcatggcctatgttgggcttaccaatttatgggtcaagtaaacagtacaaacaaaagtttggtttggatccaaatatcggccagcctgaggagaaagaatcggccacgccgtcgacaggagccgaatcgcgggcgtgaaatttgaactcccgcgcgcgcggccacacatcgaccatatgtattctacgctgcacacaaaaatataagaagataagctctagagttcccagttcccatttgtcctctgttttttgacgcccttcatcttctccatccaataaccacatctcctccaaatcttgaccaagaaaacccaagaagatcctcatctggtcatacacactcatcttctaaaccaaccgaaacaaataatagctcaaatggggtagagatttggggctacatctaggagggatgggggcgagttgaaacttgaaaggggagtgactgctcaggagaagaacaggacgagtacgtgtgttgtgattccagcagtagctgtactgactccggcgtgctcagttgctgtgaaaaacaccatcgattgctacaggaaaaggtaatcaactgatgctccatccgtacaatgcttgttcatttgtgctactaatgtagttatttatagtctgccattaccatcttaactagtagcaataaaaaacagtaggttgaataaatcttactgtcttagtgttgatttctttgctcaaaaaaatatacaggtgtccatttacacctcagtaatgttatttttagtcgacaaatctacatgttggctgggcacaatatttattcagtaaattaatttgtttttcactgaaccgacacatttccttaagtaatttgaagctgcgtatgtaatctcatccagatggagaacactcgacaacaatatatgcatcacttcttgctaacgaagaaggctgtagtggtactttgtcttttgatcatcatatggttgaggaacaaatatcgtaggaggagtagtcgcaaaggggtaaaatatgggcccctagtccacagggatgtatggagaacaagtgaactaatcaggctgatcaacatttcagataggacgtgcactcaacaattaagaatgtcccgtgcagtattctacaagctttgtgctcgtcttaggaacaagggactactagttgacacctttcatgtttcagtagaggagcaagtggcaatgtttctgaaaaaggttggacaacaccattctgtttcatgtgttggattctcattttggcgatccggtgagactgtgagtaggtattttcgtattgtgctgcgagccatgtgcgagatagctcgagaactcatttacatcaggtctaccaatacacatagtaagatcaccagcaagaaaaacaaattttatccatatttcaaggtaattctaaacaccaagccataacaatgcatattacaatacattttgtttattttaactctaatgtttcactttgatatgtacataggactgtataggagcactagatggtacacacatcagggcaagtgtgccagccaagaaggtggataggtttagaggccgcaaaccataccccacacagaatgtattagctgctgttgactttgaccttaggttcatatatatcctagcaggttgggaggggtcagctcatgattcccttgtgttgcaagatgcactgtctcgaccaaatggccttaaaatacttgaaggtaattaaacatttcaaagaattcatgattagccttgctataagttgacgttaggctctatgacatgtttgtagggaagttctttttggctgatgctgggtatgctgctaggccgggtatattgccgtcttatcgtcgtgttcggtaccacctaaaagagttccgtggccctcaagggccacatggacctcaaggcccaaaatgccctaaagagcttttcaactatcgtcattcttcacttcggactacgattgaacgagcttttggtgctttgaagaatcgtttcaagattcttatgaata

SEQ ID NO: 23279 - DNA, 1409 bp, Oryza sativa
acaaatgcaagtacatacctaggctttcacttacatagtaaagtttgtatttttttggatgctattttcaaacttttgcaatacgaccatccacaataggatggcatttgatggcatagccatttgatggcaccaaaccaaacctggtttagccaaaaattggcaaggttagttttggcctttaaccaaacacaatttagcctttccaaatattggccatgccaaattgtgcctttggccaaattttggtaaggcttgttttggcctcgaaccaaacttgctctaaaaataggagatgtcaatggaattataccacgaaattagcttgaaatgtacctgagcagcaatgatgctgaggaagacggtcaacatgctaagaaagaaatgtgcggcagttgctttgaggcctgccatgaagtagacaatcaccataaatatgactggaaggaaaaggtccagtggcagatcacttgtcgttctggccaagaagtatgcactgagcttgtacatgtcagctgcacgctccttgttcaacattgccctttcttgtgggaatgtgaagatggcagtaaacacaggaaagaaaccccaaaacacagctatgaaaaacagtaagccggcctgcatacgcaagataaaattgtgttatgatactaatcttcctgcatacccgagctgacatatcattaataagctctctgagtaaccaactccgccatttcacatgaatcacattttctttggcgtaaaatgaatcgcatgattattgctatctatgtacctgatcttgtagaccttttggtgtcgagggatcagagtgccaccatagtagacctaagataactgatgttgctatgacctgggtgattctcatccagctcaaataatcatgtcgccgttctttgatccctctacagaagaggatggaatattgctgccaccagctagtgccccattctcgctttgatgatgttatagttgtcttcatatcgtcactgattggaagtggatctagaagctgcttcttcgccttgtatgccactcgattctcataggcgtctacaagatactgcatgaaatcacatataaattattcagacatctaaaccaaccctcaactcataacaccagcacattgctttcatgtcgtcacctcatgaacatcttgtgctgatggcttgtagtcattcttggtattagtttgcaggttttgattttccatgtgcaccttgtcatctaactcggaaggaacagaaacatcagtagtgtttccgttggcgagatccagtagaaattctgctgggttcattgcgatgagcggggtgcacccaatggactgaaagtagggcatggcttcagatgccttcccaaaatagagcaaacttcctcttcccaggaggataagcttg

SEQ ID NO: 23280 - DNA, 7404 bp, Oryza sativa
aaatatgctcgcaataagttatcagcaagtagctgaaaagaattgaacctaagagttgtttctgtacgcaaatgattaggtcatacataccagctccaagaagtcaagaagaggcataggcgaaggacacacaagatattttggagcaggcaaagtcgcatgaattatctgaaaaagcaaaatcggacaacagctgcgaacacagctcttatctgttttctctactccacacggtgcaaacaattactgataactcgtgcaaaatcatcaacacatgcatatcctaattatcttgactaggaccatcatctctaaaaatataagaccccggccccgtgcgaaatgtaaaataggtctctagctagattcatgccaccaaacatactttcactgtttcctcaagcctcatcgaatcttgcatgtcttctgggcttagcgagattaaaaaaaaagaaaataaagcaagattgaagtgaaaccttgaattgagtaagacaactgatattgaattgaggagggaaaaaaatcaccagtttgtgttctgcattcactagacgaaccgaagaaagagtgggctaaattgtgctttctattggttaacatatgggctattttttttttctctctgaagcatggtacttaagcaagtgcattagaattcagggcctcaatttgtagggtgtcctatacagctgatcacctgcccttgctaagctgatcgaaagtattagcagctgagatgggtgttaggtggtgtttacatccagggacataactttagtccttgtctttagacactaatttagagtattaaatatagactacttacaaaactaattacataaataaaagctaattcacgagacaaattttttaagcctaattaatctataattagagaatgtttactgtagcatcacataggctaatcatggattaattagactcattagattcgtctcgcaaattagtccaagattatggatgggttttattaatagtctacgtttaatatttataattaattttcaaacatccgatgtgatagggacttgaaagttttagtcccatctaaacatggccttactgttaacaagagggccctcactgctgttgagtgttgacaagatgtggagtggctggtgcatgtacgtcttcagagtctctttcgaaaattactgacaaggaaatgtttgtctcagaggagaatggtctctctgtgaaccaaagacgggaagcaccgaccaatcgggaaacggcattagccattgacccccttggtttaacgcactctgctgcaccatgtatgacgagacgtacacgtaagggaacgtgcggtaggtagtagtagcaggcaagaaaatatcaggaaaaattcttccttgtgcagtcttgcatgcttgcagggggggtgtgcccgttccctgaagggagtagcactatcgataaatttttcctcagacgtataaatataatataattacagtgttattaaattatatcataatataatttatattaattttttaaaaatctcatggtacacgctatttttcacgaggtaaagttcacaagacgtaatctcctcccgagcacgtgctatgatttttttctaacaatttaaaattatgtgaaagttgcatacaagtttagttttttttaagtagttatatacaagttatatcataactacatagaagttataatataattacattttaattataatgtatttatattaatcgagaaatacttttatagcaaataaatctttcgtggacatgtggatgcagaatctgctcgctgccgccctgttcgtgccatagcgcaacccagctccgctcttgggccggaacgggattccggcctacgtgatccccgttactgttgggccggaacggcattacggcatccgtgcgggccctgttatggttgggccgtaccggggattccgatctccgtgcggccccgggaggggggcgtggtggaggacgaaggcgacggtggcaaaatcggcgacggcgacggcggcggcggcggcgatggcgaaggggagggacgcgcggtgggagtagatactgtagtcgtgcgtgctccggaccagcagcaggtagcggcgcggggaaggaagctactggtgggggacaacccagatccctcgcccgcgactcttctactcgcgctcgcacgccctcgtcggccgcgccgccgccgcggtgatggagtcgccgccggagtcctcctcctcctccccggtcctcctcaacatcggttcgctccccttctccctttcgcaaaaactcgctccccatcccaccgctcgcgtgaatttagaggctgatggtgatggtggtggctatggcgcagggggcaagaggtacgcgaccaccgtcgagacgctcacgcagcgggagcccagctccatgctcgccgccatgttcagcgggaggcacacgctcccccggcacccggacacggtacgccgcgtactcaccagtggagctctcttctcgggagctgtagcctcagaggatgatggtgggtgcagggcatggtgttcgtggacagggacgggaagcacttcaggcatgtcctcaactggctcagggacggcgccgtcccagacatgtcggagtctgagtaccagcagctcctgcgagaagcggagtactaccagttgctcgtaattggaattctcgatcgtttcttcgattcatcagttgcagcttcccaattaaccagccgttgtgaaaacatgatggtttgttttccagggcttggctgattgcataaatgatagattgggttggaaaaatgatgagaatttctcggaggccgaattgacacgcaaagatgtgatcaagtgcatccaagctccgagagtcagatttcgtggtgtaaatctatctggccttgatctatccaaacttgtaaggtctttattgttgttctctattggagttgctcattttttgttatggttattaccactccattctagttgctcttagcaactctgatttcgtgtgtgttcaacagaaatcaataaagcattttattttttttctttagtttcttgtaattttgtgacttttacggtctacaggatttatcagaggtggacttcagctatgcatgcataaagaatgccaatttttcctctgcttatcttcgtaaagcaaagttcagggtatgccattcacacctaagttcttcgttgtttaactgcttttgatgaagtagtagcccttaggaactatgctagttatcataatattttaaggcattttagttctgtcacaaaaaaatatctaagtctttgttttttgtatgactgtcaaatgttgtatcagtaataccttaccttgtatgttcatgacagctgacagaagctacttgttcttcattccaaagtgcaaatttacatgagtaagatggtccaaccagtttcttttagcttatagataggctctaagatgaaacacggtctctccttttttacttttgtgttttttttttgtgttggatgcataagcaagcagctaaccatctatttcctcctttttgtgttatttttgtttcgctgtgttattgtaattgcttgatttggaataacaggtgtgagcttattggagcaaatcttgaaggatctgttctagataaagcaaaccttcaaagtgcaaacctacagggtatgtaatccctttctttacctgtcttccgttttatgttatatgtttccaaaaaatactattatgctcaggattatcctgtttcttcattttcttggcttttgacatccttttcaccagggaagatcatcgtccctgtagtattagacaatgtagctatgcctattttgctttcactctctcctattcagggtgtgcttatattcttgtaaaaactaagtaggaaatgattgagttgctaggcttattttgcagatgcatgcttaaagcaatgttgcttcattgaaacggatcttcgttctgctcatctacaggtttgaaagtttattgtacatggtgtgtttcatgaatgttcccagattctcgcgctgctattctgctaacatattgcattcctggtcagtatacaagaaaaagtgaaaatcatgatgaacattagcataaagcaaagcatttctgtttttttttagaagttagttttctgctgctagaggtgatcgaatatctagtttccatccttgcaatattttgtatcatccaaacttccaaagtttggctgcaaaattttgtccttgcccaaagtattatctgcaacacatagacatatattttgtccgtacaggcttgtatcgtctcttcctgaacatttgaatataaggcataaaggctccctattccaaatggttttcagtaacttaaaatacgttgatatttgggttcttattactcatttcctcagtgtcttattgtcagtccaactggattttcagggtgctaatcttatgggcgccaacttgagtggagctaatcttgaaggggccaatctcaaggtaacaaaaatggccccattcaacctgcactttcatcctgcctgtcatatgtaacttaaggaaagctacttgagggggttaaccacagagctcttacacaaagacagaaaaaatgattctaatgtatccaactcttcttttactgccaagcttgaaataaagtgtctgaagtttgcactaggaaataactctagaagaaaatcaccaggagatgttccaaaggcatgaactgatgctgagatgtgcatgtcatgttttgcttacaaaatattaacaaatagggatttgcgaaagagatggtaatcatcttaattgatgataatgcttgcatataaggttttcttttttgtaaacatgtgatgtttgacatgagtgaaaaggtttcgacctgtagtaagtgtgataacagtgcaaacccgttatacttagaaccatgaaaccatgactgtttgatatgaaatcatggttaatcgtgtactgaagtgtacattaacgaaaggtcattggcattaacaccaatccctcttttcttgtgccttagctgacaacccagttccttgtcctcgctttgttattcaaacttctttatccgtactctaagctagtctgatttgcagggagctaagttggccggtacaaacttggaatgtgcaaatcttcagcgagcctacttgcgagaagttgatttgcgcgaaactgtatgttgtcctgcttgctgcttgcttcttcttttttttcctctctctcttttcagtctaactaaatagtgaacagtgaaagaatctaaacttacttcttaaactatgttttactttgacttacagcatttaactggtgctaagcttggaggtgcaaatctgcttggagctatcagataataccaagggaagaagcttatatcttctacatttacaattaaactgaaactggtgctttggtacctcgaacattatcttgcctgcaccaacggtttgttcatgagtaaatagtttcttgctaccgattctgcagatagtcatacagctttagtcggcggttgtacatatacccttgtcacattcctctgattcgaaattcggtgatgaactgttggatacagctagttgcttagtatcatcatggatagaagctgttctagtaggaaaatttcctgcatactttgggatattgttgtgaacaatgactgaaaattttagtgggaaatatatcttcgttaatgtgcatacaattttcttttcatcatatttactcttcctttaagctttcagtaaaaccgggctcaaaagcgaggaaaatcatattttactcttgttcatgaacctatggaacttttgatgatgtagaaattaccacttgtataggctgcagagatcgatcatagatacaattaactgcaaatcaaatttgtttcggttataatttgcgtgcacagaacacttgcgtttccacacgtattccgaaaggaaacgttggcaataggtagcaatatgtacaaggtgaaggtatcgaacgtgtaagctacgtgcaggcttccgaaacttgcacgtcgtcgttcaggggggctcacgcatgcaggatcacttcagtgtgtcagacgcgcatggcgatcaatggtcggagaagccgatgagaccatgtccgccgtccgccgccgacggatccatcatcagcctgtacttggcgtagaagccggcggcggccaccaacgccagcacgacggcgaggaccaccctccacggcgtcttcctccggccggtcaccaaggcggtgccacccgccgccgccccgtcgttggccgcgccatcgtcatcttcttcttccttgtcctccttctcttgatctgctggtgcagcggtttgctgcgcctgcgcggcgccatgatcggcgggtgcggcggcggcggcggccttgggctcctcttccgccggcgacagcttgggcatggtgatgtggaggacgcggtccctggagtcgaacctggcgcggacgtcgccggcgttgcagtcatcggggacctggaaatccttgtggaagcggctccaccggttgccggagacctgccgctcgccgcttatccgcagcttcccgtggttgtcgatctgcactctcagctgctccttcttgaaccctgcaattgcacccgccatccaaaatgacacatatcaaaccttgcattgcatgaactgagcaataaaaaacaatttgtattcggtctaaaagttggtgttgaaaaacagaatgcgacgaaaaacctctaaaatcaaactgcagttcccaaaattgaaatttaattttgttgcggctcataagcgaagaggtgggaaggaataatgctcttgcctgcggcagataggttgatttgaaggaccttcttgccggcctcctcgaccagctggtgcggcggaacgaagtcggtgtagttgcgcggcgaggtggcggcagcagcggcggcggccatggctgcaggtggtcgatcactgaccggtgatcaggtgctcaggctatgatcactatcaggtgtcgattgatcagttgcaggtgtggtcgagttgatttgagaggaagccggtgttcgtgcacatatatagtgtgtggattcagggttgtttggagtgcgatgcaggaggaaggattgcttcattggacggcgtctgcagggggccggccgcgggaatgaagctaccttgcttaattaatttggttgcgctccctcggtgatataccttgtctagccttcgccaacgcatacagatttcccccacaaggaatctgaaccgtgctgttgttacttgttcttgttctcacagtataagtatttcctgcgattttctgtggtttgttctgggcggcactgtcgggatgtcggcagtcggcacggtaaa

SEQ ID NO: 23281 - DNA, 705 bp, Oryza sativa
attcctgcagcccggaaagcgtacagaaggtactagcgaggaaggtggctctcgtgagaagtatatcagttggagtgatgatgctactcagttcatgcttgagtggtatatagagctccgcaaagacaaacctagtaccttcaagtggaagaaacaacaccaccagcaatgtgctatagctttaaaagacaagtttgggattagagtcaccaaaagccaagtccacaggcacttaaggctatgcaaggaaaaatggagttggatttgtgtagctttagggaaaagtggctatggttttgatgcagcatcatgcaaatttaacattgacccatctgagaaggattcaaacaaacttggtgtaagctatattattgtgcaataatttctgagttataattcatacaagaatgtgctaaatttgtttatttctaactatgtttcttctcatggcagacaactaaatataactacttgactaagcctatcaaattctttcacctctttgaagaattatttgttggttgttcaaaagctgatggttcactagcaattgaccagttcaatgcaaatggtagcagtgatagtgatggcagtggtagcatcaaggagttggaagaatacatatttgcattggaagatggtggccatgattctgacacgatagctcgcaatagtcctactactgatggcacttattcagggcat

SEQ ID NO: 23282 - DNA, 626 bp, Oryza sativa
attcctgcagccctagcgtaggattgggcggaactacgccgagcgaggccggcgacgagcggcgcttccgagctcgggcggcgacggcggcgagcacacggcgagcgacggcaacggtcggggcggcgccggctatcttccaggaggctactcgagctactactgaaagctaagggggggagatggagcgaggaggaagaacggagggaggcactaccgtgcgggacgggcgcggtgacgagaggccgacggcgtgggagtgatctctccggcctcgggccgaggaagaggaagaagagggcgcgcccggagtccccttccgcgtccacgaacgcaccggctctcccggcgcttggcgatggacggcggaggcgagacagagcacgggagcggcggcaatggcgaggaggcgaatgggagaggaaggaagggaggggggggggcttgggtttattggaggcgggaaggtcggtttgggagagaggaaccgacattgggcggtcaagccggcgagctggcgctccggctagcggccaaagcgacgacaggaggtgacgccggcgagaggggaaaaggggggaaaaaggggaaaaggagggagagaaaggggggctcgccccttgctt

SEQ ID NO: 23283 - DNA, 1221 bp, Oryza sativa
cccgggggaggcaaactagacttttgcggagggatttgatttggaaggatttttattcggaattgaactcgacgatagatcggggattgagatcttgagatggcacggacactagacaacaagcaaagaaacaaatttcgcaattagggtttttaggagataattttcccgctaggcgccacgacggaacgggcgctacatactgatcttgagaagacagcagcaatgctggcttggcctgtgcctacttctgttactgaattgaggggatttttgggactgacaggctattacagaaaatttgttcagggttatagtatcatagcacgaccattgacactcttgttgaagaagaaggcctttctttggactgatgctgctcagcttgcttttgatcagttgaagacagctatgagtaacactccagtgttagctttgcccaattttcagcttccttttactttggagaatgatgcatgtgcttatggtcttggtgctgttttaagtcagcagagtcaccctattgcttattatagcaaaactttgggtcctgttaatcagaaattgtccatttacgaaaaagagtttctagctattatgatggctgtggataagtggagatgttatctgcagagaggtccatttatcattaaaacagatcacaaaagcttgtgtcatttggatgatcaaatattggggactgaattacagcaaaaggcaatgactaaattgatgggtttgcaatattctttccaatacaagagaggggttgataatattgttgctgatgctttatctagaatgccttcctcctctcaattttgtgctctttctgtggtccaaccgatctggattcaggaggtgatcaattcttatacagtggatcctcaagctcagcagctactagctgagttggctgtgcattctcctaattctcaagggtattcattgacacaagggattattagattccagaataagatttggattggatccaatgcaggactgcatactaagttgattcaagcttttcatgcttctgcacttggtggccattctgggattgctgctacttatcatcggtttaagaaattatttgcttggcctggtctcaagttggatgttgaaaattttgtgaagcaatgtcaggtttgccaacaggccaaacatgaacactgtcggcttcctggactgttagctcctctcccaattccaaaagag

SEQ ID NO: 23284 - DNA, 4659 bp, Oryza sativa
agagaatggctggggccaacttggcaaaaagaaatcgaatttatctctctccaaactctgtctctcctctgcctcagctctgtttctcttcgtccccaactccgatctcgtctaaatatctctctctcttgtcggcggcgagtttcgcggtggcgtagtgttacagattagtgttgaataatcgttgactagtttaacagtagaaacgagcttttccccttttagtccgaattgcgccatcaagaaagtggaacaatacccgttgttattgccttattggtacccacgcagctcaatatgttcctttcactgcaagaagttttagtttggtttaataatttggtcacttaaacctttccattgttcatgtcgcaacgtagtctgttagtctgaaaatttttcactagcagccttgacaattacttatagtggctttagttagcttactgttgttccatctcctttctgatcaaatttactaggtgcgtctgagtaaggagcgcaatactaacgaggacaggctcagcagcttacctgatgagatactcatcctgattctcgacaagctagatgcacgcacaacaataaccaccactatcctttcaaagcgatggcttaatcttcctcggcgctcccacacatgttacgacttcgccgttgatgacctcctccctccacgctaccacaggttgaagcgactgtggatggaagccaaggcagcgtatgaggcagagaagtcaccatatgtgacaacaaacagggatgctgtgaacctgagcgacttttatgccatgaaggacaagatggatcagtggacgaggaggatccgtccactcacggctgccctggaacgctatgaacgctgggccatgcggcactatgtcaagcgggtggatgcattccttctgccccccgatggtgtgcaccgaactatccaaaagctaaggcttcaaacctttggcaggaagtggaaccaattcattcagcgatgggttactgcagcgattgccaggtggggagttgaggattttgagcttaacgttgaaggccgttgcatcgcctatgacttcaagatacttgatggatgtcagaatttgcagctgaagcggctcgttctgttcaactgccctcccttgggttcatttaattccttgacgtttcagaggctcacgagactctccttgtgtaaaacttcgtactttggattggctaatcggattttgacacattgtgtgcatctattggactttagtatcagatattgtccgggttactgtgctggtggtctccgtatcaatgtcccaacatcaaggttaaagaatctgctggtggacaactgcaaatttgggaaaatctatctgcattcactgccctgtcttgaaacttttgcttgccggggcctactgccttccaagatatactatggcgaggtgcctggacttaggcatgtaggtttggactatctaaaaaccgaaggcgacagcaaagtcgatccaagtgttagcaacagaacatatccactgagcaaattcttgaagaggatcccgccaattgagagccttgttctgcagttcaaaggacctgaggtgagcgatcatacatactcctgaaatgaactaacagactagtcactagtgtatgaactaatagtaatagtgtagtggcctcttgtctctaagtgaaattgcgttgcattttcatgtgtgcaggtgtggattgagccaatagctgtacccgacccgttgcttcatctcaagaagctattcattgcaaacgtaccaattaattgggatatattctggattgtcaccctgcttgatgctgcgccggttttggagtcatgccatgttcatgtatgcactctacaagtctcttttccttaaatatcctcttcaatttttttggaatatatctgtgaattcacacgagaattctcaaaccttagtgcagattgacaacaggtcggaaaatatggcttcttggctagacgtgcaagctcaagatcgtcagtaccattgcctgaaggagctcgttgtcgtcggcttcaatgcagtagggtggcaaatcggctttgtcaggcatgtcatgaaggcgtcgccgaggatgagacgggtgcacttgctcgatgggcatgtcgttgaagacaaggagcgggtgctcgagggattggaggtagtcccacatacgcgggagtggcacgagtttgagagatcagaggtcctcgatgatctctgggatgggaatgggatctgctcgccgcaactggaaataattctggaatgatctgttggcgacaggctaaggtataattgtggaaggtgtcgctaaggctgatactggttcacctgctcggcgggtgtcgactgtcgagtgtcggatttcaggatttgcatcgtctgatattacggagagaatggctgagagcctgagacgcacagtaaaatgtgccaggagctacaatatcttgccataaacacagtaaaaacgctgtgcgaacagtgtcggagtactgttcactcatacggtatcggtttactgttgattaccgtagcgatcgatcacatccggccgcatttaatctaacggctaaaaatgaccaatggtagagagtacggtaggtttttgacaaattcatcactaaattttatgatatcataccttgaatatagagtttcgtgaaaaatatagtgttaatatgtggtttgtaatactacctctttaaatctatagttttataatagtttgataaaagtagaaatagttctataaaatttacttaaataaaaaacggatcagagaagcagccatataatgcttcaaacaaaccaaaaacgagtctcgtgactaatggagtatcaacagtcacaaactcatgacacgataattatttttacatgcccttattgtcaactctcggttattttgtattgagtcaaacaatgcctcatcaagcaaataaataaacaaataacacaattaaacacgtgatttctatccggcacgtaacgtaccccacatctcatggagcagacgcagatccatccaagaaagcgattgtttcgtttatccagggaatacgctaaacgcggtatatttgtaaacgaaaaataatttataatttttttatatatgtgttattaactatctacaaacaaagactgcaaaataaattttgatgggaaaactttaaaattaattttgaatttaaggttgaaaatttaaattttggctgataaacgtaagtactccctccgtattttaatgtatgacattgttgactttttgattaacgtttgaccattcgttttattcaaaaaatttatgcaaatatgaaaatatttatatcatgcttaaagaacatttgatgacgaatcaagtcataataaaataaattataattatataaattttttgaataagacgaatgatcaaacgttggataaaaagtcgagggcgtcataatatagaggtagtataagaaaaaaaaagattgggctaaagatatcgtcaatgatagcttatcgtgacagcgcgcgtcaaacacaacccgcggaggaggggacgtgcacgccgcaccaccaccaccaccaccatccatcaccctcctctcccccgagtcagccacagcccgcctccaaccccaaccaccgcacgcagccgcgccccgtgccgcgcccgtgccgtcgcgtgccgcgcgcccgcgtggcaaaccacccaaccacccccctctcgcagccaatgcgacgcgacgccctcctctcctcttccaaagtcgccatccgtttcgccgagagcccgagcccgagaccaacacaatacagtaatacacaagtacacaacacctccacccattgcggcaaagttggcacgatctctcgctgccttggactcttctagttctagtttagtttgccttctttcttctccgtctcctcctcgcggcggcgcgcatggagcggctgatctccaagtccgtcgccgcccggatccctctgccggggggcggatccccatcccgccgcctcgccgtcgcgggtctcggcggcggcggcggcgtcgagccgtgggcggggaggctacgggcgcagccgcgtctcgggccgatcgcggcgcggccgcacgatggtgtgtcggccccgccgcgggaggccgctccggcggcggcggttggacctccgtggaagttgctgtggagtctgctccccaaggtgactgccccaattttgggttttcttttttttcatctactggaattgcaatgtttggctcgaaaatgatgcgcgcggtagaattgccatggtaggttctcaactagtgctagtcgtagtacttaattgtggtaattatgccccttgagaaagttcgttcagcttgacaaatgacaaccttctgtttgagatcgaatagcatgacacatgcctcgactgggctttgacaatgccacggctgtgtatgggatgagaagagtagtatgctttgtagcaaatgaaagagatctccaaatgaaatgctgtttttgtgttggctctacctctataaatgattaagctggtgttttctggcgcttccatatacttcatatggaaaaatacaaagccaatgcacaagaaaatctttattttagcagaacagaggggaacatgtgagcactcttaattt

SEQ ID NO: 23285 - DNA, 787 bp, Oryza sativa
aggtgactacattatttttcatcagaagcaagggcattatgcttgttttctggtttggttttgtgcatatatgctttggttttttaaaatcgtatttccccatcattattctgatttagtcaacattttgctatatcacaggcttccagagctgctcttttcctattggtggcgcttgttaccggcaccctgcaatctagcattccttatcctgcccatgcatcagtgcaatcaataaccaaaactggtggactatttacatcagagatactaagcagtggttgggctggtttcattgctggatgcttgcataccttgtctgggcctgaccatctcgttgctttggcaccactgtcgattggaagatcaagactggaaagtggactggtcggtgccctttggggttgtggtcatgatgcaggacaagttatttttggcctgctattcttattactcaaggatcgattgcacattgagattctccggacatggggaacaagagtggttggtctgacccttctaatcataggaggtatgggcatccgagaagctacagaggttcaggaatcgtcgctcgccctggaaggcgtggactgcaacataaccagcagtgagcctttacaaacccctgctgctcccaggaagaagaaagttggttttgcaacatttgccactggagttgttcatggtctccaaccagatgctctactgatggtgttgccttcattggcccttccctcacgcttcgctggtgcagcatttcttggcatgtttttgatggggactg

SEQ ID NO: 23286 - DNA, 2863 bp, Oryza sativa
tcaactacttcgagctggtgctggtgaccaacatggccgggagcgggtcgatcgtgagcatgtcggtgaaggggtcatgcacggggtggatccagatgacgaggaattggggcgccaattggcagtgtctcgctggactggccggacaggcgctcagcttcaatgtcacctccaccggcggccagaccatcgtcttcgacgacgccgtgccggcggggtggtcgttcggccaaaccttcagcacctaccaccaattcgactactgattgagctatatatgttcagacatcaggaatatcagatcctcgtctgaaatctgaatgtctatctgatcgatccagcattggtaatctgtttcattgtaagatcgagcattatttgggagtaccattcatttgatcgttttaattgctagtcggtggatgtaaatcaagttgaatccactgctatctttaatcgatgtgaaactgtagtagtaccactgaagatcacattccatcagacttcgattacatcataaaacgtgtaccacatgctgatgacagccgacgagtcatattcctcgatggaagcagagtggcaattaaaggctacgactagagaggctcacgagaaaaatacatgtacaagtacgcaataatatcaacaccaaagccatcaaataattcgagactcgtacacaagaaaactgacaggaagacagcggttgagctgattctgaacgaagcctttcgtgtggaggtgattaccaaacgagacgagctacgcaggacagacagcgtcagccgctgtctggtgatgcatgacagcagagacagctctggggatcgcaacaagagcttttacttgtggacggacgcttgcaaaatccatcgacgatcgtgggacgtggctagctcggcgatcaatccaaaggagtaccaggagactactagctaggagtgtggaaccttatccaacaacacaacaagacaggagaagataaaggccccggattctcacgtaacagcgtgtgttttgcgcttgcgttttttttttttttgacttttttgcgcttgcattcgaatcacgttcctgtatcttcatgtttatgtcttctcatcagtcatccctgcatgcgttcgagagatcaccttttccttttctgggttccaaaagatccgttaaaatttggggcttatttggtttaataccctatcaatatatgttggtagtgccaaactctaggcaagttttggcactacaatattttagtagggtagaattgtaaatgagtgcatttgaatttataccaattgagagccaaattttaaattgtggtgaagaatattctaaaattatgccaaattgagtattggcattaccaaacatttggcttcaaaccaaatcatcacatttgctatttaaaccaccaaaaaattggtatggcaatattttggtatcaaaccaaaacgccccttaatataggcaaaatactgtagagatgcatttgatagtacagtgataaggagcgtattcaatcttcaacacgaaatattgcaccaatagtaacacgctagaagcatatctgaaaattcttggttgaaaaggcagaacaaagaatatatgctgattcactattgttttcaaaaacaaggagctggggcagtgagcgatgaggttgggcggcgaagggatgaggtcgtcggaatccagtaggccagtagtcgtaggccggagagacaaaacaaagatgggcggtgcccctccctcctcgaccaccgctggattttctcatcccagacgtcgcaattatttcactttcccatgacgtggatcctccgcggcatcccccgccgtcgatccggcatcggacgggccgcaccccgcggggccgcgtggatcccacactaatacctaccggtgccacggccaggtcgggcccacgtgccagcttcccctccgcgggacgccagcgcgagcggctttagagcggcgcgggggggtgggccccacaccgggataacaatcgtggccgtccgtgtcgatcggacggtggagggcggtgtgaacaggtggtcgctgcggacttgtctcctctctctctctctctctctctctctctcccttttgtgaccccaccggagaaagcccttcgctgcgtccatccgtggaagggaacggaaagggggaagaagagctgcagcgagcgacgagggcatcgccgcctccgccgccgccgcgcgcgacggtttatcccgtccccgatccgatcgtcgccggggctcctcctcctccaccctcgccgcgggcaatatttggaaccccccagggaagtatctctcaccgccgatcgcctctcatgccgtgctgagtggagcgcctaccgaatccctacccccacccgccgccgccgcagcagctcgtgccgtatcctgtttacagcggtttgtgggtgatggcttccaacgccgaccagcacgcggcggcgaacggtggtggggggacgacgccggctgcgaccggtagcccccctgccgggaagaaggcggcggccgctgcagcgtggaagaggccggggaacggggcggcggtgccggtcgtggtggcgcctgggagccccatcatggacgccgactcatggccggcgctgcccgggctggcgtctccgccgccgacgacgctgacgccgacgccgatgccgcccaaggcatcgcccaaggtggctcctctaccgccacccgctgtaagtgtttgatccagttgattgtagaataatagggggattgaaatttattgccgtttgatgggattgattgggttttcccgttggggaatcatctcaggaggcggtgatcccaccgatctccttggggaattccgg

SEQ ID NO: 23287 - DNA, 2089 bp, Oryza sativa
ttaacgcaggacttcaaaaatgaattgagagctgtttcattactaagttttacttgccaagttcctttggttaaaacttaatgtatatcacttacaggtacactcttaactgattagccactaggaaaaactgaatgtctctgaacgtaatgctagaacatattacgaggagaatcttatctagtgatagcaaacaagttgtcaataggtgtattcaataatgatcttaaggttttcctatagattggaattgtgatagcttgacaacactgttatttatcattctacttacccgcatattcacttaagttaaaaatatctaaatagtaaccaccaactcatctagaaatcactcatctatcctccttgattagaaatcactgtaataaacttctacagtagtagccttttcttttgtcaatcttctgaaacaatatgacttgaaggaaaatttcgtttagcctgtgacaccccaattgactccccaagacgttagaaacatcatgtacttttggtttcctatcatggcttcttgcttgaaatgagaatgacatgaatatgttttttttttaattctaattcacattttctccatacatctgagttctcgctgtgtttcttgcatacttactttacagggtgacaaattgcggaagcgtgaaagatgggagatctggttgcttccaaaacaaggttattctgctggaaattcttctggttcgctgtcccctgtgacatccaacattgattcactggcatctcagtttcaatctgttggacttgagggggcaggctaccatgcaagtcaaggaatgcccggtgaagctctccttactaggtcagcaacttcagttagtctaggttatcaggcaccccccttgggagggttatacagcaacgggagtggaccactttttgggcagaagtctgcaagaagtttactccggagcgataccttttgaggttttacacaagaaagattacaacggcatgccgagttttctctggttacggcacgcgtacctcatctactggggtgaggagtgaggactaaaatccagttgatttggaagaaaacaaccaaaaaaaggaaataaaacatacaaaaaagagagatagaaatacccaaaaaaatataaaaatataaaaaccaaaaaaatcgaaaaacttaaaaacaagaggaaaaaacatagtaggtagtattatgtgcaggacttatgtattttgtggttgtgctcttgctgggacgtgagtacgtgacattacctgttaagtactcgtttgattgttgctcttttgcagactgagttgttatggatgttgtcagtcggaagctgttaaagacgagacaaacttatttcaaaaaactgatgacattattatcagttgtgcatcttctgctgcccaaattgtgcatatgcattgtatttcttttgaaaatcgtattcatgttatgtatactttatgctgatttggtcgaacgtggacatcgatctgccgctatgaaacatctgccttcttcggcaaaattgctgttatgtgcttctggcacagagatccttcctatttacttgggggaaaaaatcttattcatctctatagttgtgctcaagagtataacaaagttgtgggcaggccattgtatggtctgcaattggtattatctgtgaatgatacgttttattagtaataatgtcccttacgaaactttggtgatatcaaattatgtcattatcaaattttaggaaagtaagacggacatgtgtggtgttaggtttgagacattctggtaaggtttcaacagtagaaactactgaaaatgccacaacttgataagattgtgttgacttggtattgatctagtgaactagtggtagtatgtgttaccttgccaaattttaaatgtcaaaatttaaaattaacatgaaagagaacaagcccgaagatagatcacttctaaccattctatcagtagcaatttattttttaaaaaaaagaaggctaaagttttgcctcgtatatattgatagagcaggaggaaaaaccaaacaaccaaataagttatttacatgtccctgccgtaaaaaaa

SEQ ID NO: 23288 - DNA, 1151 bp, Oryza sativa
gccccaccacctcctcctgctccacgtaacccgtcaccgtcaccttgttctgcttcgcgtccacctccacgctgctcacgcccttcatctcctccactgctttccggaccttcctctcgcacccttcgcagtccatccgaaccttcacctccaccttctgtgtaccattttttttttctagttaacaccccgttccatttcataaaatcataatgtaggaatttatgtgattttacaacttacgcagttgcatttatcgttcaacccaaaaaaaaaaaaaaagctgacgaggaaagatgaaagatcgtagttcaaaaggcgttgtacctggaactgcttgggcttcttcttgagaaggatcttggccggcagcacgcgcagctcggcgatgatgtcgtccacgcccattctctccgatggcggttgttggtatcagtagctcagcacttggaccaatgaaactagccaggatttgggctctcacaatgcctttctttcacaggagggtttaccggtttataggctttccaaacgaagggtatctgatgatcgatgatgccacctttcccaggtacttataccgatagagatggctgtgaaaaggataaacttgagacgcttcttgtgcttctgacgaaaaaacagtgtactgaaaatacaagcagaatgggctgagcgcacgcatctcgcgagtgtaccgtggtagagaatagtaacatggatggacgagtctggattgctctgcatgcttcccaaatcccaactcattagttggaaatggagctctgtccggttgcttctatttggatgtttccacgcgtgataggctttcttttgtgaatcaccttttcgcgaaccttctacgctcctttgctgttttggtcgggccgtgctgtgcatcttttttgtgagatttcattcagttccaccaagcattgtctagacagagagaagaaaaagatctctgttgtgaatcttcctgcatgaagaagccttatacgattcaggctgtgatatatacactacactcgccttcaatgtactatagcacgtctgaaatagctgaatgattttgcgaacaatatagagaaattcacatatataaagttttttgcgaaaatcgcactgttaattcaccattttattcactg

SEQ ID NO: 23289 - DNA, 2477 bp, Oryza sativa
  unsure (1)..(2477): unsure at all n locations
ttcctgcagccccggcgccctcgcccagccgcatgcagcacgagagcgaggcgagctcccccgacgccaccaccccatgccagtgtgccaccgcccgacctcgccggctagggcaggaggcgtgaacggcaccagcgagcccccctctcccttggccctccgactggcttcgccccccctcccccctctctgtccactcctcctgaagtcggtgacaacaaggtgatcttccttgtttctatcgactccctaccactggatccaccaccattagccactagcccactacctcttaactagtcgctttgttttggccccgcagccaatgccagcccaccgccctccttcatccccacggtttcgggggcgctactttgttgcccgcccaattccaccacctactaccagtcttccgccgatcacggccatctctgtaaagctggcggactccccctcttccccctcttcccacccctatcaccccaaccccaatccggatcctaaacagttaggatcgtcgttgttgtccgctagagttcaacaaggtcgttagagttggctaactggagcacggatggcgaagcagatatgaaggttagaagtttgtaagattttacctcctttttttcctatcgaatgtcgaatgtggtttagtaattcaacttattaaaattgtagcagctggaattaccggtttaaccatataaagcttggaattgataggaagtgaaactggagaccagccggtagagggtcgcatccgcgaaaacactgaaacgaggcaccggaaaacacacacagatcacacatgttatgcaagttgtcaaagaaatgttcgcaaaaacaagttgtcaaagaaaggccgaagagatttcttgaaaatgaaatggtttaattggcttgtttgagtgtcacacgggtttgggttgaaccaccgaaggcctacatgcgtagttgggtgagcaagcccaaggatggaaatttggttttgggttgaaccaccgaagcccgaaggcctacatgcgtagttgcgtgagcaagcccaaaggatgaaaatttgcagctcaatcagacgcacacacaaacattttttttttgaaaagaaaagaaaacacacacacaaacagatgaaaatttgcagctcaatcagacacacacacacaaacagtaaggtagcgtaacaggtccggatttagttttcttccatgcatattgctctagtactccctccgtctcattttaagggcaaccataagtttccgcgcctaattttaatcgtccgtcttatttaaaatttgtttataattagtatttttattgctatgagatgataaaacataaataatactttacttgtgacttatatttttaatttttttcaaaatttttcaaataagacaaacggttaaagttggacgcggaaaaccatggcgacggagagagagtagcatatagagagcaccacgcttttaaagcgatctcatacttctagaatcagtaagatggtactaaattttacgtgcatttttttgggcctttgagattttttttcagaaattattgtctaactacatgggcttgcccatataattccaacagtcaaagggtggtgtctagatgaaagagagtacattaattaaatgtatattaagacgcatcaacaatgcatagtacaaagagatatatttgtatagtatccatgatgaagaaactactactagctagcacgtacacatttcatgatatacgggaatactcgtggaatgcaatcttcagtagcaatttcatatcatttaataatgattgccttggatatattgcaacttaatttacatccatcaattagcaactgaacaatcaaatgaattaatgatcccaataaacaatgctcgatcttagagcgctctagcttaattacaaatgaaaacgaagtatgaatgctcgatcgatcagacattcacatttcagacgacgatcttgatgttcctgatgtctgaacatatatagcttagtagtcgaactgctggtaggtgctgaaggtttgcccgaacgaccaccccgccggcacgacgctgtcgaagacgatggtctggccgccggtggaggtgacggtgaaactgagcgcctgaccagccagtccggcgagacactgccaattggcgccccaattcctcgacatctgaatccaccccgtgcttgagcccttcaccgacatgctcgcgatcgacccgctcccggccatgttcgtcaccaacaccagctcgaagtagttcaacccggtgatggtgaatctcactcccccacttctccagcacttcacccttcaatataatccatcacaccacaacgtgttaactatttcatgatatcatgcatatatatatatatatatatatatatatatatatatatatatatatatatatatacacacacacacacacacacacaacttnttcgttttagagtgcttttac

SEQ ID NO: 23290 - DNA, 2958 bp, Oryza sativa
ttgcagatgatgaggtagcattgcccgcacgacgccccgttgttgaacagtggcgtgctcagcgccgcgttgttgatgccgtagccctggcgtacagattcccgtacccgcacgcaccacctgtttgcacacatatgcacatcagcggttaatcccatcgagaccatcccatatgcacttgttccaacatatatattccatcagattgtgtcttgcattatgcatgatgatgcattgccgtgcaatggttgacacaatgcgatgcgagaggaaatggagtagacgacgacgacgtacccatggtgccggagccgtcggcgccgccgtagaacgtggcggtgccctggagccagccggacctcgccggtgcaatgcagagtgcaagaatcgcgagcagctgcaggacaatgttccccatgatttcctgtagctatagctaggtctcctgcgcaggtgcagctagatattgttgggaagaatggatttggaggtgagggatgtgtgcggcattggtggtgcttaaatagtagtaataagatctaggaggtctgaactctgcagagaggcatggattgcataccaattaattaagctagggaatgattgtcgttatgcattattgaagcatgcgaacactgttccaacgatcgcatgcacatggctctgcaaacgccgagagattgactaacgcgtaatgatgcatgattggtttgctggtctaagctctactgtcgtcagaaactgtaagtcgtaccttgaaactgaagtttccaatcgagtagttaaaactgaacagaagtagttgtgacttgtccgcggggaataacagaaatgttccgaacagcagaaatgctcttgatcatttacgcacgcgaatgtcgtttctgctagccatcacgcaagctatagctgaattgaatgttagccatagagtctttctaattacatgtcatgttcacactgtttccgctggctgaggtaacaaactataatacacccttattttataatacatagcgccgttacttttcatataacgtttgatcgtacgtcttattaaaatattatactaaaattagttattttgtggtaacttattttatcatcaaataaatttaatcttaacttaaaattttacatatttatattaaatttttttgaataagacgaatagtcaaatattataaaaaagtcaatgacatgatacatttaaaaaaggagatagtatttccattttctacagatcggaaatgaaatcctcaatcagaaatatttcacgccaaaaagatgcatccgctcatttactggctacctaaattcttttcttgatttttttattagtaccggatattttaagttcttaattggataagcaagtagatggaatggaaagaaagtaggaatatttcatttcttaattaattgttctttcagtgctgtctaattaactacaggctcaactcccttgaacccttttacaaccgcagcttctttttcctcttccaagttccaactactcattatctaaaaaaaagttccaactactggcgagacattgaaatagtcaaataatttgcatcatcttgttcagtgctcgaggtcaaccaacaagaaccgtatgatcaatatagtaaaatacaacattctttatgaatttcttgttctgatgagttctagtgcaactagtaattaaacggcatacgctgtgagcacaaattctgcacatactcggaaataccggttggtatgttataccttgcttcgttgagtacataactaaccattttgttcattatgggtatccgattcacatctgcacccgccattgcaatcataattatttgagtaatatagcacaatgtttatcatttttttgcataatcaatttataccacatttgctccaaatataagcacttccgtgtgtttcctaaaatatatctgaaggaggacgtctagtttttttaaaaaaaaaacgcatagaaatagttatattttggaacaggcaacaagtattaaaccatcgattaatacactttcaaggttgatagtacttatcgtctttgacaagaacatgatctcaaaaaataatcctgaccatttttttctatataatatacataaaaatatcaacaaatatatgattttattgatgtacatttgaagtctaatttacacttatggtctctatatttttaagacaaatattttagttctggtatgttggcaattgtggaaggaacgaaactccatgtttactctctcttcggtactagtggttctagagtctatggtcgttaactggtgttgtttcttttggggttttcttgatagggtagtgtaacgctccgcttttcgtgagacattaaaaactaattcggcaaaatcctaattgcgaaaattttcgttttttgagtgagagtctaagtcgtgccatggatctcaattcaatcccgttgttccctctcatcgaaatcaaaatcctctgcctcaaatttcctcttccaattcaagtctccgaaatctaattccgaaagtcaatcccttcctttgaatcctcgtcaaatacatttccgaatcccaaaatatccaaactcctgttttgtttccttccttgactccttgaacccttgtgtacaaagtatcaaatttagattcaaaacccaaactccaaatctctccaaatcaaaatctttcagcaaaagtctatgcctcccttgtcgatgggcggattcctctctctcccggcccatcccctcctctcggcccagctctcacgcacgtgcgtcgcacgtgttcgggagtgagagacagcgccgactcctttctctctctctctcgacgtcgcttcccgccgacgccaccccaaaattctggccgcgtcgccgtttcccgcgcgctcgcgcatggccgaccggcaaggacgccgctcccaccgccttcgcccttcccgcgcagg

SEQ ID NO: 23291 - DNA, 2832 bp, Oryza sativa
tcatcggtctgtatgcatcataaaatgtgtatgtgctagtggtttcttcggccccgtttggcacagctctagctcccaactccaacttacctagagttagagctgtgccaaacggtacagatcctccattttttgagtggagctagttgagctactcatagaaaatgaactacgggggttaggggtggacagaaaaagaccgaaccgaaaagaccgaaaccgaaaaattcggtcctaggtagtgaaagaccgaattttgttcggtcaatttggttagtctcctcggttaaccgaatagaccgaaatatcaaaaaattctaaatgcaacctacaatccactatatttaataggattaaactctaattttcacatccctacttcttctaggcatgcaacctaataaaagtctttactcataagtgcttaacgaatttttttgtgatttttgtgttgaaaatttccattttttctttgcatatatgaaaatattgttgaatttcggtcaggagcgagaccgagaccgaatttatcggtcctgactttttgcgctgaaattcggttttcatttttcaaagaccgaaaagaacgaaagaccgaagaccaagaccgaaattttcggttagaccgaatgcccacccctaacggggatggagctggatttttgctgctccacagctccactctaccccaaaagacccactaccctttaattttttagtctatttatacaaaaatgccactcaactgctctttcagtcctcctctcctcccccatcttcctcccgatccaaaccgagctgcatgcggggagcggtggcgtcggtgggtagcggcgacaggccgaaggcgcgcggaagacgacatgcggccggcggcggccggcgcgcctggggacggcgcacggccggcgggccggcggcggatgcggaggaggatgacagagcggcggtcttcttcaacccaggcatgggctctgggcgcaagggtggccggttgtttgtgcctgggtgtcacgccccgaactagtcccgaccggaactagcccgtgacgctccaaattaacctgttaatcgataccagtcccaggaaacagtgttggtatcacagggagacagaatatcacagcaacagaggtctctttattatagagtaggagtacagtcatgttgggctgcggacagatcccgagctcacaactgcattacaaaagggaaagcggaaaccaagacttgggccaaacatcacaggcgcgacttgggaactaggtcgaaaccctaaaactcatcgtagccgacttgctcctagaagaactcctcgtcagcgggggccacatcatcttcttcagcaactggggggggttatttatatagagcaagggtgagtacatgagtactcagctagccatgggaattaagtgtttaatgcaggcttcaaaggaaaggctattgtttttgcaattgattttatttaaactcttttttgaaacgactaggtgagtgcttctcaaatgacacggatgagacagtgcgtctcgtccggtcggagtatgtgcaatgtatcagtctttgaattgatcaaggttagcacccggccaacagctttcaaacggccacccgggcctggctgatcccatcagccgccgattttccaaacatcgaacccattccacagcagtaatttcacaagcagtagtcaaacaaaactacgctaggaatcacctcacatccgcccatgactgtgagcacggctgttcgaacagtttgttaacctctgcagagggggtacaccttacccacacgacgttactagccttggtcacccagcccgtgcataacagccacgtctggtgactttggggctttcacgacaaggcatttcgaaagccgacacaggttcaccgtatgccaacgagaggggtcccagactaacaccagattaggtcccagaccatactgtgccaggaagcccgggggttctccccgacaccaccccgttgaatccacatgtctcttggcatcaaggctcccccgattagcaatttactcagctaggggtgtcccatttcacccatgtggtcgcacttgtcttatgttcggatgtaattccaaggaaacggtccttaagtgcaagagcgggaaaccgtactcccggtacgttccccggtccgcgaatttgaaaattcatttagttcgcaagagccgacccaggtgtcgggtttttccaagtcttttgtaaaacccaagttttacccatcattggatatttttaaatttgaggagaggtgtcccgatgcgcgtgcttgaaggcccgtgcatcgaagcacaacagtcgacaaagggggtttaagtgttcaataattcaaggagggtaattgcagcaattaggattggggggccggcaggttatctcgcaagccacggccgaattacttgtgtaaatcctattcatgcattatttgcggaaaagaaatacttagatttaaattataggtgcaagatgatcaaaggtgacttgccttgctcgagatcttgagcttgatcctcaaaatcctcgcactgcgggtcttcgggctccgaaactacacgagaaatgggacaacacaacaaacggcgaaaataaagccctactattgacctctaggcgtgccattagatagatctcgagatttaaggaattttggaagttgaacggagtcaaacgggcttacggttgggaagatattgaatttctaagattattggattttttgtctaaaggaaaaggatttatttaaatcctttttgaaaaaaaaaggaaaagaaaagaaagagggagggaaattagacttcgca

SEQ ID NO: 23292 - DNA, 3551 bp, Oryza sativa
gcaagggtgaccggttgtttgtgcctgggtgtcacgccccgaactagtcccgcccggaactagcccgtgacgctccaaatttaacctgttaatcgatgccagtcccaggaaacagtgttggtatcacagggagacagaatatcacagcaacagaggtctctttattatagagtaggagtacagtcatgttgggctgcggacagatcccgagctcacaactgcattacaaaagggaaacggaagccaggacttggaccaatcaacacaggcgcgacttgggaactaggccgaaaccctaaaactcatcgtagccggcttgctcctggaagaactcctcatcagcaggatccgcttcatcttcttcagcaactgggggggaattatttatatagagcaagggtgagtacgggggtactcagcaagccaggggaaataagtgtttaatgcaggcttcaaggagaggctgttgtttttgcaattgattttatttgaactccttttttctaaaaacgactaagtgagtgcttctcaaacgacacggatgagacagtgcgtctcgtccggtcggagtatgtgcaatgtatcaatctttagatcttgaaacaaggttggctcccggccaacagcttttcaaacggccacccgggccaacaacttttcaaacggccacccgggccaacaacatttcaaacggccacccgggcctagctgatcccgtcagctgctgatttttcaaacatcgaacccattttctcaacagcaatttcacaagcggtagtcaaacaaaactacgctaggaatcacctcacatccgcccatgaccgtgggcatggctgttcgaatagtttgttaacctctgcagagggggtacactttacccacacgacattactaacccggatcacccagcccgtggggatcagccacgtcgggagacctccaagctttcatgacaaggcatttcgaaagccgatacaggtttaccatatgccgacgagaggggtcccagaccaacaacaggttaggtcccagaccatactgtgccaggaagcccaggggtcctccccgacaccaccccggcgaatccacatgtctctcggcatcaaggctcccctgataagctagttactcagccaagggtgtcccattccacccatgtggtcgtacttgtcttatgtttggatgaaattccaaggaaacggtccttaagtgcaagagcgggaaaccgtacacctggtacgttccccggtccgcggttttggaaattcatttagttcacaagcaccgacccaggtgtcgggttttccaagtcttttgtaaaactcccgttttacccaaattgttactcagattttaagtttgaaggcgaccgtcgatactcgcacagagtgcacgaatatcgaggcgcaactgggtggttacaaggggacatggtatggcaattaacaatcgaaggatcaaatgcaacaagtcaggtaggtccaccaatctgccttgcagatgggacaaaagattaagtgcggtcctatcaatacataatatttttcaagcaatataattaaatttcaattataggctcaagatgttcaaaggtggcttgccttgctcgagatctggagcttgatcctcgaaatcctcgcactgcgggtcttcgggctctgaaactacacgcgaaacggaacaactcaacaaacggcgaaaaaataaagccctattaatgacctctaagcgtgccattagatagatctcgagatttgaggaattttggaagttgaacggagtcaaacggatttacggttgggaagatattgaatttctaagattattggatttttggtctaaaggaaaaaggatttaattaaatcctttttggaaaagaaaaagaaaagaagggagaggggggaatatagacttttctcgggcggctagggtgcggcccaagagatttggggcggctcggccgagcttaacgggccggccggcccaagacggcccaagcgcgcgcgcgcgggagggaggagagagagtccggtggaccgggctcaccacgcgtggccccgggtgggacccgcttgtcagcggctcggctcaccgtgcggagggagcacgcggcgcacgcgcgcgggcggggaggaacgcggtgcacgcgcgcggtccgcggcggacgcaggtgcggcgggcccacgcgcagcctcacggcttgcggtggaatgcgcgcacgcggagggaccgaccggggtcggcccgacccggtctgggctgagctggcgccgacgtggcgcctacgtggccgccacgcggaccggcgggaggtagacgacgatccggccgcgaatggacggcgggcggcggcggcgagcggcggagcgaaccacggtgatacgggcaaaagcgagcacaccgggcggttacacgagacgaggggagacgaaccaacggctcggatttgccgggggttgctcgacggcggcggattgcggcgtcggcaaccggcggcgggagaagagggaaacggcgacgaggccacgagaggtcgattcccggcggtgagagcatctatgcggcttcgggaactcgacgctagcgtcggattgggcggaactacgccgagcgaggccggcgacgagcgggtgctacggagctcgggcggcgacggcggcgagcacacggcgagcgacggcaacggtcggggcggcgccggctaactacgggaaggctactcaagctactaccgaaagctaggggaaggagatggagcgaggaggaagaacggagagagacatcaccgagaagaggaggggcgctgtgatgagaggccgacggcgcgggagtaatctctccggcctcgggccggggaagaggaaggagagggtgcggccggagtcctcttccgcgtccttgctcgtgccggctcctccgacacgcgcaacgacgatcggcgacggcgaaacagagggcggcaatggcgcggaggcgaaaaatgagggagtttggagggggagggcttgggcttaaatggacggcaatgtcggtttgggagaggggaaccggcattgaacggtcaaggcgcgagctggcgctcggcgcttgcagccaaagcggcggcaggaggatgacgccggcgaggagaaagaaaaggggaaaaaagagggggagaaaggggcttgcccctttgccgattcgggaaaaagggggggagcgggagcatcgcggcagaggtaggaggggctcggctccgtcccttggcggcttgcgcgcggagtggcgggggccgggcgatgacgacggtgatgacgggggggacggcttggagcggagcggcgacaccggcgacaggcgcgcgcagaggctgacggtggcggcgaccgggcggtcgaccactcggctcgcgcgcgcggcttgcaacgggcggcgtccgcgcgggcgcgcgcacgcgaacacggcgcgcgggaagcggctttgcgagcagggagctcgcgcgaggggagggggcgcccggcgcgggcgactcccccgcacgcgcgagcagcgtgcgggcgaggctgagcggg

SEQ ID NO: 23293 - DNA, 3293 bp, Oryza sativa
attcctgcagccccacttgtattcctgtgagaatcctatgtttttcctattccttcgtttttttcattcctatgatttaaagggggctaagtgttggaattatatgtgctaaatccatgtagttagacaatagtttctaaaagaaaaaaaatcaaggcccatcacatgaaaggatgcacgtgaactttagtatcagcttactaattctatgaatatgagatcactttttttaaagtgcggtgctctctatgttactagagcaatatggatgagagataactttaagaaaagcgcaccttaaccactcacttcacggagttttgtcatgttgtcttagagtggctagaaattcaaaccgggtatgctaccttattcttttctgcttaatggatagattgattaacgatacgtttgctaaactgctaaacgatacaatgtttgtccctttttgcatgttaacatgtgagggaggatgttcatatggaccagaggatccaattgcctacgtacatgtccttttattgggcaattgactatatgtgatttatggactatgagtccatgattaacgacacgttcggcttaactctcgggcccaggcatgctggtaggccttcgatggttcggcccaaatccgtgcgacactcaaacaagttaagccatttcattttcaagaaatctcttcggtctttctgacagtttttttttcttttgcgaacatttctttgacaatttgctaacgtgtgtgatctgtatgtgttttccagtgcctcgttgcagtgttttcgcggatgcggctccatgagatgctaccggctggtctccgatctccactccttatcatttcactcagtcaatttcaagtttctgtacgaaacctttatatggttaaactggtaaatctaacagctacaattttcataaatcttttcttagatgtatcaggtactcttttataattcgatcggcctaaccaagctattctgtctaaagaaacttgcaaaaattaaaacaaaccaaaaacatgtcaaacgatataatgcttgaggttaatcattctgttccaggaatattgtgctcaacttccatacgaaaaggaacttaaatatatacagggtgaattgctgttctgcacatgtctgaaaaaaaacttgcactataatcggtttgccgttgcatgattatcgttagagcagctgcttcagttgaaacttgatactaaacgacttacatggtggtgtactatattaattaatctattactataatctatcgatcgggcaaacaatgagtattactcaattaattatgactgcaatagagcaatggcggatacagatgtgaattgaatatgccccctgaatgaacagaacggttagttatgtgttcaaagaagcaaggtataaaattattgctattgtacgtgcaatgaagagtgcagaccttgcgctcccactaatcgtagtggaattcatcagcaaaataaataaatcatatagaaatagagtttttttactattttcatcatacgattcttgttggttgacctcaagcactgaacaagataatgcaaattatttggctatttcaatgtctggctcgccagtagttggaacttgggagagaaaaaaataagcagcggctgcaaagggttcaagggagttgagcctgttgtagttaggtggtactgaaaggataattgattcagaaaagtgaaatactccaacgtcctttccattccaacttctcgcttgtccaattaagaactttgaaaaattccgtactaattaagaatttcacggaacgaatttaggtagccaataaatgagcagatgcatatttttttattacaaattaaaactgattgagaatttctcgttgagaaatctgtgtgtgaaatatttctgatttagaatttcatctctggctggtaaaactgatatattacagtttggcacatcaggaagtatatttaattttttttaagatgatggatagaaatccgatcctatattcacacacatacttaaagattacatgggtacttaaggcacattctaaagagataattgagcttaactactactcgttttctattagcatgttttttaaactattaaacgatgtatttcgtgcaaaactttctatattaaaaatactaccttttcaaaataaaataatttgatttatattttttaataattaatacttaattaattatatgctaataaagtttttattttgcgtgtcgctaaataagacaaaacgttaagctggaaagaacgtgtcctaacactccaaatcccataactgacacaaaagaggaaaaacaacaataagaaagataaattttacagttcctaagatgtactgtatcaaaacttttaatgcaaacttagctcctctcggtacctacttaactactataaaatcactaaaagaaaaggtaaacacgatatgtagttagaaagattgtatggctaacattcagtttagctatgcatgcttgactagcatagaaacattcgcaagcatgcatgttcagagcatttctgttcttgctgcgaaaacgcaacgacttgtgttcagattgaactgaataatgctaatatacgacttatcatttctgatggaggaaacggtacgtagagcttagaccagcaaaccaattaatcatcatttcgcataagtcaatttctggacgttgcagagccatcagccatgtgcaacgatcgttggaacagtgatcgcatttttcaataatgcctacgacaatcattcccttgcaatatgtaatccacgcctctgcatgcaggcctcctagatcatagtactatataagcaccaccattgccgcatacatccctcacctccaaatccattcatcacaacaatatctagctagctagttatctagcttaattactctcgatcgactgcacaggctcaacctagctaagaggaaatggggaacattttcctgcagctgctcgccgttgttgcactctgcattgcaccggcgaggtcggactggctcccgggcaccgccacgttctacggcggcgccgacggctccggcaccatgggtacgtatacgtcgtctactccacatacggcccaaatgtccgactcacgtacgactgaatttgatttatttgattgccatggattaaccggatgcatgtgcgtatgtgtgcatacaggtggtgcgtgcgggtacgggaacctgtacgaccaggggtacggcatcaacaacgcagcgctgagcacgccgctgttcaacgacggcgcgt

SEQ ID NO: 23294 - DNA, 1090 bp, Oryza sativa
gtagcaaacagaggagatcatggggaacattctcctgcagctgctcgccgttgttgcactctgcattgcaccggcgaggtcggactggctcccgggcaccgccacgttctacggcggcgccgacggctccggcaccatgggtacgtcgtcgtctgctccaccctctggaatagcattgtcaattatgattgacaaatgacaatgttgcatgcatgcatacgtgtactttctctattctaaaataaatcaaactaaggcgaaccttactccccagcacgcaaaataaagtagcgtttagcacatcattaattaagtattagctaaaataaatttaaaaatagattaatatgacttttgaaagtaactttcgtatacaaaatttttgcaaaatctataccgtttagtagcttgaaaaacgtgcgagcggaaaacgagagaggtgagttaggaaagtagagataagaactcagccctaatgtgggatgtaacatctaagctcctagtactaagggtgtgtttagttcacgccaaaattgaaagtttggttaaaattggaatgatgtgatggaaaagttggaagtttacgtgtgtaggaaagttttgatgtgatggaaaagttggaagtttgaagagaaaatttgaaactaaacacgacgtaagatattattcaaatttgtagtattaagatatgtaacattttataataataatagattgatttattttgaaacgaaggaagtacgtcatatgcaacctgaacttgtgacagaatatttgggtgcatctgtacttgcaggtggcgcgtgcgggtacggcaacctgtacgaccagcgctacggcatcaacaacgcagcgctgagcacgccgctgttcaacgacggcgcgtcgtgcgggcagtgctacctcatcatctgcgactacggcaaggcgcccgactggtgcaagctcggcaaggcgatcaccgtgacgggcaccaactacggcggctggtgcaacgcgacccgcccttactcgacatgtcccagcctgcctgggagaacattggcatctacagcgctggcatcgtccccatcctctacgggctgcagga

SEQ ID NO: 23295 - DNA, 2243 bp, Oryza sativa
catatgtccaaaacaatctgaatactataatttctaaccagtcactgtaaccatgtcctgataccattagtaatatattatagcaattattctattcggtgcatgattcatacgtaatccttatagctcgtcgggagtcaggactcaggactagaaatggcaagagtaactaatacggggtcatggcttaattacaggacattggacagaagtgttgatgaattagttgcagactttgagctcggtttgaagactgctgcggtggataactattcaagaagacttgtcgagttctgtatccttcaggcgctgcaagttgttacatctgttgatctaggagacaagatccatgatggatcgcttagtcggttcacatttgatatgatgctggcttgggagacacccactccttcagatcaacaagttaccatggtttgtgatttttttatatttgtgtgaaattgtgtgtttgtgttcttctgaaatctgatctaaactgaccaatatggtgacattacaggagagcatagctaaagaaagagaggataagaaggagccgctcggagcaaatgaagctgtcatgggcgatgagacctcactgttctattcagatatcatgcctcttctcgtatgttaacacatagctgattaaattcctttccgtaaaatttcttcaagctattcatcggtaatgatgtttcaggtgaatgaagaaccaacagttggagaagatgcatatgtgtggtttggatctgtatttcctttggcgtgcgatgttatcaatgctcgattcacctttgaagccctgactgctacaaccgctaataggcttcattatcctgcttacgacaaattcctgaaagaaatggacaagtatgcaaccacttcacagttagatcttttttgcaaacataagcaacattgcatttcctctgttttttaatggataactccattgacttttgatgtgatatttgactattcgtcttattcaaaacagtagtgcaaatatgcaaaaaaatttaagtcaaccttaaaagtttttaatgataaaacaaatcataacaaaataaacgatactgatataatatttttgaataagacaaatagtcaaatggaatgccaaaagtcaacactttcatacctccctgctagatgtcgttcttcttctttttttttaacaaactggtagaactgcaaattatactgataaagcatgagaaaatgatacaaaatatagaacactgaccaccagtccaccacatcctgatggatgccatgtgaaattgacttttttttaggtcttccgaattcttgcagaaggtgtcaactccaaccggaactgaacttgctgaagatgaattcatcttgcacatcgagggaacagcaggaacacaaagggtggtgcggcacattggaaccactagttggccaggtcatcaatctgatcaagagttatattatttctggtttcttcaggtcttagcattttacgttgatgctttggtaacattttcttatgaatgctacattggttgtatactatacaggcaggctgactctgacaaacaaggcattgtattttgaggcttctgggaaaatttcatacgaacctgctttcaaagtcgaacttacaggcagtgaaataggaaaacaagttaaaactacttcaactggtccttttggtgcaccattgtttgacaaaggcatcgaatttgaactgtgagttccctcttgcatttcttatttttgtgttcatatggacaacctacacggatcaattctttttgttattaaaattatcactttgccccttttgcaaagaatatcgacagtaaccattcatctatgcagaccagaacctttggttttggagtttcctgagatgaccagctcaacaaggcgcaatatgtggcttaccctgataagggaagtaatattccttcaccgattcatatcaatgtacagcatagactcccccattcacaaatgggaggtgcattcgagaatcatattgggggtgataaggcttcatgctgcaagagagatgctaaggatgtcgccaccgcctccttctagcttcctagtattctcgctttacgatgagcttcctaaaggtgattttgtgcttgaacaactagcaaataatctgaaagagacgtcaacgataactccgctcagtgcatcccatgtgttcaagggtttgagcaagtcgcatcgggtagctttaagtgcggagatag

SEQ ID NO: 23296 - DNA, 841 bp, Oryza sativa
ttcctgcagccctccaaaagataatctcatgggagaaaccacttgtgactatcagtgtccttgccatgatggtgttaaccatatacaggttagatttatacaccgcatttaatttcaacatacattttactcttggaaacgatcagggaacatgagatgcaaggtccctttttttttcaacatgatgcagagagtgggtcggttttgcgttagcggcatccttgatactggcagcaggattcatggtttgggctagacaaagaaaaatcggtgcactatgctcagaggtgatcatcgacacttcatcggacaagacgacgatggaaagcctagtggaagcacagcaaagcctgaaaagagtgcacgagtacatcaagacagcaaatgtcgtgatcctccgagtatcgtcgatcgcgttagcgaggtcaccaaaggtatcaatatcatcagagttcatcacacacgttctccgatcaccgaatcgttccaccgttgcgattcatttccatgtcatgttaacgcgttccttcatcatcatggtgtggaactctggataattttctgagtttgcagcatacagaaacggtgatatggatgctgacagggttggcgctggcgctggccgtgatcccgttcaaatacgtcctgatcggggtgatggccggcggcttcatgtcgaacacgaggatcgcgagagccatgtcgaacccgcagggaagccggcggtggagggagtggtgggagagcatacctgccgtcccagttcgggcggttgacgggggtggtctgtgaagtgttcgacgaaatgccggcagaaaaatcctcggtattgttcagctat

SEQ ID NO: 23297 - DNA, 6541 bp, Oryza sativa
aagtgaatctatacctccaggctaaaaacaagtaaacaaaccaagagtaagaaccaagagtcattaagagagaaatgaagtcataaccaaggagatgaaggtcacatgagctcctcttcaacaatgacaccagaaaactcaatgcaccagttatatttgataatatccatcaagtaattatgtttctgctttaaatggaaaagtaacgatgtttctatagccgcggatgggaatttaagcctaccaaatcagatttacttgaatcatcatcggtacgcgtacagccttgttacagtctgcagattcttatcttgtcgaattgtcaattctaggaaacatatttggtccaagaaaagctgtaagaatgtaggccacgttgtcttctgcacatacttcagatagcagcaacatgtaggataggcaggatatctccattatccactatatgatgtatacatgccgtgagcccactgtcttgttctagcttaatgatttaattgattaaattgcccttgtgtattgcatctgatgcatcagctgtgaaatctagatgctttactgactctacttttagttctctttctgcttttggtatccattgattgcgaagtgttgctgtatatgatggcaacaggtgaactgatccacaataagccaaatctttgtagcatgtccaacatgaataactcggtactccctctgtcctattttaagtgcagttgtgattttccgtgtcaaatgtttgaccgtctgtcttatttgaaaattttaacaaaaatgaatcatgcataaagtactattcatgttttatcatctaataataataaaaaatttaaaataagacggatggtcaaacgttggacacggaaactcatggctacacttaaaataggacggaggtagtattactttcagagtcattaacagattggagatcaaaccttgcaccaagttattgctgtttgttcagaactatattagaaaaaaatgttgtctgggggtgaggttgaaaagaacttcagagaagcagaaaataaaagaaaactaacatatgactggtggaatcctggaaattaccttgacgctgcagtatccttttcccttgattaaataattaatcatcccttggagtgtattcttgataaagtatgtccttggctagtgaacaaataccagtatctcctgatcacaccaaggaaaatgtgtcaaccttcagagagagttctgtattaaaacaaagtgagcaaaaagaaaaaaaaaatcaagtgttaccaaaagacatatatgaaacccttttttttatcagacataattatgcgccagctaggcactctactgtgacatgaccctaaccaaataggtcttttttttttcagtaaatagctacctttatcaaaaaaagtacaagggtgtcctgtgcacattgcaggcatgcatatagcagaattgtgtaatatctcaacagccaatgcaccaaacataagtacagtacactgaacatcacaagatacactttactcacctatacccaaaaaagtcttcatttcctctagagaaaatgtcctaaaagcatgttgaaaacggtttgcttttctctgattcttaacagttcccattctcctaggtctgttaccaattatcaagctgcacttttcaatcgcatttttagtttgatgatctaacaaataacaaaaggttcttgtctttttatacagacttgtgcactcattgtttaacttttaggtcaagctatttcctgtttccttcttcaaatttctctcttgtatcatagttcttatccttgtcacatcagaccacattccagcatcggcgtagatattagaaagcagaatatgatagccaggatcattgggattttgctcaaatattcttttcccaaccagctcagcaatgtccattctattatgcactctacatgctgccaagagccctccaaggacatcgatttctggctcttctgccatatttgacatgaaacaccaagcctcatcaagcttcccacatctgctgtagagatcaacaatgcatgagtagtgttccttctctggagaaatattgtagtcatgtaacatggaatgatataagtgcaaacccttgtcaatgagaccagcatggctacaacaagatagtagtgccacaaaagtcactttatctggagcaattccatctctcttcattagatcgaaaaatgatagggcttgatcttcatggttatgctttccaaaagaagaaatcagtatgttatatgtaactgtattgcgttctgtcatcagttgaaaaacctctttagctacttctaggaaaccacacttgcaatacatatctagaagtgcattattgactgagcagactgagttaatacaatacttgatcacatatgcatgtagttccttaccctggatgagcatatggtgttgattgcataaaggaagaactgaaacaacagtcacatgatcaggttttaaacccactttctgtaataacctcaatgcgcagaatgcagagtctgaatatccattcacagcatatcctgcaaccattgagttccaaatggctagatctttgtccagcgtaagccaaaatatagtttctgccacccttatcaacccctgtttgctgtacaagtctataagtgcgctcactacaaactcacttctctcaagtccatgtcttatagagaagcaatgaatttcttttccactcctgattaacttcagcacagaaagacaaggaagtatgcttgccagagtactagagttggggtttatccccaaagagatcatttcacagaacaaactgacactcacattatgcattccattttgtgaataccccacaatcaagctactccaggagacaacatctttggaatttgtagaccagaaaagacaatcagccatctctacgcaaccgcatttgcagtacatatctaccaaggcgttggaaacatatatatcaccacttgctccacttttcacagcacatccatgcaatgcagttccaacctgcaattcacctgctctcccacacgctgaaatgacagttgcagcaattagagagtcaaccccaaacccttctgatctcatgtgattgaacaaatccaccacctcaagccagttccctgaatgcacagttcctccaatcatcgcagtccacgcagccaaatccctcacttgcatgctctcaaaaacattccttgcttcatccaagcacccacactttgcaaacatatccacaagcgcgcactgcacaaacacgttgggcctcgcattaccgctggcaatgtcagtctccaccatctcccataccttcctcccctgcgcaacagctccaagcgcagcacacgccttgatgacaggcggatacgtgaaaccatccaccgctaccgagccatcgttcaccatcccccaaaacatctccagcgcctccgagaatctaccagcgtcgacaaggcccttgatcacggcgttccacgcgaaggagttcctcctcggcattccgtcgaacacccgcagcgcgtgcgcgacatccccgagcttcgcgtacgcgcgcaccaactgtgcgacgaggacggtgccgtggccgtggccgccgacgaggaccgccgcgtgaagcctccgtgcctcctggaaatccgggcacgactgcagccggaggaggagcgacgcgtgggagacgacttgagacgcggccgcatgagagccgcggcgagcggtggcggcgggagcgggagcgcatgtggaagtcgtcgccggcgaggcgagaggaggtagccgtggccgcgatttgatcctccccttgacggcggcggcggcggcggcggcggcggcgagcatggtctccgcgagccctccgccgcgcggggtttcatcagttcaacgtaggaaactgcctaaactgacgtggcgcagtggcagttgaaacactctcaagtttgaacaaacgaaatttttcataggcaaggttgaactattgcgctagtttgattttcagacaagcgaatttgaattttattcctgtttgaatcgagaaaagtctcctttcaatttttcatttcatacgtgtcagtcataaaaaaaataaaaaaaattggcaacacagattaatataaaatatatcaaaattcaacttctaccagttgtaaaaaaaaattaacaaatataattgcaaatgtgcgataactattttcagtttaatttgttatttttgttgcatacttgtagaagttgaatttggttttacatgtttgtacagtgatatatttcgtattgatctatactagaaaaatgcctgtgcgttgcaatgggtgaagtttttagtcttattattgttatatggtttagttaaaataaaattcacttaaatatatatatatatatattagaaatcatgagctgcagttaggagttcgatcgtctcaagttagcatgcgagttttttaatcatatttcttatatgattccttctatattaccaaaactgaacgatcttaagaaccgacaaaaatacagatatgtatttctaaaagcaaacgaacttaaaaactgatacacacactaataacgtaccaaaataccggcaaaaacatctttaacttttataatagtagagattgttatttttttaaaaaaatttaataactatttacatggacatgcaaataacgtcctcccgaggggtgacgaatcgcttgtatccacgtcacgcgtggacgcgtgtgacgaccatggggaggccgtgcttggggcggagcgtgatgacgtcggtgggcgcgtggacgtactccggcgagagctccagcctgaaccgcctgagtatcgcggcgacgacggccttcgcctcgaccatggcgaagctctgcccgacgcacgccctcggccccgtggagaaggacagcagcttggccatggcgccgccgccgccgtcgaacctcatcgggtcgaacaccccggcgtcggcgccccacacctcctcgtcgcggtgcatcgtcgcgatcgggaacgtcagcatcgtgcctcccggcaccgtcacgccgcccatctccaccgccgccgccgtccgcctccggatcgccggcaccgggctgtacagccgcagcgtctccagtaagaactgatttagctgccaagggaaaaaaaaaacgaagcatccttccattaatggtcacatcgaaagctcactccaccattaatggtgatagctggagatggattctaattattcaagtccacccgtttgtttcatatcaaataagacatgctttagttttcaaaataaaagcttttcacccatcacatcgaatgtttggatatatgtatagagtattaaatacgaaaaaaaaacaattacacagttcgttaggaaattgcgagacggatcttttaagcctaattatgccgtgatttgacaatgtggtgctacagtaaacatttgctaatgatagattaattaagcttaatagattcgtctcgcagtttactggtggaatctgtaatttattttgttattagactacgttaatacttcaaatgtgtattcgaatatccaatgtgataaccaaacttaaaatttttctccaaccaaataagacctaaatggttatgaaaaaaaataaaaaaatagacaagatagattaatatgtaaatatatcactccacgacatgtaagttcaaatttaacttaacaaattgcattcctaccagcttcagcttgccgagcatgtcgtaggtggggagctggtcgtcgtcgtccccggcgccggcgccggcgcactctctcacggcttcttcccggagcttgtcctgccagtccgggtgcgtgctgagaagaaacatggtccaggagaggaggtgcgaggtggtctcctgcccggcaaagaagaaggtcttgcactcgtcgatgatctcgtccatgctcagcaccggcggctgacgacgcttcgtgcccagctccggtggcgcgctggcctccagcatcagcccgagcaggtcctcgccgtagccaccgccaccgccgccggccttctccttcgcggcggcggcgagtctgttgctgattatctgcatcagcgtactcctcaccttcctgtccagcctccatactttcagattcttcttggttggaaaatacctgcaaacaaattatttcagttcagatgaaatttgacatggtaaagtgtttgtacctacctggagcctgggatttggacgctgagaaggcttgagaaggcgatgaactggagctccttgatcgccatgaaaacctgcttcccctccgcgtagctgctcccgaacgccgtgtgagagatcacgtccgcagtcagctcctcgaactggctgctcagctcgatcaccaccttcccgccatggctcgccaccttctcctcccacctcgacaccatcgaccgtgcgacgccggccattgtcgccgtcatcatcttacaccaaacaatttttcagtttactacaagccatggcgtcctgcgtcagcaagaagaaagcaatatgtgatgtgatgtaat

SEQ ID NO: 23298 - DNA, 31462 bp, Oryza sativa
ttcctgcagccccttcttgtgtcgctgccactcgtcgccgttggccaggacgagccccctgccgaacagcttgagcagcatcggtgtcgtcacgttcttggggaacagccctgtcctgtccgagagcacctgcttcgccacctcgacgtcggccacgcacatgtccggcgtccatccaaaccagtacaagaacactcgccctgcacacaaaaagaatcaataacatcacataggattcagacgaagacgatagctagctgcagctctgattgttatgttaccgtagagagggatccattggcggaactgaggctggacgaaggggatgaagtcgtgggaggcgacgtcgagcgccgcggcgccgccggcgccggcggcgtccgcgcggagcttgttgatgtcgccgaggctcccgacgagcagcctgtacccggggccgcgcacgccctgccgccgcagcgccgcggccacggcgcgcggccgccacacgaggcgcgacagcgcgtcgagcaggcaccacgtcgccagcacggcggcgagcgcccatccgtaacccatttgcgcgcacgcggggcgagtgtgagatagatcgatgctgctgttcccgattagggccggaaatcgagaggaagaagatgcgtacaggaagcgtacgacgacgagctgtatgcctgtatgctaggagtaattgatttttatggaacactgcaacacatcacatctgatccgtggatttttcataaacacgttactacatttcattttctgctttaaccgtgcgtcagcgtcattttccttttctatcgtgtggcttgcgcgctcccacgcggaacgctatcctggagggcccatgggccttgttgggccatgcatttttgtagtttcaactttttagtgatcttctgtgttcggctccacagtttcccaactcctctttctcgtcttccgcgcacacgcttttcaaactgctaaacaatgttttttttaaagtttctataagaaagttgcttaaaaaaatcatattgatccatttttgaaaaaaaaatagctagtacttaactaatcatgtgctaatggaccgctctattttccgtgcacaggagttaggttgccatctcccccaaacgagcaaagctagtgatgtatacggtggaccgacggtgcttaaacttgtgtgtgtgcgccatttaggtcctaaactcttatgtgtaaagtttctatggctgatacttatatgtacaattttttacgtttctataaatataaaatcaatatgctgaatatttttatgacacaaagtttttatatgtgccaaaatgtatatgtatatgaagtttttaaggtataaatgagtgttgttaggctgcgttcgttctcctgagttgggaacacattccctccgctccgcacgaaaaacaaagcgatgcattttcttatgattaattgaatatttattttttttaaaaatagattagtatgattttttaaagcaactttcatatatatatatatatatatatatatatatatatatatatatatatatacacacacacacactagcaaaatatatccctttgcacgttagacacacgacacaaaaacaacggtatgctaatatgctacttctatctagtgcggttcttgatgcaagggatcattacaaagctttgcttgcttgctttgcttttacgggtccgtccctctctcggactccgatcgattgatcaagcgagctaaccaacgccgtctcgggaaagatagttaaccaacacatgtacagaaaaaagaattaagccgtcaccttcccttttaacgttgcttccttgatacagctttaactaacttgccccacccatctcatgccattgccatgcacacgtacgaacgaactacacacatcacccaccccgacctccagctgctaaaaaaatattgggtaattggggattttttttggctcctgctgtctctcgcgatatgatctcccgtggccgcgacgcccaaacgaattcgtgaggctttttaggtgcgtcgtctctgctttcgtttggcggcgacggcaaccgggatcaggtcggctagcttacacacatgtgctcggcgatccaaatcaatcagattagttatggacttgtttgttggtacgtgcgagtgaagacatgcacgcacgcgatggcgagcgcactgatgtgcaggttggacctgaaattaattcaaggggatatgcattagtatttcttttcaatgttattttgtttttcaagttccctggattggtagtgtactattgtccctctgctcaaattaagcatggttatttggacatcgatttcgtgccgaagatttcaaatcatgcacttgaaacgggtaattatgtggcagtacgatgtacggatatgtccatgagaaacttgttggagctgaaccatcactgtagcgtgccagaggctttgttatgggcctggcctgcttacgtgggctggtcgatgtcaatcgtgggccacgaccagagccacagcgatacggcataggaaaaagtacaccgaaggtccctcaacttgttatcgaattacaaaatcgtcccccaaccgtaaaaccagatatatgacatctcttaacttacaaaaccgttcattttacatccttcggtggtttttacccggttttattcgacgtggtgggtgagtcagcgtaggacccatgtgggtcccacatgtcaagacaccacgtcatcaggctatctcttccccctcctctcccttcctctctctctctcactcatctccctaggcaggctggccggcagaaagatttacaaaaaatagaccctgcggctctccatttgggcggcaagctgacgtggcacacggcgtcgtgatgtgccgtgtgcgcattttgagcttagacccttggggctaaatgtaatttttgccttgctaaaaaaaattgactagttctttttacatctgggccccttgctgcccttgcgaattttgcacggaggctccttgccgcccagacagagggcggcaagggggccacgtgcaaaaaatcgcagccccccaaaacgaccgtcctgcaccgtgtgccacgtcagcttttcgctgatataatatttttataaatattaaaaaataaatctaaaaataaaaaaaatcagtgttcaacatctactctgaaacagtgccaaatatttcttgtagtgccaaatatttcctgcatccttcgtacggcccatagttaaatatattttctccgctacaaaatgttggtacctagaatgaaatttagataacgaatatggataaacttttatccaaatttattgtcgagtctgtatataatttctatccagattaattgttctagtatggattaaatctcattttagattacaacattttaagacgatggtaccttcagaatagacaaaatgccaggtaaacctcaataatataaaactcgaaaatgtaaatgaagtctgctctgccttgtgaggctaggctgtccagggaagcaggaaccaagtcaagcatggactgtaacatatccatcgtggcatccaaaaagcatgaatgaacaggacaatctgcagagtgcagttatcaaagatacagggtatctcaactccccaatgttgagatgcattgcaactctgcaagttcagtaaaatttaaaagaagcttagcatgaagatttattatcacatattggcagaaaaggtgtcaactgtaaggcctttgttgtatttctgcataatctgacctttaaggctgtcataaatagaacagtatctcagtgccttataattaatggagagctcataagataatcacacctcacaatccatgcacgtaaactcggttcatacaagtgaaactctcatccatcagaaatgtctaaaactattatcccatttacaagtgggtcctattattattattattattattattattattattattattattattattattattattattattattattattggtggttgttctttcgtgtaaacaccatatagtataaagactaggttaatgtaccacatgagtaaataccaaccttaatactgttccgtgagtcgttatacacaatttttttacgactagtagcatgcccgtgctaacgctacggtaacatgtcgtaaaacatattaaatagtcaaaataagatgtggtaacaactaactatagaatgagataggttggcataggaaatatcatttttgttaaagtaaggacttgtggtagcaaaccaatttcacccaaaaggaagctcagtcagttctggtacaacttttttacagactttcttacaccttttataaaaaagaactgattcattcagcaccaaacacagcccttggatctgccattagggaatatccacatatatatataactaacctgaagaattatcttcagccgtggttagtgctggttcgtgccactatgtgtaggtagaaaatagtactaactggtagcgccaattaaatttaggaagaattaactggatacaattacaagaatgttgattccattatggagcagcatatgctctcaggcggcataaatagtgcacccgcaccctaccgtcgaggaaaaaaacataattttgcaatcaatcggattagaattaaattagggttcaactcaataaatatgttccacggtgcttgcaccaactaagtgatgctgacctgtagttagaaatataacaaaacataataacccatgataaaactgaaagcatcttgttattaaaatcgatagttgagttagttctctgacagtttttgtagagtaaatacatctgaaaataaagctccagatttaccagggtgattcacacgatctagcagctttgctccaacacaaattgaacccatatgcaaatgtctgaaataaagtacagttagctattttatctcatcgaaggaaataaagtgcgaatgctttttcatcctaatcctttgtaaatataactccatcaaaatgcagtgtatgcagagaaatcctatcattttgaaccatttgaaatcctatcattttcaaccattttctttaacatcaaagtcgattttcagcatcaccctatcatcaaagtccattttccacatcgtcctctcatcaaagtccattttcttaacgtcgagcttcattttcagtctccctcccctgtgccttcctctcatcttatgcagagtatgctcaacttcatagatttacagtaaaagatccaaatcaaatttggcaataaaatctttattaacttgtttgaggatctaggaacagaggatacattgccttaacctgcatactcagctgctccttgatcaacaaattgcagcaccaaggctgcagagtcccctaacctgcgagatgctcaatttttcagcctgctacgcagaagcaaaaaaacaatctgcagtccgcttatccacttggcaatctgccatacttcccagtacttctacagctaaaaatgttgccacaatcaagcaaatgctataaagggaggtcaaatttgcaagtaagatatattgattgtattgtttcagtctacccgcttctctaaataaccactatttgatgtaaacttaggatagaacttggttttaaatccagcgactattctgcatcagattaaccgtactatatatactgaaggtctgaaacatgcaaaatcatgcctaaatttgaccaatttgtcaacggatatgctagacggaggaattcaggaatcataacaccatttaataatgggatacatgtggacacaaatatgcaggccaaaattaaggcagcaagaagagaacattcttatcttttcaaaatactgtaagagtgtgattcatttcttgcaataaagatactacattacgctattctgcatcttaaaaaatggcattgaaatgggaccgttttccatatattccaacagattgcagtaaaaaaaatgaaacccatgccacaaataactcagggatatcacattggtgcaatcaaagaatcaatgaaacacttttagcatgtttaaactccacagcacaagcctgatacacaaaaacacaaatttgtttggtcagcgagctagatattagttagtaacctgattgcgacagcatggatcacatcggtcccctgcaccactgcagccacccctaatgatttcttattcttacaaagatggcaaaacaggagctgaagaaagcaaattaaagagaaaaataagagatcgggtagcttacttggtgcagcgtaggcttgatgtcttgcctggatgccgacgacgccgccagatcggagcttcggagctggtgctgatgcagtgagctagtacatgtgggattttgtccgtgggtatctaaaccatacatcaggggcaaatgacggcacctggcgagaggacggccagcttcaagacggcggcggatgtggttttggcaccgcgcgaggctgttccagggatcaggcacgctgggcggagatggccgtcgacgacggtgctcggattttcgttgaggctgttccccgaagactccaggcgacggcgatctggcggcacggaggcgggcatacaaagatcggtggcgtcgcgaacgagagtaagggtagagcggcgggcatcggtgtcacggcggcggagaggcgaggagccggcggcgacgagttgtgagcgacggcggcgaatcgtgggcagcgctcgcagaggagaccggcgtggtggagaggcgaggggcggcggcgcggtgtggggacggcgacggattgggggttggcgtgacgcggggagagagagggagcggcgatggcggtgcggtagattggagagggcggcggtgatcgcgggtctggtgatgaggcgacgcggcggcggggcaaggaggcgacgcagggaggagggcgaaggacgcggcgtggggagggagaggagatcgatccgagagaaggggagaggagcgatgcgcggtggggaggagatcgaggccgttggatatggcaatcggatggttgagattacgtgtgtctgtcaaatgcgtctgctgtgttaggaatcaagaccaccactaccgattttttaagtagtagatatatatatatatattaaaaaaaacaccgtttagcagtttgggaagcgtgtgcatggaaaataaggtggagggagttaggaaacaggcacacagctggaatgaacgcagccttaatgcatatatgaatgggctgcaggtacgctcatgggccaaaattgaaagggccaattagagtgggtacaatagcatagtataagctagctataaacacatcgagatgataaattatgagagagaagggcagtggtctacatatttgtagccagctgcagcacagattataagacacaatatatttatttcaggtcagaccatatattactaatgtattgtatgtttataggtaactatttaatgaattggctattaaatcgactataaatgatttgaagctaatagttggctatgctattaaacttgctcttaagacgtctgctgcaccaagaatacaaacgacgagtaaaaaactcccatatattacaattagaacgtttgtacgcacgcggaaacaagtaaaaatctggcgagcctggccggcgttggatgatgaccaaatcaacttgctacgtgggataagaccatcgtccagaccgcttagtggtaaaacgaagtaggagtaggttctattactctctccattccactgaataagacgcggttaaaattggtacggtatctaaaactattctttaactataaaactttccgtatattacaatgtttttagtaacaagattataataataggaaagaaaattcaaatatcaatccaatattttttttcataaaataaagtttaatttataataaaataaatagctaaattttaaaacacgtgcatatactttatttagtggagtaggatgaagggagtagttgacaagcatctgtacctggtttatggtcgggagaacaaaatcgggatcatggtttttgtatgaggggttctatatggacttttatgtttttctctactcctcagctaggcccatctgtggtccatcaggcctcggctgagagaggagacggcctggcacggccaaccccacgccggccgccgccgccgcgacgatgtaccttgcaaatctccgtttccatcgtgtcggaggggttcggagtttgaaacaacgagcctctctatcttttttaatttttgttttattttttacttttgctggttgaattgtcgtattagagcatatacaatagctgactataaaccagctataaacatattttaaagagataaaagatgagagagaaaagcaacgggccacagatctggagccacctgcaccacggactctaagacgtaatatgtgtgacaagtgaaaccatatattaatagtatagtaagtaactattatatgaattgactattaaattcgctatatatgaattatagctaataattggtcatactattaaacttcttttatcagagggagaaagaagagagattactttacgctggttggcaaagagatggtgcaggacaaagtcaactgacgtactaaaaccctgaacgctggttcagtgaacgagccgcgttcatcatggttaattaaattgacgcgtctaagtagttactctctttatcccataatatagcagtctaatattaaataagaacattaaaaaaacataggataatatatatcatagtattataaatctgtaaaaaatattctagtactacgttcgggagagtctctctatccaaattcgttatacgaggaaccatttagtagggagtagaacaatagctactatatttatttcaaaacattttgggatggaggaaaaatagcagggcccatcatttatattattcggggaataagccaaagcatatttataaacgaaaaataatttgtatacgtgttcttagcgatttaaaagtaaaggctaaaaataaattttgataaaaaatcctcttaaaatcaactttaaatttaaagttgaaaaatttaaatttggactgataagtataagcataaacgaaaagacgaggctgtgagcttcctcttcacgcggcactcaatcgtggccgttgggagtgcacactgattatacaaactcaacgtatatgatagttcttcgagctacttagatggatgacatagtatgctagaacttcttttgtttactccctttctcttctccttgtagtaatttgttatcttctgcaagtggttcccctagtcaactggacatcatttgcatttgttttgttgttttgactcggcccggatccacgtacgtattcatattgctctagtcaatatcttggctgatgagctaggaaacaccaaaagttctgatatccaaccaacggtcaaagcagagaaatctgcacctgaatttcgtacaaagggaatatatatcatacaagtatgataaaagaataacaaaaccgatctgaagtgtgtaacatttggaatgccaaacaagtaaacaaccgccatatccgaatcaacacgcttataacgtcacatacaaaggcagcgtaaatacatacatttcttccacatattcaggctcttttttggggagaaaaggcattacacatttctacatcttcagacattttgtggattaggctttcgttttgttttatcacttgcatccaaatcttttataaactattatatgtttcagacccagctatcattaattattacaagtaatgtctactgtctgacctagagcactaattcagatgatgaacacgtgattttgcatacaaacgatgcatatttgcataatatatacacatctccttacacatctgattaactaatcttcaggctacttgatgaataagatagtgacatcttatatggttcttacgtttaatttaaagacttgctccgtttctctgcatatatatatctgttttcttgtcttgactgaagcatatgaccttgtcaacgataatttcgtcttttgtttttgtatctccgatccatactgctcaggccaagagtaatatactagtagtaccttggttgatgagatagaagtacccaaaacttcttaaatccaatcaacaagcaaactagatatatttacaccccaatttcgtacaaaatggaatcaatgcattacacacagtaacatcatcagtaggagcaaatgctcatgaacaaaaactaatctcgtgtacaacaaagaagtactaaaataaccccctcctaatgaacaacttctacaccttgagactcttgaggatcataggcagcccatactttggccgaagcgtgatcacgtcggttggcacgtggacgtacttgggtgatagagtaaaggagaacctctgtaggatcattgcaattacggccttggcctcgatcatggcgaagttctgcccaatgcatgccctcggcccactggagaaggagagcaacgcgttgggatattttcccgcctttgacaccccattcttgaacctctccggcttgaatatgtcggcgtcctcgccccacacctccttatcgcggtggattgttgcaatcggaatcgataggacagtgccctcagggaccgtgatgccgccgagttctagctcggcgttgaccctcctctgtatgaatgcaacagggccatacaacctcagggtctcgaggaggaacatgttgactagcttcagcttgttgagcatgtcaccggtgggcaccttgccgtcacactccgttgccacctcctccctgagcttctcctgccactccggatgtgtgctcaataggaacatggtccatgtgagaaggtgtgaggtggtgtcgtgccctgcaaagaagaatgtcttgcactcggcgatgatctcgtccatactaagttgtggctggctctccccgtgctccggtgcacatgcctccagcattaatccgagcaggtcgttcccgtatcctgcgacatctttgttgttgagccggctcttgatgatgtccgtgagcatgcttctcaccttcttgtccactgaccatgtctttaggttcttcttggtcgggaggtagctggaccccgggatttggatgctaaggaaggtggagaaggcaagaaattgaagctctctttgtgccaagaacacttgcttcccctccttatagctgctcccgaatgctgtgtgcgagatcacatcagcggtaagctcctcgaatcgtcggctcagctcgatctccactatatcgccctttgtccccaactcggattcccactcggaaatcatagattgggcacaatcggacatagtcacagtcatcatcttgagcttgtccatgttaaatgccgggtggactactttgcggtggcgcttccactcatcgccgtcggtgagcacaagccccttgccgagtagtcgtgcgaagtatgggttcgacacgttcttagggtacatccccgtccggtccgataacacctgcctcaccatgctcacgtctgccaagcaaatggtaggccgcgctccgaaccaatacatgaatgtcttccctgcagcacgtaaataaatacgaaaaatacacatatatcataaactagcactaggatatatatatatatatatatgatacttacaacatctgattttgtaagaatcaaaagaaaactccttatcggtgaagtcacggagagcgtaccatagagggggatccatttgcggaagtgcggctgcacgatggggacgaagtcatgggaggagacgtcgagcacgacgccggcgccctcgtcgcggagacgcctgatctcgccgaggttgccggagaagaaccggtatcccggcccgccgacgccctgcgcccgcagccgcctggtgatggcgcggggcctccacaccagcttcaccaccgcgtcgaacgcccacgacgccaccaccgccgccaccgccgccgccaccatccaccccagattacccatggctactagacgtacgccgcgagatcacctgaaccagtcgccggagtacgtacgcctatactgtagctctgcttctgcttcgatcggctggttggtgagaccttgagagagatcgaagagctaccggagctatggcttagttcgtcgttgctgtttgtgtggtgagatatcgatcgatggacttggtggctgccggaggctgtgattttatacgttcgacgccgcgcggccatgggccatggccggtttgacctccgggtggctatagcttggtgtgaacgcgcggcgacgatgacgcgtacatgccatgtcggaaagagaccgtgacatcagccgtgatgccagcagttttggcttcgctggcgatcacgtgccgtttccgggctcgctctcccgtgcggacgacagtattttttacaggacaccgacgtacacgtatacgattaatacgtacacgtacagcagtagttgtatcgatttatttatctgtttattattactccgtcggtttcgtattatatgtcgttttgaaatttttttcataatcaattttctttatattgatcatgtttctaggaaaaaaaggtaatattttgaacacgaaacaaacatattatcaaaatatattcaattttatgtttaataaattaatttggtgttacaaatgttgttaaatttgtccatacacttggttaaatttaaagaagtttgactaggaaaaatataaaatgacttagagtacatttgaccatttgttttatttgaaaaattagtataaatataaaaaagaataagttatatttaaagtacaatatatatatacgtgtcgttggccatgtacaaaatactgtactgtaatacgtacgtgtggaagaagagcacgttttagcaaagcctgagaagaaaacaggagataatgagagattgatgattaattggccataggagtagagaacaatcagtgctaacctactgacctcaacacggtgtctgagttgtcaatttggcatttgcagagcaaactttggcgcgttagtcaccaaatccctaatgattaatgaacatactggtccaaggattgggaggttcccattgacttgtcctggatttcatttcttgtcaatcaaggtcggagagatattcagataacgtttctagaaggacaaataaatgagaaaaacaatgggcagcacgtaagatgatttatatactccatactataaactgcatcactgcagctagcgtcccactcaagagacaatagcattactaacccgtagtaagaaacagtggcgaactcagaaatgggccccatcgtttagcttattggcgaaataagcgaaacggcatattcacaaacgaaaaataatttgtgaataaaacttttatatacgtgtttttagcgatctaaaagtaaaggctgaaaaataaacttcgatgaaaaaataccacaatcaattctaaatttaaggttaaaaaattaaaattttagctgataagtataagcataaacgaaggttgccttattagagttttggtccaataaaatcttacatgctgaaatttcgaagtgctccgcgagtcttttgtcttgggcctcgggcatgcatggcccgtgtaatttagggtgtaagtcctccctgaactcataaataaagtatattttataacaaaagtaattttttcttatcaataagcagatcggaaataaaatcattgttttaaaatctttttggacggaggaggttgttagctaggcctgtttggctggcccaggctgcggctgcaccacagtcaaccggaatagtgccgctagagtacagggatgaaactggttcggatagtttccgtccgtccggaccattttttggattcggatagtttcggtcggaattatccagaaattcagaatcgaaaacgaatacagttagggtactatccgtcggaatcgaaaaacagtcggaaactatccagaatttttttttcagatatccgcagacattgagcaaattatataaaaaacacgtatatatacataactttttcatatagaatcagatgaagacaaactttatatcaacattgtagagctcgatgagatctacaactttattattgactattttattatttgaggtcatttataggtctaaatattcattataatataccatattaatttttataaaatctcagatctacaattcaacgacatctgatggagatgtgttccatatcaaagttgtagagctcaatgggatctaccactttgtagtttataacatttgtatttgaaaggatttaaagtataatacaaacataacaagtttcgaagatgtgaagtaaaataaataaaatcttcaatttatacaatggtaagtaagttatacatatagtaggtcttgggaatagaaaatgataatcatatttgcatatggatctcttagagaaacagccgtaaaaatcgattttcacatacggttgtgagaccgtctgtaaaattgacgatataaatattggagatgttgaactaaaataataagtgatatatcttccttgatcaagaaactcaatttgaggggttttttatataccggtaaatactcgctaccgtattcgttccgtctcgtattcgctccgtatctgtattcgataatattcgatttcatttccgtattcgagttttcgattctgattccgattccgaaaaaaatatgaaaacgaatatgataaagctagtttccgtccgtttccgatccgttttcatctctactagagcatacatcaccattaaagttgtgtctgttttgatgattgcaattaggccgtatttagttcaaccccaactttcaactttccatcacatcacatcacatccaaaatttttctacacacatgaacttctaacttttttttctaaattttcaactttttctaaacttgtaactttttttttaggaactaaacacagccatagtgacactactgctgaacactgatgacacggtgttcaggcaaacgttctttttacgcagtatatgtgcctttgattgaggcaattactgtaccgtgatcatcgtctttgccttgtgtcctggcatcgattttactacattagtttcagatactgtcattcggtttacaggtttagatatacgacgaaaacgcttttcggcaaaagacctcaaaagtcaaaacacgaacatgatggtgggaaacgttgcccactgtcacggaaaacggtacagttcattagcgcgtgattaattaagtattaaaaaacttgaaaaatggatcgatacgatttttataaaagcaactttcccataaatttttttttaaaaaatatcacaccgtttagccgtttgaaaactgtgcgcgagaaaaactagggatgagagttgggaactctcagcgctgaactcaaacttaatgaccaagtgaacactcgggagaatatataggtagcccgctagcagtaaattcatggaaaatagcaacttatgtagcgccaaattattaatattttaaactgaacttcttatttatcacaagtgaatgaacatgttgaacatagaaacccataactatatttaaaatgagacggatgtagtaaatgcgacggtttggtttgaagccaatatgttgataaaaaaatgtttaatttggtatagttctaaaactttcttcactataataaaaaatttgaattccaaataacatcgagccaaacacactttttctttattaacctgctaaaatattggtagtcagaacttatgaaaatactgatactatcaaaaaatattttgatagggtactaagtcacaaaagccctacatcttctgagattggccattgcgacttgcaagtcaagactgaagtaaccgattatacaactgagcatatgaagtatttgtttcttcgagctatttaaggaataacatattaaacttttttttaaacatggtctccctttctctcctagtagctagtcattataaacttctctgtttaaacatggaccttataaacttttctatttacgccgagtttagatccaaactatttcttcaaacttctaactttttcatcacatcaaaactttcctacacacacaaacttctaacttttccgttacatcgtacaattttaaccaaatttctaattttagcgtgaactaaacacacccttaaacattgcctccctttccttgtaacctgactttaatatcttacgcatgtgattcgttcagtcaactggaggaacgcgagattttagacaagcactaaatatttaaatagtatgaccattcgtgttatttacaaaattacataattgttatttatattttacctattttataactaaaggttttttttaatgagatgaattgtcaaatgatatttacaaattgatagcgtcatatgcattaagaaagtgagtaatcatctactccctctatttccctctatttcatattataagtcactttgatttttttcctaataatattttgtaagtttgattaagtttataaacaaatatagcaacattttcaacacataaaaaaacacattatcaaatatattcaatgtgatatttaataaaactaaattgatgttctagatattggtaaactattttcgctacaaacctaaagaagtttgactagggaaaaagtcaaatagactttttggtggggttgagaactcacctcctacgcacgtaaaacggacagactcattagcgcatgattgattaagtatttgatatttcttttgaaaaataaattaatatgattttttaaaaacatctttcgtatataaactttttgtaaaatacacactgtttaatagtttaaaaagcgtgtgcgcagaaaacgagggtggggagtagagaactctctcaaaagaacgcatcgttatcctatacatgaaccagagggagtaactagctctttaatgaataatatattgtaattttaagtggttagttgttacatttgtttcaagacttgctccgtttatctacatgtatattctattttcagtgttgactgacaagcatataacattgtcgacaaccatttggcctgattggaaccacagagtatcatatttatcgactcaagaaacttattggttgatatgctagaaatacgaaaacttcttatctccaatcaacaagcaaactagaaaaatttacatcccaattctgtagaaccgaaatatatcagtacattacacgataacattattagggagcaaattcttgtgaacaagactactcgtgtacaacaaagcagtgctaaaaaagaagtgtaagtaagatattccttggatcttacctatctctctttaccttgaggctcctaaggatcattggaagaccatacttaggccttagcgtgatcacactgattggcgtgtggacgtacttaggggacaacgtgaaggagaacctttgcaggatcatggcgatgatggtcctggcctcgatcatggcaaagttttgcccgatgcacgaccttagcccgatagagaaggagagtagtgcgctggggtgcttcgctgcattcaacactccattctcggacctctctggcttgaactcatcggcgtcctccccccacacttccttgtcacggtggattgttgcgatcgggatcgttaggatggtgcccttaggaaccttgatgctaccaagcttgacgtcggtaccagctctcctcgttacgagtgagacagggccatacaaccttagggtctcgagaaggaacatgttgaccaatttcaacttgttgagcatgtctccggtgggcacctcgtcattgcacaccatcctaacctcctttctgagtttctccatccaatgttggtgtgtgctaagcaagaacatggtccaagtgagcaattgcgaggtggtgtcatgcccagcgaagaagaaggtcttgcactcagcgatgatatcgtccatgctgagttgtggctggctcccgccatgctctggcacgcatgcctctaacatcaatccaagcaggtcattcccatatcccatggtttctttgttagtgagtcgactcttgataatgttcatgagcatgctcctcaccttcttgtctagtgaccatgtcttcagattctttttggtcaggaggtagctgaaccctgggatttggatggtgagaaacacggagaaggcaagaaattggagcttcctctgtgctaggaagacctgcttcccctccctgtagctgctcccaaatgccgtacgcgaaatcacatcagcagtgagctcctcaaaccaccggctcagttcaatctccgtgcttccgcccttcatccccaactccgattcccactcaaacatcattgattgggcgtagtcggatatggtctccgtcatcatcttgagcttgtccatgtcgaaggctgggtgaaccaccttgtagtggcgtttccactcatcgtcgtcggtgagcacgagccccttaccaagcaggcgtgcgaactgcatgttatctatgtacttggggaacatccctgtacggtccgacaacacctgcctcaccatgttcatatctgccaagcatatgtttggccgtgtcccgaaccaatacaagaacgtcttccctacatcacataaacacgcaaacatatacagggatatgtttatatgctgtagatgatttcaaatatcagaaaaaaagctcagaaacatggcgtaccgtagaggggaatccatttgcggatgtgtggctgcacgatggggacgaagtcatgggaggagacgtcgagcacaaggttggcgccctcggcgcggagacgcctgatctcgctgaggttgccggagaagaacctgtatcccggcccggcgacgccctgcgcccccagccgcctggtgatggcgcggggctaccacaccagcttcaccaccaccgcgatgaacgcccacgacgccgccaccgccgccgcggccgtcgccaccgtccactcgaaacccatggccagcagatcgaacaagttctgaatttcttcgcctgaatcaatcaaccgttcgtgttctgcttgcttggtacagctggttgctgtcttgctgagagagtgatagatcgaacaagcaaagctaagcttgagacttctttgggagtcgctagctggtgtttgtgtggttgagacactggtcgtcagtcgtaaccggaggctgtgatttaattatacgaaagaattgcatgtcaatatcgtaatcggcgactaagcggccatatctttttcgcgagcgcgcaaaaaatttacatgtcaatatattaaaaaagaaaagaacctttttttacatatcacaattgaccagacatgcctaggctagggggaagaaaaaaggtaaaaaaaaaactaaagctgcagctagggaaagaaggggaaaaactactgcgaagaaaagctactctaatcaacaaggaggtggagacggagaaacactaaaaaaaaaaaaccctgagatcccatccatatcaaaacactgcttccttcgttacaaaatataacaatttttaaccttaaaatctattaaaaatataacaacttattcatcaatgttctcttcgcaaccaatcataacttttcaccattcaattttcccacccaacttcacttctcatccaattacaatattccccaatttaatttacctattttttaatatcagcctaagcttatctctaaaaatccttatattctggaacgaagatagtagtcatatttacaacagtatctgggaaacttgttttaatttgatttggaaactgtttttcaatttttctacctattttatttggttggtcagttttttaggtgcacctgtttctctttttgcggagcatttattttatacgtgagggtaggatagacaggaagtgaaggagggcgagtaaatcaaagagatagccatttctcggttgggggcaagataaaaagaattcaataggtcagttgaaggggcaggcagtagtctacaaaatacagttccttttaaatagcaggattgagaaaatagaagaaaaaaaaaataaaacatgatgaatagaagtgtaaaacagagaattacaaaatatataaaaaaagagagtaattttcatataactacatgtactttaatcaaattatcataaaactacatatttaacactaaatttgtcacaaaacaacacatttaaagcgaaatatcacgaaagtacagatttaataacaaaattatcacaaaactacatgtttaatgataatttaatcacaaaacttgaacaattaaatgactggatcgaccggatagcgtttctaggggaactactagtgaacagcaattatattatttgaattttgacgttgacaagtgtacgattcgtagtacaattgtacaagtgttttcttctgttctccttttctttttcgttagttaacctccgttatgtcttttattttcttttcctcctcctacgcaatgtactgccaatacaaacgctttgggttcaggcaattgaaccatgatctttgcctttgcatgccctggcatttttacattgtaattcagttctcggatctaaaattgacatcaagttcttgtttgatccaccgctattatcacaatatccgtccggtcagagctatcaacgatgaatcgataatttactatccatttttagctttttgaatggaagaaaagtaatgaaacctacaatggctattgaataacctcctttccatttttttatacgaaaccgtttggccattttttcttcgtctgccaaattttctttagttctacccaaactcagttttgtctcaatctttattgaagaagaaacggttttccagccgctaaatccaggtatcccacaaaatcattaaacctggctgttatttcggtaaaatacgctaaatcacaaattaatgaccaagtgaagactcgtgagaatatgaagcgtgctagtggcaaattcatggaaagtagtagcaacttatgtagtgccaactatttgaatgatttttttaagaaaaaaaaggacacagggatggggatggggtagtaatatacggaatgcagcccaagtcaacatcaggaagcaattcccagtctacaagccaacatcacaaatttacatccagttttgtagaaatgaaataaaaccgatctcgtgaacaacaaagcagtgcataaaaaaaggaagcataagtcagacattccttagttcttacatatctctcttacatcttgtaagatcaacgtgtgttttgattcttattctgtgatgaacaattggcatctgtgattattggttttgatatttggagattacagttgaagttgttttggagataattgattttcaagtgatgaacagggtttgctgttttgttgggaccggtcagaccggacggtagttgccggtcagaccggcttgtgttgagcggtcagaccggccggcccgcggtctgaccggccgacgctgtgtcggttttggtttcgggttgtttctttggatatccgtgattgtttcatggttatggcttctagatggatactatacgtatgtaatactgttgtttgctaacaatgagtcaagttggtgatagcttggtctcggaatatggtttctttgtttgtttcatgtgtaggtgattcgatgcctcgggagagtatttgcggtgatggaccgggagtcggcttggtggtaagacgatgtccgtggtggtcagatatcatgcgggatacttatgctagagttgatgcacgtggttggtgaagattccatatggcatatgatggaggtattgtgtgcgtgtgagatgcggagtcgaatttggaaggagtccaaatttggtatgattggttatgtaaagtttgtttcttatactatagggtttcctaaggtgtttaggacttctagtatgagtttggttcgtggctttaggctgcctacctcatgtataaatagagggggagagtgaagcttcccggtatcgcttttgagagcaattgagttgctagtttagttagggtttcaagtttagtcgagatttttgtaaggagtgctgttgatgcactttgtaaacatagatagaagcaataaagttgtcatctactttaagagttcttcgatttgtgtttaatcgggttcggcggtctaaccggtgatataccggcggtcagaccggcggcaggcggcggtcagaccgacggaggagaggcggtcagactgacggaggagagacggtcagaccggcagcgacttcaggcgtggcagacgatcttcaggcggttgtaccgagtgatcaacaccggttagaccggcggcacgagcgcggtcagaccggcggatcaacctcggttagaccgatctacatcgaatttgagggtaacttttatttccactaaaagtttaggtttttgggtataccaaccattcacccccctctggttggcttagttcttgtgattccatcctacacatcttgaggctcctgaggatctttgggagaccatacttgggccacagtgtgatcaaactggttggtgcgtggacatacttgggggatagtgtaaagaagaacctttgcaagatcatggtgatgacagccttcgcctccaacatggcgaagttctgcccgatgcacgacctcggcccgctagagaaggagagcaacgcattagggttcttcgcttctttggacactccattcggcaaaagacctcaaaacacgaattaatgagcaagtgaaaactcaggagaatatataggtagcgtgttcacggaaaatagaaacttatgtagcgccaaactaatatttgaaactgaacaactttcttttttatctgaagtgtacgctatctgaagtgtacgcgtttggaggacacaaagatggaggcctcatcttttcgtttatgcttattcttatctggacacaaagatggaggcctcatcttttcgcttatgcttatgcttatctgccaaaatttaaattttcaaccttaaatttagagcagattttgtggttttttatcgaagtttattttttagcctcttagatcgctaagaacacgtatatagaagttttatttacaaattattttttgtttgtaaatatgtcgtacttattccataaattacttttcggggcttaggagtagtaattgttgtaaaacaaatctcgccgccggcggcttgtacgaatggctcgactgggccgtttttgagaggatgtgccgatccgaatgggatggcatgggcttcttctggtgctctttcgctgactcccgcatgtattgggcctcctttaagcccactgtcaaacgaccgtgttgagccaatcgctaaaaaaggtacaccaggtcatttcggattgatgctaaaacatgtctaccaaaatatattttgatagtttgaatagtaaatgagatagtttggtttgaatccaataagttggtaataaaaatgtttaatttggcatagttattaaacttccttcactactatacaaaatttgacttctaaataacatcaatccaaacacaccttttctttataacgtgttaaaacttatcaagattttaacactattattattttaatagggcactaaaccaaataagctctacctcttttgagatgtggctgttgcgagttgcaagtcaacactgaagtcaccggttatacaaactgagcatatgaagtatttgtttctttgagctatttaatgaataacatattaaacatttttttaaaaaaaaacattgtctccctttctctcctagtagctggaccttataaactttttatttaaatagtctccctttctctcctagtagctggatcttataaactcttctattgaaacagtgtctccctttctctcctagtaggtgaaccttataaacttttctatttactccctccatctatttttgatagtcatatttacaaatctaaaaaatttatttttgataggcatatttcaatccaacaatctatcctcttaatgactttcttggatttaatgcgtgactctctattcttacacacaagattggctacctgggcatcgagaaatgtaaatattaatgaatcgcttgtttacgaggaataactagtagcatgtttaaatgataagtagaattacttatccttgatctgtgtgccaagatgaaatatgactatatggagggagtattatttaaacattgtttcccttcgtctcattgtaacctggccttaattgtcttctgcatgtgactttcccgatcaactagaggaacacctgattttagataagagctacatatttgaatagtaccattcgtgttatttacaaaattacataattattatttattttgttgcgacctattttataactaaaggttaattttttaatgagatgaattgtggaacaatgtttaaaagttgatggcgtcatatgtatcaagaaagtgaataatcttctactccctccattttatattataaatcactttgatttttttagtaaaacttttttaagtttgatcaagtttatgaaaatataactatattttcaacacaaaacaaacatattatcaaaatatattcaatgcgtcagtgttatgtacaaggcatacccaatagttttgggttgagctcggcgaagcctaccatatactaagttttatacaaaatcatgcatcatatatggaaggtattccggataaggaaggagaaacagagctctacatggaaactacaatgactagtcggatcatatccatattagtcttcctatttctacttagataatgggacatctataggtataaatacaagactccctagggggggactaagacaagcctagctagaatagacacgctcagtcagaatagacaccaatagacgccaccaaacatcgacgttggagataaacctagacagacccaatctagtgcctcagagtccgacaagaggtatctagcgctatctctgatctcgccgtgttcgtattcgaggaggaagactacctcgtcattgactacatgtggtgttccataccgccaagtcgttgacgactagattggttatcccaaatattgtgcttgtgtgattctgataaataagagcaacaccggcttcggccaataggactagggctattaccttagagataaggggcccaaacctatataaaaatcattgtttccgtctcttttaactcaatctcgcgtataccctggtaccaacgatcctcatactctgcaaataccgtagtcgtgatctactccgtcgacacaataatatatttaacgaaactaatttgatgttgtagatatcgttaaactatgctataaacttagctaaacctaaaaaaagtttgactagaggaaaagtcaaatcgacttatagtatacacaaacgggagggagttgctctttagttaataatatattgattttttaggtggttaatttttacatttctttcaagacttgctccttttttctacatgtatattctattttccgtcttgattgacaagtaaatgacattgtcgacaaccatttggcctgattggactcacaaagtatcatattgctcgactgaagagactaattggttgatatgctagaaatacagaaacttcttatatccaatcaacaagcaaactagagaaatttacatcccaattttgtataactgaaatatatatatcaatacattacacgataacattatcaggaagcaactcgtgtacaacaaagcggtgctaaaaaagcagtgtaagtaaaacattccttggatcttacagatctctttttaccttgaggctcctaaggatcattggaagaccgtacttaggccttagcgtgatcacactaattggcgtgtggacgtacttaggggacaacgtgaaggagaacctctgcaggatcatggtgatgacggctttggcctcaatcatggcgaaattctgcccgatgcatgacctcggcccgttagagaaggagagtagtgcgttggggtgcttcgctgccttggacactccattctcgaacctcgccggcttgaactcgtcggcgtcctcaccccacacttccttgtcacgatggattgttgcgattgggatccttaggatggtgccctcaggcaccttgatgccaccgaatttggcattggtgccagtcctcctcgatatgagtgagacagggctgtacaaccttagagtctcgagaaggaacatgttgagtaagttcatcttgttgagcatgtcaccagtgggcacttcgtcaccgcacatagttgtcacctccttcctgatcttcctcatccactccggatgtgtgctcagcaagaacatggtccaagtgagcaggtgcgaggtagtgtcatgcccgccgaagaagaaggtcttgcactcggcaatgatctcgtccatgctcaactgctggctttcgtcatgctctggcgcgcacgtctccaacatcaatccaagcaagtcgttcccatatcccatggtgtccttgttagcgagccggatcttgatgatgttcctgagcatgctcctcaccttcttgtctagtgaccatatctttaggttttttttagttggaaggtagcggaaccctgggatttggatggtgagaaacatggagaaggcaagaaactggagtttcctttgtgccaggaagacctgcttcccctcactatagctgctcccaaacgccgtgcgcgagatcacgtcagcagtgagctcttgaaaccgctgactcagttcaatctccgcgcttccacctttcatccccaactcagactcccactcagacatcattgacccggtgcagtcagatatggtcaccgtcatcatcttgagcttgtccatgtcgaaggctgggtggaccaccttgtagtggcgtttccactcgtcgccatcgatgagcacaagccctttgccaagtaggtgtgcgaagtatgggttagttaagtccttagggtacatccccgtacggtccgacaacacctgcctcacaatgtttatatccgccaagcatatgttcggttgtgccccgaaccagaacaagaacgtcttccctacaacacataataagcacacaattatatatatatatatataagctaacaaattaaaataattggtactcatggcattttaaaatatcgaaaaactaaacctcagaaaacatggcataccgtagagggaaacccatttgcggaagtgcggctgcacgatggggacgaagtcatgggaggagacgtcgagcacgacgccggcgccctcggcgcggagacgcctgatctcgccgaggttgccggagaagaacctgtatcccggcccgccgacggcctgcgcccgcagccgcctgctgatggcgcggggcctccacaccagcttcaccaccaccgcgatgaacgcccacgacgccaccgccgccgccgccgccgccaccatccacacgaaattacccatcgccactggatcgaacaagttggctcttcgcctgaatcaatcaacagtacgtgttctgctttcttggttcagctggttgctgtcttgctgagacaatgatagatcgagcaagctaagcttgagactttttgggggtcgctagctggtgtttgtgtggttgatacactggtcgttagtcgtaacccgaggctgtgtcttaaatactgctccctatgtcttaaaatatactctctctgttttgttttaaaatatttgacaccgttgactttttaacacatgtttaaccgttcgtcttattaaaaaaatttgtaaaatatataaaactatatgtgtacatgaaagtatatttaacaataaatcaaataatatgcaaagaataaataattacttaatttttttaaataagacgaaatcaaccaattacaatccttcatcatttaatttttctacccaccttcacttcttatcaaatcacaatattccactatttaatttatctactttttaataaccgtgttcaacctttaaaaacccttatatgataggatggaggtattagtcacatttacaacgggatctaggaaaattttttaaaatttatttggaaaatgttttttttaattttctccctattttatttggttggtcagttttttaggtgcacctgtttttcttttctggagcatttgttatatacgtgagggtaggatagagaggaagtgaaggagggtgactaagctttttaaaatcaaagagatagagaaagaattcagtagggcagttgaagggacaagcagcagtttacaaaatactcttcctttaaatagcaggattgagaaaatagaggaaaaaataaaataggattttgacatgaatagaagtgcaaaacagagaattacaaaatatagaaaaagacatgaataaccattcatttgattagaagacatgaaaaacacaggaatttaataagagataaaaaacacataggaagctttcacgaggtgatcctcatactgaaattcagccaaaacttctatggattcattaggaatttcgtaggattcagttatatccaattctttgtttaaaggaaaaaaatatcatgtacgattgaaatcctacaattttttatattttccttcaaatcaaaggagccttacaattttattataaatagcaaagtagccgtacgttgcaatggaaataaataaataaaaatacgatgaacatcaatttattagggtttaattttcctaattcaggacccgagtaaatttgcaatcctaattaaccatgttaatttgtatatcagttaataattagataattaataggtattgaactcctggtaacttttttctggtatctcgagatatgttggtctagcctactcttttcgaggtgccatagagtagggtgtacgtgtatgtgtttatagaagagtgggtgtgtttttaaacagaaaactacatatttttcataccaccattttatgcaaatctataataaaaatcattgaaaaaaatgcaacagaaattatgtatgaatctaaaaagcataccgaaattgtaaacattcaaaactgccagaggaagaaggtgccgattgcttttataacctctatagctaccatattgtcacaacgccgcacgagcacgacacaaccagcgcccaagcgttcttgtgttgatgggtttaattaaccggatggttgctcccgtgttcgagttgatcacggaattacatatataacttccgcgtgacgttgcgcgcacctcgcccgcgtatcggatgatggacggaagaattttgaatacaggatcacctataaattttacaatatgtaaagattttaaatactaaaattaactatattttggaattgacgagtacctgccctgttggaaagagactgcgtagttgcagacttgcagtgacatcaacggtgattctagcagttttggcaacgagttacggagttatcgatctggctgagaaaaggctttgttctaaactctcaactggtgatcacacggaatcactgacataatcagaattgacaccaaattccaataattttgctgccaatcagaccggatcgaccggatagcgtttctagaagaacaagtgaagagcaattatatggcttgaattttgacattgacatgtattttcttctgttttctttttctttttcgttagttaacctccgttatgtcttttattttctattcatcctacgcaatgcaaacgcttttgattcaggcaattggaccgtgatctttgtcttttgccctggcattatatattacattgtaatatattcagttctcggatctaagatcgacatcaagttcttgtttgatccaccgctattatcacaatatccctccggttagagctatcaacgatgaatcgataatttactatccttttctttggctttttgaatggaagaaaagaatgaaacctactatggctattgaataacctcctttcttttttttttctatacgaaaccgtttggccatttttttctccgtctgccaaattttgttcagttctacccaatctcagttttgtctcaatctttattgaagaaacggttttccagccgctacatccaggtatcccacaaaatcattaaacctggttgttattttggcgatagcactcttcagtagatgatgccccacgctttactgcgggatatatgttagataatggagaaatgatgaaatgatttgaattgaaatattataaaaatgatttgataatgatgatttagcatgtgtatatttagttttagaatgaaataaattgtagatataattactatatgcttgcatgttgagttttgtgtgcttaatgggttgatgtggcatacctgcatgtaggttttaggagtgctaataaatattatacttgcatattgagttttatatttttagtgggcattagctttatataaagaagagatacgctaaagcacaaattaatgaccaagtgaagactcgtgagaatatgaagcgtgctagtggcaaattcgtggaaagtagtaacaacttatgtagtgtcaaatatttgaaagaaaaaaaaagacacaaaggatggggtagtaatgagtgatggcttttaactaattttgtttgagttactgatgctctgtttatttcaatttaagattattgtaatcctgattattgagttagattgctataaattggattactcaaatctgtatttccacgggtgtattctttcagttccaggatgtacatatatacaccgagcctgagaagaagggaggagaagatgaaggaaaaagtacacggaaggtccctcaacttgtcatcgagttacaaaatcatcacctaaccacaaaaccagatatatcacattcctcaacttacaaaaccattcaaggtaatgcggtcgtctgccttacctcctcctcctccgcgtgccgtgcggcgccattgctgtggccacgcgttgtcgtcggggtgaggcggcgacgcacggtggtgcgaccggcgcggccagcggctggtgagggaggagcgcagcggggaggatgttaacgaacctgaggactagacgcagaggagtcaaatctgaactggttgaagaaaatgaaagagcaggcccatcagcgaggatgacaaggaggagtttgagaagctctaaagctgaagcagttgaggctgctcaagaggtgccatctgcagcaggaccttcgcagtcaaccaggccatctaagagaagaaagaagtgatgagattgatctgtgcttgctagtgagattttcaggggcaccgcgccgatcgagccgcttcctctactcctccgtgaagctcacgcctcctccggtcaacgccgtcgagaacaccatcacgttcctcggcgcctggtggaacgcgggccacgg

SEQ ID NO: 23299 - DNA, 15562 bp, Oryza sativa
tcctgcagccccggaagctgggatgcagcggcgtggtgccagtggcggcggcggcggtggcggcgcgtgtcccggcggaggagacgaggacggcagcggtggcgcgggcatggggtggacgcggtcggccatggggtggttgtgaggcaaggtgttcgacgagtcggctcgagtggagagtaggaagagagacaacaaaagaggggaaacagagagaaagatgacgtgtcatactgatatgatatgtgaagtcgatatgggttccatgctgactcagccgctacgtaggataaaaccggatttaaaaccatcgaataacctattgtgaccggttttgattagttaagagatgctggatatttggttttacggttggaggatgattttgtaactcaatgacaagttgagggaccttcggtgtacttttccgaagtgaaatgttgtggtctacatgggcctgtccaggctaggtattagccgcaggccatgagcccaataattgcacgagcataattgggccgaaacttggctatttacatcgaacaaatttcggcccaaaacttcgacgtacgcatcacagcttttcaaattcgaagttgagcaaatcatagggcctcgaattgaattgttcacccaatttctgacctgcggaaacttcttatatccaatccaatcaacaagctagtgaactagacaaatttacaacccaattctgtcatggaggggaggtagtgaagatggttgatgcgaacacgttccatatatatctcgagtgactggtaatggaggaggaacttttgaagggaggtagtgaggatgtgcccctacctcctaaacggccctagatgtaaaaccatcacaagccccaagatccaccatagttgcaacggctctcctcatcgagctcggggaggacattagcaagtatagatggccataaggcccgaggcccgaaggcccggcccacggcactactttttggcccggcccaagcatggctcggcgaccgagccgtgcctgggcctccccactggcacgctgggctggcccggcacggtcgggccggcccggcacgatgggccggctggctaggcccggcacacaaagtatagggactaaaaatagacatatatatgtcattgtccaaagaatagggaccttaaatagatttattttagctatttatataccacagcccaaagaagagggaggtaaaatagacgttttttagctgtatatatgtcacagccaataggagggatgaaaaatagacttattctgagaaaaagcacaatggcccatcatgcctacgggccggcccggcacggcccgaggtgtgttgggccgtgagtgcggcacgtgggctggcacggcacggcccggtgcgtcggtcgggccgtgccggcccgacaagcctcggcggcccacatggccatctatgttagcaagtcaacctcagcgatattgcaagcaatctcgatcgatatccaccagtagctgattcatcccaccaccctttgtgtcgctggctagggatttcaaagagggatagagaaagtgcagcatgagagagagggaagtggttttctctatctattacttgtcacgtttgttctactgacaaagtgtacaccatatagaaattaaatacaatgtatattggcgtattccgaaactgtttataaaagtaaaggggtttaattcgtccagtgtaattcgaacttttcccttttagaagcatggcgttatattttctgcttattcattgacaaaaaaagtgaaaacaggacgagagacatgacgtacgatcaaggtcataattagcccccctctttttgtcggttacagaggttgctggccatgcgctcatgatcagtgtatctaagcagggccgcaccaagtgtatgcatctttttgtcactagttaattattactccttcccactcataatataagtattttggagggatataattctttaaaatcctttatattatagaacagacagagtaattagtactacttaaaacaataataaaatttgcatatataattaatcatctgaactctgaagtctgaagtagacgcgagacgcgaggtgaggtgtgtagctagatccatggacgtgtacgtaatacgtgtcagattttgtaatgggcggattacgtattttaatttgcgctgcatatatatcacgacacgagaaatgcatgttagttgctctttaattaattaatttcctaaataaaaatgaatcaatcaaggccatcttttgccggtcgccattatacactgacctgcaggtgtttgattagcactcctattcctattcctatagtcctatttgcgatagctgcctcagcatctctccatctatggcgactcaatgatagtgattattgagtgtgcccattaagctagcatcatgagttcaaaatgcagccggaaacagttttattaatcgatcgtgagaatattccctcatttctgtgtaacaatatctaaagtatattctcagctcatatgttgatcgagataaaaaaaaagataaatccagcatttaaatagtattgtatactcaaatttatcttttttttaattaattagtgtgtatcactgtactctgtattgtcaagtttttttaaatattttatgaccatttgtgttgaatttagttggaaaagataaacaagaggatatcctctcgagcggttaggcacttaggccatccccaagactgcataccatttagtgtctatagcattaaatatattattacataagtaaaaatatgatgtggaagagagttaatgatgagagaggtaaaagatgaagaaaccattcgctagttttttttttttgacaaacaaaaccattcactagttacccttcaattcttcaacacaaagggcatgtttagttcgtgaaatgaaaatttttgggtatcacatcagacatttgatcagatatcggaaagggttttcggacacgaatgaaaaaactaatttcataactcgcctgaaaaccgcgagacgaatcttttgagcccaattaatccgccattagcacatgtgggttactgtagcacttatagctaattatggactaattaggctcaaaagattcgtctcgtgatttcccccctaactgtgcaattagtttttcttttagtttatatttaatgctctatacatgtgtccaaagattcgatgttatgtttttgggaaaaactttttagcaactaaacggggccaaagtgctagctagctactgctgcttgcctgcatgtgtctccatccacgtatgtacttagttcgccaaacgctagcgtttgatcgcgagaagattaattaattaaacaaaatagcatttgtgaaccgcccaattgtgtgctttactctgcacatgatttatatataaaaactggctactttaaagatcgacgcacatgcatggtttacactcaactaattggtcctctccatttgcattattgttaggtttgctatggctgtatataaatccatgtcgatcatgtttacactcaactaggaatgttataaatgtccaaactaaaaaatctcaaaccattgatatattgatcaagaatattaatattcagtatccaaaaattgatatcgatgggttttattacgaaacaaacttgcaacattttttctaaaaaataaaatcgctaaaaataatagtaaatttcacttaactataagtactttggttaaactatcacaaaaatatagagttaacatgatgtatcataaaattatagatttaactaaatttatcacaaactacttacagatttaaggtgaaatattgctaaactgcatattttaagtaacaaagttatcaaaaatttaatcataaaatttggacatttataactcacacataacattcctagttttgtaataattttattattaaatctgtagttttgtaatacttagccttaaatatgtagttttgttgattgttaaatatatagttttgtgatatatcatcttaaattatagttttgagtgaaattttgatcaaaatatttgtagttttatgaaatttacttaaaaaatggtaatactttgtattatcaaaatatttgatagaagaaagaatgcagagagtacttgtctgcatgtatctactccctccgtctcaaaaacccaacctaatattagagatgatattttctagtacaacgaatctggacaaccttatgtattcaagtaatgctctcttgctctcttttttatgaaaaaggtagtacaactcttctagcctctgcactaattaaatgtctatacaactatgtttacagacaccccgtacgatttgaactctagtggttagagttatttagtcacaagtacgatttcaaccctagtagcataattttcagcccttccagcctctggtactcacgattttaccaacgtaccattgatgctttcccatccagctaatgttcataccttgatattataggttggtaaagctaaatagtttcttgtgttttaatcaagctgtggttttataatttatatttttttcgatcgatctgtaacttttataataattggttgtaacttcttggaagcaaagatgggaatgaattccattattaaaaacaatccatctagtgctcatatattgatctttcaggaactagtgaggtaattgccaaccttagcaaaggtaaattaacacatgcaaactaaattaattactaagttgcctttccaaaactatgattgaacggtcacgttctaggcagatctctgtgctagctagctaccggacaaatagtgtacagtaaaagtacatcttgggcatggatgtttaattagctcaatcattggcaaattgaagcaacgagccacgtaattacacacgggaccaacacccaactctgaaagggagaagaaacagacacgaatatatggccggacgaccccattataaagctatgcactgacagtctgacactgattaatcaccaccattacttaattaattaattaattcaattaactgaccactcaaatatgaaatatagaacaccatgatcacataatatatttacacgtacggatttcagcatcaatgtctatatatatatttatatatatcatcatatgaagaactttacatgttgtacgtgtaccggcgatcgagattaaagactttaattatcatcacaatcatgtcactcaaaagcagcaaactaatgcccgatccatcgatatctctcgatcgatcgatcaaaggagagaagagaaatgaaagaaactaaaccaaaaaaaaaaaaaatcttttgacaacccaaaaacctctcaccaaacatcagctatgatcttaattacgtacgcgccgacttaattaattcacacgcgcgtatacacgttgaaaacttgacccgtaggtatacgtacatttatacgtagcagcatgcttgcatgcaattatggcgcctactaattgatcggctgatcattgctatggctcatcgctcgccgtcggtctcgttgcgcctaatttggggtggattcgagcttagctagatggtactactctgtcccataaaaaaacaaactttagctatgaatctagacacgcatatgtccaggtttgtagctagaattgtttttttttttacggaggggtagctgctagcaccagttgccgagggcgtgggcgtcgaagtgcaccgccgtgtccttgctgtcgccgccgccatagatgccgccatggttgtacggaggtagctggtggttgtagccgtcgaacacgtaatcggaccacttgagctcgtccagcgcggcgccgtagtggtcgaacgtggcggcggcggcggaggaggagggggtggtggtgcttgggcccagctccagccatgggaggtggttggtgttgccgtactgctcgtcggtggtggtggtggtggtggtggcggcggggcttaggccaaccatcgagttcagcgtgctggagctcgacaccgacgggataaccgccgccgtgggcgccggcggggcgccaccaccggaggaggtggggccgccgccgccgcagtgcagcagcgcgctcgcgctggcgccgtccaccgcgaactccgctgtcgcttggctgtacccggacagcgacgacagcgacccgtcgccgccgacactcgcggcgccgcactccgtgctgtaccggctgccatcatagctctccggcggcggctgggcgccgatggaggacaggatgagctcggcgtcgctgaacaccgccggcgtgcgggcgcaggcggcggcggcgacgacctcggcgagcggcttgtgggtggccggatcgatgccgcgctggcgaagcttcttcttgatgtaagagttccagaagttcttgacctcgttgtccgtccgacccggcagctgagccgcaatctgagaccacctgattcaattcaagctgattaatttcctgtttgattgattaattagctagaaatcatccaagctataattaattaagagaagtagttaaattactagtatgataatctagtagtaatgtgtatatggatttgtttgagttaattacttgtttcctagcatggaatggagatggatgatgaggtcttcttcttcctgtgagaatgctcccctcttgaggtctggcctgaggtagtttatccacctcagcctgcagctcttcccacatctctcaaggcctaatgcaaccacaaattggaatttctaatgatatatatcaaattcaaactaccaattaattcctacctaaaaaggttcatttcagctcaattcagttaattaagtgacatgaaaatttcgtaattaagcacaattgcacaaatcatgcacagagagagtaactagtattatggcactaattaagctaaattacattgtccatctttgtagtagtactagtgctactagagctatgaactatgtatagttagatatagctagtgagtgtatatacctgcaagcttggggacggagctccagcagccatggccatacttggcaatgtggttcatcagcttctcgtcctcctccggcgaccacagccctctcctcagcttcttcctcgcgccgcccgcccgcttcgccatagatggccaccaccaccaccgtgctcaatgtcgcaattgccgccgacgacgaccgagagagaacaaaccaaaccgccggcgatgtcccgacgacgatggcgaagacgaagacgaaagcttgagctgggacagaggagagggggggggggggatgggagggggaagaagacgaggtataaaaggcgggagagagagagagagagagagagaggtgattgcgtgggcgggaggcgggaggtcgctctcaggtaggtggccattgtggtgtgcagagtgttacactctctctgatgagtgatgaagcatctcatctcatcatcttcttcttcttctcgaagactttctcttctcagctcaggtctccctaccttaagctctctcctctctctcgatcacttgctaatattttccaccacctttactaacttcaacctataatagtactcactttggtcataaatgtttgtcgtttaatttaagacaagatttaggtcctctttgaaacgcaggataagtaataggaaaaatgtaggaattaaaggggtaggaaatggaaagaggagcacattgattgcaccattggaaaaaaaattaaacccatgaaaagtttccaagaagtctaaccttttgtttatttttctatgaaattgatcatagaaatatgtaatcctacgaaaatattcatatcttgttcctacgaatcaaaggatcctatggggaaaaaattccgaagagaattgaatatttcaaaaattctttgccaatcctctatgtcaaaggaacccctcgattgatgttttggaactttgaccatcactaacttctaaaacaataatttagaaacgtaaaattaatataagtaaaattgtcttaaaatgtacctaccataatatcataagtgtgggtggggagaggttaatatcataaatttgtcttaaaatgcgtaaatcaataagttaatcacgtattacacacaacgaagcagaaaacggttgcttctgctgctaatggcagcttcaccaattatctccagggtatgtgtggtgatcaggtgtagtaaccatccacccagctcatcatcacacttcgtcagatcagccgtgttggtagggctagcagcagctgcatatgttggactctttttctgccttaagctttttgcctcttatctatctttctcctgctaacattatgttcaccttgacacttttgcatcgatcgatctgccactaactactgcagatgctattgctagctctgcatggatgcatgcccctgttggactttgtacacacacattcgctttgctttagcatcacttcattctcgaccagtgatttaattggaacgcaagcaaccgaccaacatggtttaattatcggtctcatcttctcaccatcaattaattaattaattaattaattaacaattaattacatgtaataattaattgctagccagatatgccacagcacacacagaatcttatcatgcatggccatgggggcctaattaattagcctttggttatctatatctatagcttggttagggacagacaaacagtagtgctagctagatagagcggtactgcatgtgtggaagagatggcatttggatggtaaccacatgttaaataataataaggcaaaatttgctacaggacacgcaaaaaacgtgtaattagctggaagacaccgtgaaaacgtgatacggctaacggacactacaaaaattgtgtaattagctataggacacttgtcgtattattttattattttcggatcaaaagaggtgagatatttttctaaatgcccagattgccccttctctttccttggttttctccttcgccgggatcgcgcgcagtggggcgaggttggcgaggtcggcacaagaggacgcctgtgcatgctccgacttgcaaatcagagaccagatcgagcccctgaccggctgcagctgcctcctggctgcctgctcaagctctcaagcctgaagtctgaaggagctcgccattgctgcctgctcaagctctcaagtctgaattgaaggagctagctagccatcttcttgctggtggagcgagctcgccggcgcatgcttggctgctgctagctgctagctggccggtcttcctcttgtccggcgagatggaggtgggcgccgtgagctgctaccggagagggagttggcggcgatgcgccgctgctctcgccctcgccgtagtcgtcgtcttcgccgcggacactcagcgccttcgccgagaacaccgagcgccttctcgccctgccgccccgctgccgccgagctcatgcccgcccactcgcgccgagctcgcgccgagctcatgcccgcccactcgcgccgagctcgccgacgcctccccccacccgcgcggcagcggtcggcgacccctccccccgggtgcctgctctaggcccgtcgacctcgccgtcatcgtcagcggccccgccggcctcgccgaggcgggcctctccgtctgccgccccgctgccgccatcaagctcgcgcctgcgccgacctcgtcccatcgcgcgggttcccggtgacctcgccgacctcgtcccatcacgcaggttcccggcgtaggagaaaaggaaggaaagagaaagggcaatctagacattcagaaaaatatatcacttgttttgactcggaaataataaaataatgcgaccagtgtcctatagccaattacacaaattttgtagtgtccatcagccgtgtcacgttttcgcggtgtctcccagctaattacacgttttttgcgtgtcctgtagcaaattttgcctaataataatactatttccaactgcctttctctttagcatgcacagtgattactattgatcgccttagtaattgattaatcaatagttgatgtgaacatgtttgtgtgatccctcatttgccacaccacaattaagctagctagcaattactagttttcatgacaggagggagacctctagctagttgcatctatatatctcttgcatgatgttaatttctctctcttggagaaagctgctcaacatgtacacatatagatatgcagtacctagctgccaaatgcaattaccatcctcgtcatgacagagatatatcgaagaatatacatgacacgtgctttttatcccctcttcaccgacagaacatttatctcttcccgcgtgttgatgattcggcaataattagtatttcacacgctacacatgcatgcaaggattttgggcaattagtagacactagcttccttattcaagcttttgatcgaaatcaaattagtagggtagcatatttagtgtgacggtgaagttgtaggtgcatgccacttgctaactaagggttcaaaatcttagtgtcgcacagttacgtaggtgctctttcggtaggaattgagtaaattttacaaaataatgtactatagattcattgaacaaactatcacaaaattacataagatggtgtatgaaaaaaaatgtagatttaacactaaatttatcataaaactatatgtttaaaattaaatataaaaccatagatttagtaatcaagttatcataaaactacatatttaacgtcaatttaatcatgactataatgtttaatagtgctaggtattatttaagctctggattatatagttttgtgataaattaatttttaaatatatagttttgtgatgttgcaccttaaatatatagttttatgtatgataaatttggtgtaaaatctaggtccccgttgtttggtttatataaagaataagccaacggcatatttacaaacggaaaataatttgtgagtaaaactattatatgtgtgttcttagccatctaaaagaaaatgctgaaaaataaacttcaatggaaaaaaacttcaaaatcaatttcaaatttaaggttaaaaatttaaattttggttgataagcataagcataatcgaaaagataagactgctagttttgggatacaccatcttaaatctctagtgtcttgtgatagtttggtcagactacctacatgtaattctgtgaaatttacttgtaggaatttcgtgggagataagtggagctacttcatggatttattcctaacatctgtattttgagtacttgtagacgtatattgagatacatgtgcatctgcttctaagaaataggggtaagtatagttgtgtgagtgcgtgatgaggacatcctccactattacccactggcaaagacgtcaaagtcaggcggcgaccgtgtgagcctttgaataatcctataccttgcttaacttgggaggaggaagtcaccttaaaagggagagtcacccttcttctattagactagtcttttagggtgattgggcattttcccgagtgggtcggccaaccccacctaggccggattgtgttatcagtgcgtctcctaatgtttttctaagaaaaaaaaacatatttcagagttagctaattaattatagggtcaattgcatggtatagtacgtacgtacgtatatatgcgtgtggtacatgtgctcgcggcgaattaaatccggggaccagctgataataaaaatctacgtcgacgcgtacgtatatacgtacgtgcattgcattaaaccgcgtcaccgtacacgtatgcatgtcaagttcaactattaaagccgctacttgctcaattaaagcaggactagctatattacattgcttagggccttttgacacagctacagcttcagtgctccacctcttttgaagctggagctcagccaaacagttccagcctagagcttagtggagctctctcacaaaatgagggcctgtttagtacagctccaactcctaaatataactccaggagttgagtctggtgtggacttgtggagctgcctaaacccgaatccacaactgtaggagagtttgtgagaagctccacccaactccactcccagttttggtggagctgaaactgtttggctgagctcgagctccaggaggggtggagctggacctgtgccaaacaggcccgaactagagagaggtgaagctgggtttaggcagctccataattctcagacccaactcctataattaaatttaggagttggagctctaccaaacagaccagagttaactaatttgccggtcatatatatttatacgcgtgtgggctctgtgcgtataaataggtgtgattttcagtatttatatgtgtcggccttgttgttttcgcaaattaatttttaattcgggaaatcgttataatccaagagatattgattaaagaattttaaaaaattagctttgcagcgcacatgtacaactggttgtctttgtctacgtataaattataaacatatatatgcatatatcaccaaaagcaagtgaatagtttgtttttatttttattttttttagggggggaggggggggcagcttcgtataaatgatcaattagttacacacacttaaaagaattgaatatgaatagaggtagctaaattatttttactaatcagaatatattatggattactgcaaaattaattagtccataattataaactagcccattatggaattaatgtggtagattcctttgatcatatggagctggaggcatgcagacataatgcatgcatgcatgcgcatgttaggtacaataattatatgtacatgtacattattggggtttgcaaaatagcagcttaatgtaacgcgtacatttgctaataatgaagataaagtttaaccgttgtgatatactataacgagtacgatttaaagataatcccaacctaaaaattatcaagtactattattatagtttatgtatttattatatcatatagatattatgtatagaaactatatctcagtgggcgtggcttgttcaaaataaattttcatccaattaccttttttttcttattttattcacatatccttttattttcagtttttttatgtatagagtttttttttcatgagaaatggtttcttcatctttttttctttctcttctcattaactcttatgtcacattagctttttatgaccttaactttttattttcgtgataatacttgctatagaaactatctgagttggaaaattgggaggccctaattgaccctctaagggccagcacgaccccatgcatacactatgcattgatctactcctcaaatattatccaaataaatataaggagagttatgatgatacaatatacatttaattaccatgtcctttttgcattgttttagagagttttaatttattgctattggctaatgatcgatatctgctaagctagctagggattaaaagaataacatatgtctgatatgatctgataattaataagctcatatcaagttatctaacttaattatccttcggggcagtcggatgcatttctctggacaacacaatataatatccaccgttaccaacatgatacacatctagtagtaatgaatatatatgtatgcaattttacgtctatgtatagactatgatatggaggtagaaatattacatatatattgtacatgcatggaaaattcgtcggtggcatgataattctaattacctcgatcagcacacaccgtaccaaactctaatattaattgtttaaagcagcatagctttttcattattgcttaattaggacttcagtaaaaaaagcctgaagatgccaaactcatgtatctatatatgtatattacatttaatagagccattagagaaaggaacatagcaccaactctggtggggcacttaattaatcagctgggtcaatataagcacagcagtgttgataagcttacagggacaagtgagaagaaagcagccacaaattaaatagttcatgttacagttaacgtaagttacaaattaacatatggtctagctagtaggtaactctaattcacacgtaatataatgaacgtgcactgaaatggagtgaatttcacttcaatttgcattaggtaaaacacaatgcaaattgttccacttgttgcattgggctatatcaaaatacttttttctttgtacaaggtgttagatcagtgttcttgaaataatatatgaaacttcgtgaattttgactatgtttgaacttaactaaaagggtaatttatgtattttgagattattataggctaagtttaatgatgcccttcggtgcaaagtggaatttattagtacaaaacatagtgaaaagtgagagtgggtgaaacaagaattttaattacctcgtgcagacaattgtagtagtaaatgcatttctagctctgagcttgtactgttgtacagatacaaagctagaaatgtactcagtgcgggacgatggagatagtagcaaagtttatacgtttattagacaattatccatgtgtagtatattcatgaatgatatttatataaaaatagacatatttaatgtgatttctacatttatgcagaaaatactagatgatatatgtacgtatgtgcgagttctaataagcataatatatatgatggaatttttttttttgggctaactgaaaggactgtcgatccagcccatagtcctgataatctttttttaaatgcttaaaatatcgaattgatgtgtaaatttcttgcgccgcctaaaagatgctcgacagttgagaggaagttaaattacctatatcatccaaagtgtagttctttcttggtcggtggctgagacagaaggacggccagtggcctggcccctccaacaaattatttttcatagctttcaacataagccgggtctctggcctttttctaaaaaaaaacaaattatttttcacacgtaaccccacctaattagttaggtaattagcctaagtaatagtgtattagaccctactccaagactcttaggccacttctatgttttaatcgtggcttcgccactgttcttgatagactacttgggcatataaaagggactacttactgatctttcgatgaattaggggtttcaaatcttatataattttcaaccaatgtatacaacctattttaaatgaaataaaaaaacaaacatgtcaaacatgtaaatctagagatagaaacaattgtaaaaaaataagtttgatgcattgtagctgagcataagtgcattgtaagtgagtgtaactgtaagttagatatacagggacacgaatcttaatgtaagatgctacgaacgaaaaaccgatagacaggagctcaaaaatctatcgcaagtgaaataacaaaagtataaaaattccaactgcatgcacgtaggtgtacgtaacaaccgacggcgagggatcagaaaccggatacatgcaaccagtggcggagctacatttacaagagaggggggctcagccttcttcctcctcccccccccc

SEQ ID NO: 23300 - DNA, 10916 bp, Oryza sativa
tactagatatgatatatcctaatattacatacaaatatgtacgtatattcaaatttataatattaaaatatattatatctgattatagattcgttttctataggacggatggatggagtatatgccactagtgtacaacatacagctagctactcctccgtcctaaaaaaattaaaccctaggtttgaatctgagcaaacatgtatccagattcaaatttagagtttgattctttttgagacagagacagagtagtagatagttacttcctccgttcaggttagcattgtccacattcatatataacatctatatgaatgtgggcaatgctagaaagtcgtataacctgatacggaggtagtagtacgtagtacactggacgccacgatgtgtgcacttgcgctgctgcatgcgagagctgggaccacacgtacggtggtcgctctctcgctgtgtgtgtctgtacatgtccgtgagtgatcactgtgtgccactggcactgcacgcgtcgtacgtacaacgctcgccggcggcgaggcgagggtacgtacgcgtccagctatagcgccatgcgggcacgcacacgcacacgcacggcgcgtcccccaccgccgcgacgcgcacgtcccacctgccgttctctctcgcccgcgcgtcgccgtcgtcgcgcgggccaacgacacaacatgttaagggcgcgcgtcgccgtcgccgtcgccgcttgctctcgcgcgcgcggcctttagttggcgcgagcgaggcgagctagtgtgacggtgtgaacgcggcgagggggggccggacgacgagaccgacagcgtgtgcgcgcgcgcgagcggggaattaaggaagaggacgacgtgctttgtacactgctacgtgggtcgccatcgctgtgcgttgtccagctagcgccggcggccggccggcgccctcgatcgtgggctagcttaattagaccaagcaactttttacaatcttacatatgcaatttctttccgaatctacagctccccgcagtccattttagattctaggcccggttctttttctcaattccaaactccaacttcctcatttttcattatcacgtttttcaaacggttaaattgtatgtttttttattaaaaaaatctttacagaagttgttttaaaaaataaataaatctatttttaaattttataatagataatatttaattaatcgtgtactaatgacctttctgatgatagaaattcaattactgagaattttgcgaagctaaaaaaaaaccaacttctaactagagttatgaattctgcaactataccttctcataatcccaaaaaaaagttgaactgttttgaagggcttttgattttaggagaagttgtcattgccagaaactccccaaacagactctagctatattttttcatctaaattccaagaatttgtagtttattaattgtagaatccataaaactgactagaaggggattgaagaagctggaaacttagcttttctaaattttgataagtttacaaactgcttttcaaactctggagctctccaatcaaaacctatctgaaacgtcggtagctaggctgggtggtacagtgctggctggtgctactgtttggcagttggagaaaacggtatagcttgatgtaggcgtatacgtagggacgtcggtctccgtacagtggtacatacgtagcccatgccatgccattgtacgacacatctaattgtgattttgttttttatattaagaaaaatcccgtggttgtgtgtcactgtatagaaggggatgtaacctattttactcattgaatcattgataattaaaacagtgcacgtgcaagaaaggtggtagttcgaaatcaaaggattatcttgggagtttttttaattatatttaagtgaaatttgaatttttttgtcgcaaaaaaagatacattgaattttattttttcaagggcgaatgatccacctaaagtttgttttaaaagaaactgtttcagcacgtacacaccacaggtagttcaaaagtgcatctgccggccaattaatgcggcacagtagctcaatataggacaggacctttggaattttattttcaaatccattatatttactcaatgtagccttttccttgctccatttcataatcaaaaggcaaataggcggttccaattaatttgcacaaatttctcgagcgtcaaattcgccacatgtgggtggtgggctgtaggctacggatcccatcggcccacatgacattgcagcggcctacgagagaatggaaggttgggccgtcagaagctaatgtctactggacctattctcaatctactaggcccattcttttttccaggcctattaggcccattctcccctcctcctacccaccacccacccgtccacgcgctcccctcatccttgcagccagcttatttcataatcaaaaactcttcctaacagtctaatttttcatccaaattctaaaaaattatagtcacagaatctagaaaataaacaagcacgaatcacagagcaaatcacaaggtcagaaattcccgtgaacttacctttaaaatgtgttaaaagtgatgtagtataatactccatccgtcccaaatcataggacgtcctcttaaaatcaaagtcggtaacttttgactaataattatactaaccatacatatgctaagtattacgtatgttatatcactagatttatattttaattttaaagtactttcatatgatgttattttcatgtttgttggtaacgtaacatagaataaattaacaaattaacggtcaaagtatgtcattgtagaccgtgtaaaaaaatataaaccttataatttgggactaagggagtattgtatttccgatattcagggagaatacaggagaccaactgacccaaatggtagatatttgcctgacaaatgattgggtttcttgcaggcacattacttatttcattcatattatcacgtttagtacatggatatgtaaatttatgatacagatacaccattggggtccaaatgttcagagatacatcatccagggaattcaggcaatggaaaagaatcaatcggtgtgtggagctaaatgcagaggcctgatcatgccacattagcaagcacaccaggccctgccctaagatcatatctgagtaatgatgaacatgtccatgcaagtcactagctttgcatcctctatctataccttcctcttattctgtatatattcccattgggtgtcccttttttcccctctttttgccacctacatttggtggtggtctaagaatgaatcttagtaatctcccctgaatgtaagatgatggcaggtaccatcacaagggtatgcacagtctgtgtacttcgcgtctgccctatcgaaaaaccagtcgcctactgcttcagcaattctctgcatatccaagaaaaaaagtacatgggatgggtctgatgagactactggttttacatgtaggagctcagagttcagacagtcaggaaatctttcgaagcgagaatgtttttcatggcatcaccgcagagtttgcgtaccttgttaccgagacgaggagaatcccctgcgtaccatgtgtcctgtctctcactttggcaatgtgcgaaacaggagttgataaaaagaccgttctgccttgcgccggagaaacccctcaccgcatcgagcatttgattcctgaaacctgccatcatacatacacagggggtcagccaatctagacttgaattgacagtttataattcacggatctgggagaacagcccagtaccttgtaaaaattgcagttggttgctattacaggaggcatgattcatcctacatcctcgccatagaccttgcggatcagcccttttgggggccacactttgttgaagctggaaaatataaaataaaatcatgtccttgaacattttatagtttatatttgtggaccaactttatcataccgttaacatgcaaaacaactgacaaatacctgccacacatcataagcagtgttcaaaataaaagttggagtttgaatgtttggcaccacattctgggggaaaaagcactgtagagagcaccaattagaaaaagaaattgtgaaaaactaactgtgtatatctttgttagatacttcttgatgttttccttaccgaagttttatccatgcgggaggtacaagacctaggcaggcttcttccggaaccctgtttttggtcgaattttcatgagaacataagcgaaaaaaagatattgagaaaatattttttttcaaaggtatcgtatattctgacataaattaatagtagcataacatgtagaagaagtgttacagtcatgacgaacagaagtatcataacatggtggacagtggcagatacctgcaatctcacaataccattgaagaagtccctcatttctcgttgcccagaaacatcaacactgcaaatggtaattaaatccataacgtaatatcagatgattagcttttactctaccagtattcatccatagcaaagaatgggcaagaaaaactgcatcaaagcaagtctcatttctatatgtgaacttacaagtccagaaacattccagcatcagcaaggcacttcacgtttgtactgccgctaaacaatccacggaactcgtcacagtgaagtatggttgaaacaccaccagcagagcatccagaaagaagtgcctggtagaattgagttgtggcaaggaaacataaattatttccaaaatccaaaaggctaaagaaaacatgattagctgtggaaggatcagtacctggttagcatatctcattccttgggccatcagatcatccatagcagcctgccaaatacgctgacctcggaaataaaggcctgcagactggagaaagaaaactctgataaatgaacccatgtagttcagtagaaaaaaacataaacatgtatattatgtagtaatttttttggggggatgtgaagtatgtatttcttcagaatatttgtttgaatggaatgtacactgtgtgcaatatggaatataggtcactaggaagaaacgtgtacgctaaatattactactatctaagagaacttaaacttaaattgaaaaacattttcctttgggaaacattaaacttaggtgatcagttatcttgattatcttctgaaacccttcagcccagttaaatatcaggaaaccaacgcactaaaatgcagaaacaaaatttgcactcaccgcatcagccccatcaccagtgaaggatccgccatcacaatatcgaaccttcactctgttccagttgtagaaatctaagaagaagagagcacagtcataatttgtcagccaccaataattaatagcaatattcgcatgaactatatcaagacagaattgatcgaaagaataccaggattttcttcaggcctgttactcattatcccagtaaactggagttggctctccatgtgatttgatgaaccacgccgactgctcttgcgaaacacgcagcttttaacatcgttgcaccagcctccaccctggaattccaaacgaatcaccatcagctactaaagcctgaacgatatacaacaatctctagtgccacaaagtgccatttgctcaaacttatctctcggttcacatatatgggaattggggtgtatttctcacctccaaattgacaagccaactgtttgcccctgatccaaaccctcggtgtaggtgataccctggtaagctcccatccaagcatactgccatgataaacaaagaaagctgtcatcgagatttgccaaccaaccctgctataagcaaatggaaacttgggtccaaattattcagaatttatgatacactactcgctagacaatcaagaatgtcaacttaagttaacagaaaacagatagcattgagtccccttttcccccaactaggtagcaaggaaattttcatcatgacaaccaccaaacattccaaggctctagatccacatgcatatatctatcaagatccacacatgatgcatggcatgctacaaccaaccaacaaaaaggttaacactgcatgatcactcaatcaaggagcacctaaacaaaaagaggggcaccaaaaaaagaaaacatgagcaatcacactcctcctaatttacaggtgctctgaaccctctgtccaaccagggtcaactcaacaaggaccggatcacagtatcacaccactcaatgactcaatcagtggaaaacccaagaccccattgacccaattccaagagctcacatgggggcaaggcaaggccaataaaaaagcaatctttgcagccggaaaaaaaatactagaatcaaggaatgaacgaacaattcagggaacaaggaaacatatataccggctcccttggcggccgccgactggatgagcgtaatcccgacgaagacgccattgctaccagagttggcattggtggagtagacctgcgtctgattcagccacggctcagagccatggactgccaccaccaagaagccaagaaccagagcagcaagagcccaagaacaacccatggttgatggttctcttctttctttgctggttcttgggccttcctcccactcccagcctctgccttcttcctgaggaatggatctggaagaaggggaagaggaggagggaagaatggaggagcagaagcggccaagcaagaaaggaagttatacgcggagccaagtgcagctggatgctggcaatggctgacaaaacaaaagcggctgcttctgggagattctgtggagcggtgtgcactgctactagtgcagctgcactagtgcttccagtgaaaaaacgtgtagtgcaattacagttgtgaagcaaagcatctccctatcttgtgaggctgtagaaatggagaagaagaagaagaagaaaagaagcaatggaaggagtcgcccggaacgtggtggtggtgatgacggaactacggaatccaggggagggcggcgaaagggtggggaaaactgtgaagtgcaattactgcttttttggtgggcgtactcgtctccattggagcaagtgacagctgggagctgagctgagcagcggccgtaggcaggctggtcacttcctcgcttgcgcttcttcgctgcagcggctacaagcagcacagctttttcatagggaggcgcaaaataattagtagtgtcggctacggccatgaatgaggaagcgcaatgtaggtcatgtttactttccaatcagcaacaatttttttaatatatacatggagcattaaatatgaaaaaaaaattaattatacagcctgtagtactaactactcccaccttatttattttttataattagtattttttattattagataataaaaaataaataaatatactttacatgtgtcttgcttttaagttttcataaaatttttaaataaaacgaatggtaaaacattgaacaaggaaacctaccactgcgttttaagtggaacggagggagcaaaggattttagttgaataggacacataccattactataaattgaacattcgttatttagattcgtagtattagaatgtgttcaattcaactaaaattcctcgcattttgggatggagaaaagtagtactactattcatactcacaaaataagttcatctatgtcactcttatttatttcaaataagtttgctttttaagcgttcattgtattagaattagagttttagaaagtagaagataaatatactataaataaataaagtgggggacaattctattggaatttagggcatgtttggaggaacttctagctgctgcagcttcttctagaatcagaagctctccaaacagtctagcttttggtccggattgtgagaaactatagttgtaaaatccagagaatgaagtagaagccagaagctaggaaacctagtttttctagattctcagaagctgactaccaaccagctgttttttagaatcttacgctcccaaacaggcccttagtaaagtgaagggtatcttaatcttttaattttgtattagtatgtgtaggatgagtgaaaaatgaaatgattttgggacggaggtaactgccatccttccttaaagaaacaatcaatttctaggaatgatttgtccatatgtatcttaaaaaatattttttaagattaaaataataaataatactcaattaaccccgtgttgatgaattttcttgttttgtgtaccatgaaaaagctcaacctttatgaaaccttatagattgactagtgagacttcttgaatttatgacggtgtagttttcataaaaaaatatatagatgattttttaagaattattttaaattttatacttataaatcgattatgttatattttatatgagtattagttaatttatttgtttgcactctcattatcaaattaatcgatagtaactctcaaataggagtatttagcattcaaccatgctgctagtcaatagtacaagtacaaagacttttttttgtcttttttataatgtttctgtaggagtatttatttgcgtattaatgttggtttaattaatagaggtgattaattcgcgtttgataccggtggctgttactgttgcttcttaataaggaggttaattagacaaagagagaagctgttaaatggtggtacaacagcaacgttttgtcgggggaggttcctagacgaaatcacatgttctgcacaagaactcgtttggacgttagtggtctacaccaactgattgatcgttttgcgacttgcgagctgtgtggcactcagccactcactggtatgggtgccatttcatggtcaactattaggaatacaaatggattaaaatattcaataacttgctcacaaaatttaaaacagaatgaaaacaatttgaaagtgaacagatcataagaagttaagaactctcctcgttaaaagcatatcccatggtgcgcttttggattgagcgtcggatccaaaccctaggtggtatgacagttttcaacaaatttcgatcgatttttttgtttaaaattttaattctcaaaaaatcatttaaaattttcactcaaagatgctttcgttctgcgtcaaaacctcaagatttcactgtttacgatcgggtttcgtcgaaaaccgaaacctagcatagttggtaagaacggggcagaaagtcctagtagtatattttaacttctctttacttctgcactctctcaaacctaaaacataaatatagattatatagagtaagtcacagtacttccccccgttataaatattttatgtttagaataagatttgattaaagttttgactatccaacaaatttttaaaaaatgtttagcttaaaattaaatagaaaggatggtacgtgtaaagttgtctcaataatattatttgcattacaaacttattgaatcaaatggatgtcattcttatataaaactaatagtaagaattttaaaagttttacccagacttattcccagtgccaaatgtagagttggctacaactctaccaggtggagttgccatgatatgtgccattccgtatacctcaacggttaggattaagccacgttaacgttaatatatacttaaaacaagtaattaactgtgcaacaaataaacttgcatcaacaacatgtcacaagatattttaagatatttttttactgtagaattgtagaattaatacaagaatttcatacttcatctattttattaaaaattatacatattacaagaatttcatacttcatctattttattaaaaaattatatatattaatattgatatggttcgctgttgcatatatatgaaaacactgtgttagtatatactgctgcttagagttgatcgactgtatgtgtttattaagaacaaatgagaacataatcaaaatagaggaagcgttgaaaaaactaattttcctatcaagctataaccattaatgttgaggagttactttattaggtaaatttaatgaggcataatctcagccgtagaaaacaatggatgatatagatttggccaactctacttggtaggggatccagaccctcctcatatgagggagtaattgtctcattctggtacacgcacgatacgtccacatatacaataaataatgctggtgcaagtaatccatctccatacaatacggtggggaccattggtcaaggatataatatgctcaaattaatcactcactagtgatagtgattaatgtacgtagcgctcgctaaaacgaagcccaactaacttttcaaccatccagcacgtcccctggatatgtactgatgtactacactactgtacagcttcatctaaatctcctagatactcccttcattcaaaattatttcaaatttcgattgttttttcaaataaattagttatatttgtagtctatatgtatctaaaacttaaatgaagaaacaaattaagtgtatgatcagaattcggaagtcataattctcctgctctatttatatattaatatatataaaggcaaagcttttgcccttcttaaaataaataaatgtactcatgatttctgtatcagtaagatagtatttttttcccgttttggaggaagggagcaagagagagagattcttcttgctcaacttaactaattactcgtaataatctcgtaaagaaatgcatggatttttagctataatgcacggcacaatcatttccgggagtactccctccgtcccataagggattttgagtttttgtttgcaacgtttgaccactcgttttatttaaattttttttgtaaatataaaaaacgaaaagttgtgcttaaagtactgtagataataaagtaagtcacaaataaaataaataataattttaaaaaa

SEQ ID NO: 23301 - DNA, 5010 bp, Oryza sativa
gctagggaacacaagaactaaagtggaatggctaaagaatgagctggggtcgagttggctaaatataacggctaggtgacgtcatctagccgttactcacatatttgaactggagggttgccaggaggttccgggcctgggtgccaggaacttccgggtaacacttaggaaaattttcaacctcacctcagcgccaggaagttctggacagaacctccgggtgggactctctgtcccaagtagagccattttcaaaaacagctcctaaaaatatttcaacacttggacactactaagagcacttgtgttatctcagaaccacacttggaacccctcttaatagaacggcttttcctaaattcaaagcgaaaaagtaaactagtctaactcggccccgagtcttctcgccgctttgattttgatgatttgggggggtctccaagcatcctagcccactcctaagcaacctgggactaatacaccactaggaatgtcatcttcttgcttcaccttgagggttctcaacgtcaacgccatttcactattaagactattctcacctacactcattaagcatattagtcccaaatcaattatatctttgccttgatcaatgcccactttggattttgacttgatgttcatcgaagaaccacatcctcttgatcctcggcattccatcttgcggtcttcttataattgatacggattactcataacttcaaatggcctcgcacggtccatcatgaccatcatgacaaaagccttcactcgcccttcaccaccggattcggtccatcggcgccaagcctcttgcttgcccttcaccccccgcatggtccattatagccgagccttgcttgcccttcaccgttttgccataaataaccacttcataccccgcatcatcaatgtcttcacttgctcctcatcaaggtataatgtccatcttctagccgagccttgctttctcttcaccggtttgccatagatagccatttcataccccgcatcatcaatgtcttcacttgctactcattaaggtataatgtccatcttctagcttcaatcttttaacttgatgccggaacttaacctaatctcaccaactcatggaaatagttagttccaacaatgggttgtcattaatcaccaaaacaatcaccgcactcttaggatcatagatattccaatctccccttacaaggcaattctagtgcatagatctttcaaaattgtctaactcttaagttcacgttaagatgctattcatttaggatgaattaaggttgcacagagagattcattgcgcagcaaagagagacaaaacgagatccttcgttcattaagatttgtaaacaaagagggaacaccagtagggaacttaatatatcagagtaaaagaaatttacttacaaataattaactcatccatacgattttaattcccagaaggtagaatagcattgaattgcaggtaaattcagaaccgtagttttctttaacaccatgatcaaaactctagtaaatttggaattacgcaaatcttacactgcaaaatctcaccagtggaccagcaattatctcatctcaaccctatagaacacgtacgatcaaggagcaaacataaataagatcccctaattaatacaaaacgatcactctaataacactactagtcttactactaattaatattttgatagcaaagtgtcacagcttcagcttcaacttcgcatcagtctccactcttcttcttcttcttctccgactgctcgtcgccgccgcggcctggccccttctgctgccgctgcgctgccggcggcggctcgtcgcgcgacttggagaccatcatccccattgccggcgtcgcgtataacctctccttcgccctctccttgcgtgcgcattgcttccttctggaggagttgtacgtcgtccccgacgcgcgctgcagtccgtgcgagctcatgccggcgagcatgcgcgcgcggccggcgcgctcgtaccgcggcgcgtcctccacctcctcctcgagctcgcacaggtcgtccgccagctcgtcgcacatcacgtcgccggcgaaccccggcgccgacgcctccaccgcctcccggcgaagctggagcgtccgcgccgcctcggcgtggtcgccgcgctcggccgccgcccgcgcgatcgcgatgtcctcggttgcctccacgcgcacgcgctcccgttccacctccatggacacctcctggtccgccgcggacacttccaggggccgcctcacgacggcgtcctcgccggcggcgacgtcgatggttcgcccggtcaccgtgtcgcggtacgtgcagctgagcttgatcagctgggtggcgtcctccgtggcttcggcgatcggcacgttgatgaacaggaggaagcgccgctcctcgtcggcgtagagctcgccgacttcgaccgacgcggcgcgggcccgtccgcgtcgacgcggctctcgtagcgccccgacttgatctcccggacgagcacgcccgggctcgagcacgccacggcgatgcgcgcgtcctgcacggcgacggaaaggagccctccgatgcactgcgcgaacgagtcctggatggccgcctcgttctcgacgaaggagaacgtgccgcccgtcgactccgcgatggtgttcatcgccgccgcgtcgtggtcggcgccgaagccgaacgtgtggatcggcgcgagctggccgcggccgccggaagacgcgaacgaaggcggcacgaggtccatgtaactcatgccattgccgcgcctcgggacgacgtacgagtccttcccgtcggacaggaggatgacgctcgagacggcgttcttgtgccggcggtcgccgagaacgcggccggccacgcggaggccgtcgccgatgttcgtggcggagtcatcgacgagggactcgacggcgcgcttcgccgtggccttcccgacctccgacatgcggaggagccgcgtccggcggctcgcctcagtcgagaaggagacgacgcagaggcggtcggcggggccgaggttgtcgatgacgaaccccatggccttcttcaccaacgccagcttcctccccgccatgctcccgctcacgtcgagcaccgtcacgaggtcgagcggcgcgcgcgacgccgccgccgccgcggccccggccgccttggcgtgcacgagcacggcgaacttgtcccgggacgcgcccctcgccacggccgggtactcgcagtgcgccttgaccaccaatccagccgcggcatcgccgtcagtcgccgccgcctgctcgccggccggctccaccggatcgtcgtcggcgtacaggggaggctcgtcgtcgtcatcaggctccaccgccgcggccgacgacgaggacagcgccggcacgtcgctccagcgcgcgttgcagagcgggcagacgcggcggccgtgcgcgacgttccgggcgatgcagcggttgtggaaggtgtgggagcactccgccgtgaagatggcctgcccgccggcgatctcgccgaggcagatggcgcacggatcggtctctctctccatgggtacgaccgtacgacgaagtgacgaacagttgggacctctggtagcttcctcgtgcgaaaccctaacgatagatgcgagtctttataactgcggcgacttcaattaaggagatagatagcatccgtgcacttcaagtgcaaggtttgttttttttttttgaataaagttaagttcaaggaattaactgaagagaacattccaattaacacgtatctccactcataacactctcaattaaattttaggccttgtttggatgtaccacgttcctggcccatagacgtttttgtgccaagataggggaccaatcggattggagtaagttcactttaggtcctcatgttgacatcgagtttaaatcactcttaaccgcaaaaccaaatataactagaggtcaggaacagtattgtactattgtgtctagttccgactgacatagtgacatggcatgttaattatgatcaacccggctaattcagtgtgaaaccctggtggcaggggctatcgtcctctacccctcaactcctcaggtgcgtcgaggttgaaaaattacattaggctaggcacataacatttgacaacggttttttttcctttggcacgtgagatcacgtgatggctacaacatcaccaacacaaaaatgttgcaacacaacaaaacttccttgttgcaatgtttaccacgatatatttacaataggtgtgacatggtgcacgggaggtgttcgtccgttctagcttcttctcctctccctgtcccgctgctgctgctgcggcggcggcggcggcggccgcgtcagctcccgcgacctgcgcgaccggtcgagcatgtccagcatcgccggcgtcacgtacgacacggtgatccccgtcgggagctccgacgatcccccgcctccgccgtgagcgtggcggcgcggcgccacctcgccggacatctgcctcgacgtggcgcgctgctgcgcgtgcgagctcagcccggcgagcacgtacgcgcgcccggacagctcgtactgccgccggtccgccacgcgggcgcgcatctcccgcagctccccggacagcgccgcgcacatggcgtccccggcgcgcgccgcggcggaccgcgccaccgcgcgctgcctgctccggaggatctccgccgcctccgcgtactcgccgcgctccgccgccgcccgcgccagcgcgatgtcgtcgatggcttccacccggacaagctcccggtccacctccacggagcgctcggcgacgccggactccgcccgcgacggcctgagcaccaccgcctcctcgtcgccggccacgctcgtggtccgtccggtctccatgtctcggtaagagcagcttacttcgatcaggtgggtgacgtcatcccaggcgggggctctcgggacgacgacgaacagcaggaagctcctctcctcgtcggcgtagagctcgccgacg

SEQ ID NO: 23302 - DNA, 2601 bp, Oryza sativa
cgccacgctcgccgcgccgccgccgtgcctccgctccccgagacgcctcggcgcgcggaccagcggctcgtcgtcgtcgaacacccgtggctccacaggccgaaagaacggctgcgccgccgacgcagattctacgcggacgcgcccggcggcgccgcgtcgttgccgcggcggaacgacgggagctcgcgccaccgcgcgtggcagagcgggcaggcgatgcgtccgcgcgcgacggtgccggagatgcagtggaagtggaactggtgcgagcactccgccgtgaacacggcgtcgccgccgccgcggccgccgcggcgcatgtcgccatggcagatgccgcacggggcgctgtccatgccgcccgccgcgaggctttgaccgagaaaaaaaccctccttggtgtggcggcaacccaccaacgtgtaggatttgatgaatcattttgattggacgaaaatgtgttcttgactcgtcgttggaattgcgttcgcgtatgcaccgcgttgaacgcgttcattagggtcctaaacaagtcaccgggtttctgcgaattagtctcgaaccatcgatttggtggagtattgtaatcgtgtttatgggttgactagttaagtggatctgattttgctggagtataataatgtgtctttatgtctgattatgttttataaagttgttaatcatgaatataaatcaggcaactgaaattagagttgctagttgctaccacgtctattttcaccacagatttgaaagctgtcgttgcttcccttgttgcaaacttgcaatggcaggtgacagcatggagccagagttcacaaagccgtagctgctaaacgaaacaaaatacctgatttctgcaaggacaacaattcccagtgcagctgcatcagcatattctttaagttacatacaccatttcaatccttgggaaatggcatttcaattcccaaaccaaaaaccaaagcattgccaactagaaacagaattgcaaaacacgttcatcagcactgaatctacacaagcaggaggaatccatccagtcatccagacatatcaataccaatgagtagcaactcacaaaaatatacaaggttctgaattctgatgcatctttgattctttacagagtagacgagcaaaactttaatccgagacaggcatatatatgaagtatactgctacttctgggcctctgcctgttcaaagtttacctctgaagtagctaaaagctctacggggaaaaaaaatctcaactgctctgtgcacactacactactacagtcaagatgtacaactatatatttacaaggaaaacatacaaaactttccacatcaagccgtcaaccgtgtgcgatgtgagcctttgtgtgctagccaaatccgaactgtgcggtcatcacttgccgaagccagcatatgtggcttagcaggattccagctcacacaatttacagtaagtgaatgaccgtataagacctttattggcgtctccaggtgccttttccaaatgtagacctgtcatcattttggcacatcaaaaagatggaaaaggcttgacaagagcagaaatccatgtactagctaatttcagtttatttttgctgttcacagaatcttgtacataggtccatgcctaacgatgtgaattatgtgcctccactaggaaatgtcaactatcaaacacactgcggagttaacaagagcaaatctattttcagataaattaaggaccgcaaaccaaacaatgctaatcaacctagtaggaccttcaacattattgatatttcagttaagccagaattgaatgtaaggtttagtgctatgttaaagaggccatgtggacattatcagtgagcctgcaatgtttacaatgtttcctcatagaacaggaaccttgaaagagtaccaagaaccaagttacaaggtaccgctgctctatatgcgccactccttattctcaatgtacgcttatgcttgggagggtggttatgttgtatatgtatatacaatcatatgatctacgaaaaaagtcaggacgaggcagctaaggccaaatgcaatattaaattccataagaaagctatacctgggaatcctcactgccactagctatgaacagagagtttgatccaccaaagcaagatctaatcacaaactttccttgcttgtgtcccttgaatttattatccgccgcagtagaactttcactgattctccacaaatgaatttcctggctgttgaggttgacaatcagtgattgtccatcaccagagagagatagcgacgaaatcgtctgctgctcacgtattctccattcccgcccctttggaagttctcgaatccaaatttcattggaacatacacagataagatgtttgctatcaggagtcacagctatatcactgactttaggtattctatctccaacccatgattccagttcttgaccttctaggtcacaagtgaagatcctctttggagaactttcaggctcacagctggcacatactattttctccgaattagggaaccatgcacatgaattgataatatggccaactgagctgctaaatttaagactggggctgcaggaat

SEQ ID NO: 23303 - DNA, 6547 bp, Oryza sativa
catttcagacatttaccatagtatccaatacttaaaaattcatatcaaatttttctggtaacatttttaataaataaagatttacattatgaagggatttctcataaagtatatgtgtcagtttcacaggggaaaaatagctccgctcatcagtggacaaagtttaaaatgtatgattgcacgtatcgtataaaaggcatatactttctataaaatatcttatagcactagaaatttatgttttcttccataccactaagtttcaacatttatcctttttgcaccactcccattaaacctgttagtttcagctgccgttaagtcattggaagctgtcagatgtttttttcccgaaaagacagtcatacctcagtcaatagttgctggcccacattattggaaacttcaagcttcttctcctttcctccattcctcttcctatggtggagagggaaaagagctttgatggaggtacaagagaagattagcagcaacaggaattggggagtctatatcacactttggcacaaggctagattgagggatgttgcattctctaatcaatcaggcttgttctgttctccaatagctttctctatgtgagttaaaccattaccaagtatggattatggaagatgggttaagtggaatgcatggcttgttctgttctccaatagctttctctatgtgagttaaaccattaccaagtatggattatggaggatgggtcatgtggaatgcatgctatgttttgcatggagttagtctgaatgttgtggtccagaagtggttaaagttataagatattttatatattaaaaacgagttgacttataaccattagagttaagaagaccaagttgtaagtcgtattctgaaacaacaatagtgaaaagcattgttaacagctgctttggtgaaaggcataccttccatatgatggccgtgcaatcacttgaagatgatgccagatagtttccatcatttgagaaccttacaaaccaaacttcattgttatgaccacataatatctgcaaacaggcatggatgtgtcaaatatccatcttcggactatagtccccgcccccaagcatgaaacttgtctagtgctatagatccctgaaagaatacataaatgagtttacctgaatagtaatcccctcttggctaaaaaagaatctaataacattattatcattggttttgaagtatctcaagttatgatcatttcttttagaatataacagaatttgaaaaatcagaactccacagaagacctctacacaagcagataaaacatagtttgaaagcagagtagaaaagaaaggtttgaagtggtgctgtttacagtgtttctatctttcaaaacaaaaccgagatttcaagtgcaaagactcttaaataatgcaaatccctgcctcactggggctagagaatatgcagtacttttgaagagtagtgtctcccggtagcatgataattttatgcttccaaacattggcacggaaaggataaaagctgcatatatattgaaaaaattacagtgaatattcgagttactgagttagataaccatacagaagtacgttctgaaaactagtcagaacaattgccagcataaaaattgtacattgtcggctctagtttttgaaattgatctgatttcacatacttataaaccttataactggggtgtttgtgcaaaactggtaatacaaatcaacaatttaaactcgcacctgcgaacacttggaaggaatctgctcttcagggcacttatgatcctcaaacaaagtgacctcgtccggtaaattgtgatatacacaagacgaaacctgcttaacaactgcattctccaccagaagctctagccgaccgcttggcacatggaaccatggcgggaaagcatcaaccagatccaagaaaagcccaatcctccacccgaccacggcatccggcgcgaccgccccctcgcacgagaccattgcgcgtgccagccagtgcacacactccctgtcaacgccgaggggcgcaatccggcgccagagcacctccctggcgcgcggcagcccagcgtcgccgatccccagaagctccaggaagtgccccctccacaccaagaactccgccgccgcgcgctcccggtccccgaggcccgccacggcgcggatcgccgccacgcacgcgtcccaccggccagacattacgtcgaacaggaggcggtcgtgctccgccgggtacagcggcatgccggactccgcctccagcgccgcggccgccctccggtaaccgagcgagtagagcgactgcgcgatgacgcgcaccagctcctcccggtccacgagcccccgctcgccgccgagccgggcctcgccatgggaagagacagagctcgcgtgcatctccatggacacggctgattcgcttcgccagcttgagggatctcacaccccaagcagccgccaagaccaaaaccccctcaaaaatccgagttccgaacacaaaagaagatcaaatttccgagcggatcaaatcaaaacttcaagagagtaacaaaaaggggtcaaaaatttctccgctccaacacagacgcaacaagaaaagcctcgaaagcgatcaaaaattccacgcactaaatgacagaaaatgacagggagagctcaaaatccgcaaaaaattatcggataattcgggcgaatttgggagtggcagtgtggatttacaaatgatccgatcaaaaatcgaggggctactgggttttttttcctcctccgtccggatctgtgtgaccaaatctgtgggcggaaaaaggatgggaatttttggggacgggatcgatgcacggtctgtgtgcgctggagagatctggaccgtccgttggatgctgggggttggatccgagccgttggaggtctcgtggatcaggataggatcagtgttgttggtgtcttgtgggctggacagtagcgcgctgataagaccgggaatctggagtctagaatgttcggagaagaggcagtttcggtgcttcggatatttttgctttgctctcagccccctcactcggttgagttcagaataaattgcacaatacagagggtagagtgcaccttgtttctagtacaatatatatgatgaattacctattcatatatattatactagaaaatgttctttttagttctaaatttttaaattttgagatggaggtggtacatagtttcattttacattagggaatattaaaataagtttcattttgcacgaggtggtgcatcatatcattgaaaagaaatctagtaaaatatgaggaaaattataaaaccctttgaatttagactatgtttgatgaagatttattcaaaatttatgaaacgtcatggaaatcatatatatattatgatgtatcatgttaagtgaaacttaaatcaatggacacaggtgcaaagtaaaagcatgtcctaaacctagtgtaaagtgaaacaacatacactttatctggtgcaaaatacaacttactcttattttaatggtttactttggtcctaaggtcttttttagggaggggcaaagcaatcactgaaaaaatgttttcttcgatataagtccttagaaccacctaatactcttttctaaaaaaaattaatactcacattggcataattgtgtagttaaatttcaatattatagatacgagacactcctacatgagtgtattcgacaaggctcgtggaggttttaatccaagttagatctagctgggcgggcaagcaggacaggtgccaaggaggcaaagacggcagctatatgatgagggaggaacaatgacaatgagcgtgcatcaatgaagatgacagtgaatcggtgcgcatggaatcaaatgtaggagggggaggtgcatgagccctctcctctcaccttgtgcacccatgttgcacctaccaccaccatgcctgcacgagcttaaatttggattaggagagaaggtcaattctcgtgtttacaatgggttagactcacttgggaggctgattttcatgagtgaaactaaaacgcggcaaaccaaacacccttccgcagcatgtccggtgtgttcctacaacaacttgcaaagcttgtttttcattttctaccaagactcctttcaattcagaattgctagaaaactattgatagtttttttttctatcctaaaactttcaaattattgaccatcggttggcctcgagattcaaagaattaatttttaacttgcgcaaggactcccaacttgttgggtcaacgcatgtgcttgtagcatacttttttgggttaattggatatttggatcatgctattataaatttaatggttttgaaatataccattcatatttacctatttgtaaccgtatcattataatttcacaaatattagagctatgccactacatagcttttctctacattttctatttttttaggactaaattaaactaccctcttcttcttccttcatctcccatctcactccatatcttctctcttgttcatcgatctccttgtccaccgccaagctcagcctgctgctccgactggcaaggaagcaaagatggtgctgttatggaggaagcaaagaccggcaagcacaaggaagcaaagatgctgctattatggaggaagcaaagaccggcaaacagcaggacgtagacgaaaatcttacgatgcacacgcatggctggtggatgtcgagcagcaccgtgtagaggcgtcgtcgagcacagaggaggaggggatacatacgcttgagccgagttgtaagccgaggagagagagagagagagaggatattcacgccgccggcgagcaccgtcgtccccgtgccaccctcttcgcatgtatggaggaatccgatgcagtggcgacagcggccaaacggcgagacccccggcggcgtgctccgtagcttttgctacttgatccggtggctgggtagcaagtcccggtggcgtgctcccttccagctctgccggcagcggcggcagccctcagcctgctgcagctcttcatgagcttgtgtaagttggctggaatagaagacagaggaggaagaaagaaggcataggtattttggtctaaaatttttataaaatatggtgaaagggtatttagtggcatatctctaatatttataaaattgtaatggtattgctataaatagatgaatagtaatggtgtatcttaaaaccaccaaatttataatggcatggatctaattaaccctacttttattatcacttccggtattggcgggggccattacaatgttatcaaccgattgaaactttaatacagcctttttttatcctgcaggaggggaagacccaatattatactagcatatcttttggttcttcggtcatccagaggtgtacattctcattctgcctggattcggtattatcagtcatatcgtatcagttcaacaatagtattccagctttgaaatataaaccagtagcagtttataaggaagttttaccggctaaagtgcaggattttggggctgtttggttcccagccacattttaccattacttgccaacaaaagttaccacaccttgcctaaggtgaggtgatcaaattgttagccacaacttactaagcttaaggaaatcttgccacacttttttgagccattgacacgtgggacccaatttgttggaggggaatcttgccacaactgtggctacaaccaaacacctgtcaaatttgcctaaccttaggcgtggcaaactgtggcaaagtgtggcttgtaaccaaacacacccttaatcaagaaacatggtagatacatacataaatggcaaaatttgctactaattagctgtgagacactgcaaaatcatgacactactcatgaacactacgaaagttgtgaaattggctgtaggacaccagagccaatattttataatttccgagacaaaagaggtcagagaaattactaaaggaccatattgcccctggacgctgcagcttgtagaccagacccagtcggcatcatgtccatctcccccacccgacttcccattcctccccaatctctaaccctagtcgacggtggcggcggcgtcagattcggcgccggcgccagcggtgaggacggcgagcgacggcgacaacctcaatggtgcaagtctggtcgaagcagatgcagcagagttccatgtcgctcacctgtgcccaaatgatcaacacattttgcgaattcacaggagtttgctgttcttctcagacttgacctgtcattttgctgaattgcccatactctgccactgaaccctacatcagcagagcccatggtgtgcccatccccacttaagttcatcggtgagcttgaaccagaagctaaggctctcctggaagcagctctgatggaagccaacagggagagggagaagaaaatcctgaatggcacaaagtactccctgccatcccctttgcctggtgatgacagtgccgatgacgatgcatgctcagaggtatttgagtgctgaacaatttca

SEQ ID NO: 23304 - DNA, 5523 bp, Oryza sativa
gtgagcgacatggagctctgctgcatctgcttcgaccaagcttgcaccattgaggtcgctgccgtcaccgccattgccagcgtcgtatctgccgccgttggcgccggcgctgccgccactatcaactagggttagggattggggaggaatggggaaatcgggtgggggagatggacacgatgactagacccagttgggtttacaagctacggcgcctaggggcaatcaggtcttttagaaatttctctgacctcttttgtctcggaaattataaaatattgcctccagtgttctacaaccaatttcacaactttcgtagtgtccatgaacagcgtcacgattttgcagtgtctcacagctaattacacgtgacggagcgtgggggctcctcaccgggagaccgcgcaggcccccctttgccggttcggccgggggcgctaagtgaggttcttcgccctcgatctgaggaacgtcagcgagagaggaaatgcgcaagacacgggcgacgtagacaggttcgggccgctgagaagcgtaacaccctactcctgtgttctggtggatctgtgcgtgaaggaatcagagaggccgagagcgaaagagagttcaggctctagaaaccattcgccagagtcccaaacccccctcctttcctctttttttctttttttctaggcctgggcctcctttttatctggtcaggggttaccacatgggcctctagctgcctaagaagggaaacatgctttttacaatgagggctagtctacagccggaagtgacctttgacaagcagagcgcacgtctcctgccccgcttgcccgcttttccggtggacgcccatttcaaccttcatttaatggccagcgacttccttgccatacctacgctgaagcctggaatggatctgaccgggactgacataccaactccaggagttagcacgccggctccggctagggacgagagccaggaagctctcatcattccgacgggacggggcgaggcgtgtgacaggccgcctgttgccacctaacccgcgatctgaccggtctgtgaccggtcacacaccgcgaccagtcgcggaccggataagcgtgcgctgcgccgcattaaatgcggcgtggcgcgctcgtccaatcctgctataaatgcggttaggtgagccccgctgtgctcacctaacccacacgcgtggcgccaaaaccacagggggtcggggcgccccagccctcggggccgaaacgggggcgccccagccctcggggccgaaacgggagcggtccgacccctcggggagacagagggaaacccaaaactattagggaaaaaaacaaatctaaaacaacgaatttgcatccattatctttctttaaatatcctacgcctactcatataactctatatatagaatatatagtaaacccaaaattattatgcaaaaaaaaatccaaaacaaataaataaagaaaacaatcttgatttcatctatcacgaaataagatcattaatatctcctcagctaaaaaaatgattgtgtttttttgttgtatgggatatgtttaaaaaactctgaatatattaaatgattaatctttaaaaaattaaaatccacaagcaaatatatttgaaccaattaattttgatgaatctcaaaatttattttatttgtttggatttcattaaaatttatgtataaaatgacacattaaattttagtatttttgcttcacatgacatacaagttctaaattttatataacaaatatgtttttcacttctatacataataaataaatcatttatacatacatccataaatgttttttaatatatatattcatttgtcaatactaaaatagtggttcacaattttctttctataatattttatgaaaagtataaaatttcaaataagaaaagaagtatatacatattttaaattagtgagcacaccagttttatcatgtagtttatttttgagtgatatatatatatatatatatatatatatatatatatatatatatatatatatatatatatatatatatatatatatatatatattgtaactaggaagcgtgccgtatgctaaacgatcaaacaacatggcatcagtcatggaaccttgtatctcagaactcatatctatgtcactcatgaaactatcactcagatctctatcactattataaaagcaatctccttctgcactgccacaaacattatgtgccatcagacggctatagccattgatattgcaataagtgtagaattaattggctcatcaaaacggaatgatcgatcgtgatcattgcgggagtcttctccgcaagtcatcttctccaactccatctcgcgcccacaaaagttctcctactgagatgcacaattctaatgcccatataatcatagtaaagacatctgattcgtcctgtcaacacataaaaaaaattgcattaacttattgctgtacaacaacattgaaccatgtggtttaagactttttttgattgggggaggggcgtgcaagtacatgagaaattttatgctacttataaaataaattcagagagttaaaatatattatcttctggtgcttttttttaacaatggaaaaattacttttcaagtcgatagcttaccagtgcatggtgtcggcagagacaccgggcaacaaaaggatgcaccattgtcatcattatgaattttagcaaaaaaaaaaaacatggctctatcatgagtcgctagaaagttgaggtgggtgcgattattggtaatgatgaccatagagaccttcgaaacagtatgggcactcctcgttattgacaccacatattagatagagctccaagacctgtaaaaattagacaaaatacagtttggtaagcaacattagagattatcagcaaccaacaaaaaacaatgaaaaaaccttacatacccaggcaccgtctgctcgtatgcattcagcacatcattgcacgagtgcgtgtgagctctccaaaatagtaatactccctccgtcctcagaagacttagagtttgaattttgtccccacaaaaaatcaacttctaccactctacatactctcagcacataaaacaaagaagttttatcccttaaataccctttacctatctatcactatcactactttttctaataatgaggggtattttggtcatttttactctccactatttttttatgggattataggaattgatattttttaggacggagggagtagtacctagcaaaggagagtgaagggagtggctcttcacaactacgggatgatccaggacataccaacatcgcaattcactcaacatcttgcgaggagagctggttattaccgctctgcagacgtcgtgccaaatcagacgatgatccaatcatcgacttgcaggatgcgaggaagcttgcttgagcagttgggtcggggtgataggcagctgtggctgcagccaagaagccttggcggatggtggtagcggcgcaagaattgatgctggaatctgccgagagaaggtgggcatccgcttggaggatgcggcgcatggcttggtggaaatcttttttttaaaccccaacgaggtgtatttgtattaaataagggggaaacactgtacaatagccaaaaggctaggacttacaaaggaaaaaaaaaggaagagagttgggggcgggggacgggggagcgtccactagaagaacgtgtggagaggcaaaaaaaaattaactacagattatttgttgtgctaccacggtcatctggcattaaagattgaatgctctctgccccgccagctcgccagagccagatttcctcagtcgcccgatcgatgattccgcatggtgttgtctcgatgctttgaaacactcggctattcctctccttccagatttcccaggagaccaggattaggagtgatttgactctccttcttttctcgacaccgagaggacagtgacgatgagccgcgcggttccacggccacgacgagccgtctccatcactgccatcgccgtatgagtcttcaagcagcccgacgagcctgcggacgagtgcatggcggcggcgggatacggcgagccaggcgcggacgaggcggtcggcgtcggggtggccagcggtgagagctccgcactcgagcgccatgtagaggccttcgttgagggcgaagtcgtcgtcgtcgtccccgagtaatctcctcctcttcttcatgcccatgtccgccgggaccgcggtggcggcgacgaggaggtcggcgccggcgacgaacaggtagcgcacggcctaccactccctcaagtcggggaacaagcggacgaggaaggccttcatgccgtcgagcggccgcgccgcaagctcctgcgtggtcgcctggggatcgggcatcgcggaggaggagggggtgagagtgttgatgacgatgttggagaccaacccgaggaggcctaagcagaggcggcggcggcgtggtggtggctgatccgctggaacgcctttgggtagaaggcctcgatcttgcgcagcaaatgcgatttgcaagcagatttttcatcgggcgacgggtacccaccaacacagcatggctcgtatatccggagatccggcagcgagctggacgccagcgccatcgtccgccggcggcgtccagcgagaggggcggcggcggcggcgagtggaaaccggatagaagacgagtatttaccgactacgccgcgcggctctgatttttatttttactagcaaaagtgcccgtgcgttgcaccgggtgattacggagtgtgtatattgaccaaaattgttgtttggtttagcaaaagtgcccgtgcgttgcactgggaagcgcacagatcagtaaaaatatgcaaattaattaaaacacaaattcactgaaatatttggtatttttaagtaggtatgtgtataattaaataaatttacaagtaaagcaagtgcgagaaataaaatgacattgttaaatttaattttattaaactctccatgattagttacgctatttggaattttcagaacttaattgctaattttaataatacaaatattatttaataattatttaattggaaaaagaaagaaaatccttccttttaggtttgcttagaaataaacacatttaataactataattgtaaatgcttctgaaaaaattaagcactaaaaatgaacttctctgtttttttttcggcctgagggacctaatatagacttatttccggcccgagggacccaaaatagacttatttccgtcccttccggtcggcccacggccttatcaaaaccctaaccctccacacccctccccccccccccccccccaactcattctcctccctctcccaccgcgagtcggcgagcggcggcggcggcggcggtagcgaccggcgatctcgcggccgaggcgaggcggcggcatacctgccctaccgcgggcagcgactggtggcgggggaggcgggcgactggggggagggggagaggc

SEQ ID NO: 23305 - DNA, 6669 bp, Oryza sativa
gctccctctccccctctccttcccgtctcgtcggcttggcgcagcgacggcggggtgcggcggagacggcggcgacggccgtccctccccctctctctctctccccgtcggcctcgacggcgacggcgccctcccaacggctgcgatggggtcggcttcatccgcgtgcggatccggcagcggcggctccctccggcggcggtggtggcgtcggcggccgcccttttttttttttttggcaattttttccatggctattgctaaccgaataggattgtgcatggacaaaagatggacgaaaattagatgttacaaccgcaaaaatacgaatatttatattagttatatagattatagatttttagttttagaaacttgggctcggcctgctttggaaattaagaagtccaaccacgatccgaaccaccaaatttttttaaggaaaacatgcaatttaactcccagttgatcttttgtttataataatatctcaaatagatgtgcacgcctgaagtttctctatgaagaacagaagataattcatgcaaatattttatcaatgcactaataatgctagtcagatttctatatatctgtataatagctagcatcatcgttttcaccttttcctaattgtagcttatgcgtagtgaatttccaatacatgaatctacaatctgcatagcaatatttacgtattcacagtcgttaaattttcgttaaattccaattttcgttaaattccgattaagcgtatgtataccaattaatcatttggtggtaccctctccgtcgaacatgtgcattcgtctcttcacaatactagcttaatttgtatccctctaccctatgtcgacccacaaagtattaaaaccaatgagaaatgactccgctgagagtattgacgccagtgccatcgtcgtccggcgaagtccagcgagaggggattcgattggatcggaagcaatttagcaaagcggcggcggcggcggcaatttttacttttgtttttcgtttcgaggaaggaaccaggaaaaacttgggttcggcctgctagtccaaccacgatctgaaccaacaaaatagggaaaaattctaatttgactcccttaaataggtcggtagaacgtagaggtcgagatgggggacaaggcttcagattttgacattaccaaaacttaataggttaacaaaacaaatattatattgctattcaaaccttaacaaaatttggtactttcagaaacttcctcttatacaaaccctaccgaattttaataaggttacaaactaaacgcatccaacactaccaaaatttggtaacaccaaaatgtgccaacttttggcggtgccaaattttggcaaggttgatattttgacaccaaaccaaacaagcttcaattagatgctatagatgaaatggatcattgggatccggtttgacgtcgaaaacgaggcggcgctcggctccaggcgatgccaaacagagcaaagtggcgtgggcgcagagctcggcgtggttcgggccgcatgatagccagcggagaacttggcggatcttgaagggtggcagaacgacgcccaaggatcgtgttccgccgggtcttgacagcaagattggctttggattgctggcggagtgtatgcacgttaggtgcttgatcgacgctccgccatggctccaggaaggagggagcgaagcaaggcatcaaggtgtggttgtggaggtgggtagtggcatgaaacggcggcggcggcgtgccgtggttggcgcccggctggtaaaggttggatcgaagttgggctatggtgagaggttatggatttgggccgtgcattcaggctcactggccggggcagacattgtgtcgaacaccttgtgggtatgaacagtgtagttttcgcattttccagaaaattttcagataattgattagatagaatggaagggtttttttagaactcatgaatggcagggtttactgcccaagacaatgtctcttggttgttgtcaatcggtacaccacagagcacagagaaatctgatgacaaaaggacgacaccccatataatgctgtttggaatatatttactgagcagcagataacttcaaactgatcaaaggagacactcgtatatgctgatggggataagatgtacggaaagacgatatatatccagcacacataattcaaccaaccaaacagaagatcaaaaaagagaagatttgggaaataccattgcaaagatacgtgagttgtaaaatatcatcgtacgtgagaatgacatatggggcctgtacccacatttcagtgacacatgatgtattttctaactctgtgatttttgtgatggtactaggcaaattagcccatcaaaaaattagctaaagtgtggcacaaaagtatgtcaaatgataacaatgttagtatagcatccaaatttttgaaggcaaacacacggttcagaacttcaaacgagcgagaaaaaggggggacaatttctcacaacaagtgaacttcgaaaacgatcaaaattccatgcactaaaggatagtaaatgatgagaaatttaacgatatgccactcaatagaagtggctttaacaaaatgccatcctctagaatgaccttataaaaataccactcaatagatgtggctctttaacataatgtcactttaggctgtttggaagcttttaatcagaaatgatgtgtgaaatgacaaaattacccctagttcctttctcacatgtccagagtagaggaggggccgatgtctgtggggactccttccccggtggcaacaatggtttgcgtgggcggcaacgctgtagtgggggcgaccacgacgccctctccacaagcgccaaggccacctccgaccacctcgctgcatctggttgcggcgacgtccatggccactccctcttcttcttcgctccaccctcgcttctacctctccgccatcgacgaggaccgtccctggtaccaggccgacaacgatgcggcggggctcgaggagctcctcaccgcatgcccctcctcgctaacgggcccacgctgtggtaccagctcgacgacgacgtggcagggctcagggagctcctcgccgcgtgcccctccctcgccgacgagcccgcgccatggtactccttggctcgcggcacggaaccgctaaccccgctcatggtcgccaccgcgtacggctcagtggcttgcctcgacgtgctcctctcgccgccctacctcgtggaccccaaccgcgcctcggcctcatcgctctccaccccactccacctcgccgccgcgggaggggctacctctacccccacatcggtttcccgcctcctcgccgctggcaccgacaatgacaacgacgaggtcgaagagcgacaaggtgaggaaggtgaggaagaggcatttcggtcatttcacgagcgtagtctggaaaaaaaatataaaaaaaagcatcaaaacagcccaaaagtggcattctattaaagagccacctctatggagtggcatttttataaggtcgttctatatgatggcattttgttaaagccacctctattgagtggcttattgttaaatttcttgtaaatgattagggagagctcgaaatctgcaaaaattatcggataattcgggtgaatttgagaggggcagtgtggatttacaaatgatccgatttgaagagctacttgttttttttttctcctttggatttatgggctatttcagtttgttgctacttaaaccttaccaaattttggtatggcaataaactaaacacacttcaaccattactactttaccaaaatttgataattatagaagctttctctcttaaaactctaccaaattttgataaatgcatcaaagcaaacaaagcttatagtattatactatcaaaatttggtaatgctaaaatgtatataaatttgatattaccaatttagtatggttgatttgggaaataaagcgaacaagccctcgtgtgaccacctgtgtgcgctggagagatctggaccgtccgtttgatgctggccgttggatctgagccgtcggaggcctcgtggattaggatatcatcagtgttgttgtcttgtgggttggacagtagactgctgataagaccgggaatctggagtcagaaaacttttcgtccagaaatcaacactggatttttggctttgctctcactcgttgagcttcgttggatggttagtactacttcggtactaacgggttactttgatcttaaggtcttcttttttggcccaatcaatcactgaaaatagagttataaaaaataactaaaaattgctttcttcaatatcagtcctttaaaccacctcaaatactctttccttaaaagaaaaaactagtacttacaattgcaccacagtgtagtccaatttcaacatttcggggagtttctctcggctgacactatttcgtccgaaatttacatagattttctttattttttaatatagtcaagctattcaaatttgataaatatttgattgcttattgtaatattttgaaccgaatttttttaaagggaaataaaccgaaattttcaactctgaagggaggtgatgggatgcgcgacccttctctcatgcacatgggtggccctcactgcacgagctcaatttcagatgatcatgaggagctaagctcgatttctggcgttttcagcatgcctagctcaagaccatacaacgtccctcccctgcacgcgggggtaagattaacagcctcatttcttcgctaatgcttatgcttatcaactaatttttaaatttttaactttaaatttgatgttaattttgagttttttttatcgaagtttatttttcagtctttaattttaaatcgctaagaacacgtatgtaaaatttctattcacaaattatctttcatttataaatatgccgtttgtcttattccatcaataagccgaacaacgggggcctcaggctcaaagcaggtagctagaacacacgctgtactgtgcatttctgtaaatcatttttttttacgaaagaattttttccatcttttagctgaagtacctaaacaagtagagattccaatttcacccattaattacgacgagataaatacaaccatttatgatttatctacgtagataccatacgccctcttgaagcaaagcaatggcgtgaggcagcagcccgggtttgcttcctgaagcaatcctctctgccgtaaaccaggcgtctcaaatacacctgatcaaagaaaaacaacaagaacaacaaatcaggagagcccaaactccaatccggaagacgctagcgtgcgcggaaacatcgcgtgagacgccaagcttttgcctaattgcctcccaggggaggcatccaacgctgtccgtccattctcccctccgcgtttctgatgacgaactgactagcgacaatgatcgccctctgctacaggctacagcagcttaagcacggtgatcatcgaggacaccctagtaatcaatcagtcagccatacacggctaatcaatcagccaaagacataggacttgttttgtttgctaccatgccaaaatattaataatgccaaaccataggtaaatttgatagtgccaaatattttagcaatttatgtgtcttattggtatattttgatagcaaactaaacactagccaaactactattcaaaataccaacgatttagtgagaatttagactattcaccatcaaattcacgtgcctcaacttttttaccacccaatcggcatacccgctataatatgtcattaggactgttaattagtccatttggtaccactttcatgtttttttttactgtgtttctcatttcttaatttcatttgtatatttttttcaagatttgtggacgtttttgcccctgggcccacctgtcataaccaaagagagatatttctctctggatcgatcgatccctccagtctcatccgttcgccgccaaccccgccgcgccactcacctcagcttgccgcctcaccaccgagcgccgcccccaaacgccgcgccatcaccccgccgccgcatcatcacccaggcctggcgccgctgcccaggccaagcgcctcccccgtgcctggagccgccgccaggccgagcagctcccccgtgcagcgagcgcgtttagtaaatgacattgggcacaaacactatatattgattaaacaaggttagtttctcagttcagaagatttagtgaagcgaccaaggtggcaggtaaagctctcacatggtggaagcagtggtagagccagatgagctgcacgtctggaggcggcccagcatcggcgcctccccttccgcggggtggtggcacggcgctcgggggcggcgacctgggggcggcgctcggtggtggggcggcgggctgaggcgagtggcggcggcggcgagctgcggcggcattgggcggcggagtgggggtgctcggcggcggggttggcggtgcccggcggcgaggttggtgctcacggtgacgagactggagggatcgatcgatctagagagaaatatctctctttggttctgacgggtgggcctaggggcaaaaacgtcctcaaatcttgaaaaaatatgcaaatggaattaagaaatgagaaacacagtaaaaaa

SEQ ID NO: 23306 - DNA, 4178 bp, Oryza sativa
ataaaggggtatgcggattgggtggtaaaaaaagttaaggcacgcgaatttaatggtaaatagtctatattctcccgatttagtagaccacattttggcatcaaaccaaaatagaccctctcccagaatttgtaaatggctttgtggttcgtgatatcactgaacctgctgggtgaataaagtaaaaaaaaaaacccataaattggccttctgcaagatctcgtcgtcttgcccaaactatagccttcgatctttccatcaggaccgcatggggggagagcaggggcaagtatgaaatggagttcagattcagattctagaacagtctgaacatgcgacgacgacgatggcgatgtatctgaacaatctggtcctctccctctcctcccgggcgggcttccacgcggctgagtttcaggctcccaatctgcagctcctcccagaaccttactctgattgattggttcatcgtttccatggctccaatgaatgcaacgtgttgttcagattttctgaatcttgttctcaatccggagtacgtgctgtagcagcagcaatctgtccctgatctgagaattttagacactcgtagattcgctgatcaatcattccgttcccttcgagtggtctagattgagcttaatcatcctgctactcgaatcaaatcttcagcaagtgagagctagataattcagaagaaatcaacatattcttcgcgaaaaaaagaaataaccgatgaaaccacggtaattaggttcttcgaatcaccgggagagtaggaaaaaacgagctaaaatcccacataggaggaaacggttaaaaacggccactccgcgtctccgccgcgagactagctctcgccagtccacgtagcccaatccacaaccgccacgtgctccgacaatcccgcccgtccatcgccgcggccccggcctcatctcgaccactcgtttcctcccttcacaccagccacgtggcactctctcgagagctcccgcccgcctatataaacttgttcgcgctcggctcctcctcctcatcgacctccaccccacattgaataattatttttaataattttagttttttttttttggctttagatatattcccaatccccaacctcccaataatccgatctctcccagttctgttcggatcaaggctgtgtcgatcgcaaaaaagaaaaaaaaaacaatttccttttggggtggttcatctgttgatcacttctttgtttcccgcgttttgctggggattcgattttcgggttaagattttctacacgatggccttgaacttggctcaaaacgccgcggcggcagcgtgcttcgcgaccgccggtgatgcgcggcgagctgcttcggtggtcgccatgccgtcgtcgtcgtcgtcggccacgacgagcctgaagatgaagaagcaggcggcgtgcgagccggtggcgtgccgggcggtggccaggcacgtggcggcggcggcggcgagcagcaggaggaacggcgtgccggtgttcgtgatgatgccgctggacacggtgagcaagtgcgggagcgcgctgaaccggaggaaggcggtggcggcgagcctggcggcgctgaagagcgccggcgtggaggggatcatggtggacgtgtggtggggcatcgtggagagcgagggccccggccggtacaacttcgacggctacgtggagctcatggagatggcccgcaagaccggcctcaaggtccaggccgtcatgtccttccaccagtgcggcggcaacgtcggcgactccgtcaagtacgcatctctcgtctccttcctcgatcatctatctcatccttctcctctaacctcttcttgttgttggtgtggcgtgcagcatcccgctcccgaggtgggtggtggaggagatggagaaggacaacgacctcgcctacaccgaccaatggggacgccgcaacttcgagtacatctccctcggctgcgacgccatgcccgtcttcaagggccgcacgcccgtcgagtgctacaccgacttcatgcgcgccttccgcgaccacttcgcctccttcctcggcgacaccatcgtcgtaagtaggaggaaggactcttttgatatcgttgccgtttcgccggcggcgacgacgacgctgatcatccgtgcgtctccttgtgcaggaaatccaagtcggcatgggccccgccggcgagcttcggtacccgtcctacccggagagcaacggcacctggaggttccccggcatcggcgccttccaatgcaacgacagggtaactaatctccgacgagcaaaaactccatttgggtcgtcatggattcgagaaaaactcttatctggataaattttgacgtcctgtggtgcagtacatgcgtagcagcctgaaggcggcggcggaggcgaggggcaagccggagtggggccacggcgggccgacggacgccggcggctacaacaactggccggaagacacggtgttcttccgcggcgactgcggcgggtggagcaccgagtacggcgagttcttcctgtcgtggtattcgcagatgctgttggagcacggcgagcgcgtgctgtcgggcgcgacgtccgtgttcggcgacggcgccggcgccaagatttcggtcaaggtggccggcatccactggcattacggcacgcggtcgcacgcgccggagctcacggcggggtattacaacacgcggcaccgcgacggctacctcccgatcgcgcgcatgctggcgcgccacggcgccgtgctcaacttcacctgcgtggagatgcgcgaccacgagcagccgcaggaggcgcagtgcatgcccgaggcgctcgtcaggcaggtggccgccacggcgcgcgcggcgggggtcgggctcgccggggagaacgcgctgccgcggtacgacggcacggcgcacgaccaggtggtagccgccgccgccgaccgcgcggcggaggaccggatggtcgccttcacctacctccggatggggcccgacctcttccacccggacaactggcgccggttcgtcgccttcgtccgccgcatgtccgagtctggctcgccgcgggaggccgccgagagcgccgcgcacggcgtcgcgcaggccaccggctcgctcgtgcacgaggccgcggtcgcgctccggagctagcacggtcagacgctcatatacaccgtcgcctcgagtcggattccgatgtgggatcattcgatctcccttttttttttcttctttttgccattttgtacagccttttggggagctttggatttgtgctttttgtctcgggaggaaaaccgctctggaggtcgaagagagcgtcattttcctcccgttgaagatcacgaatcatttacgttagagatgatgtaattaagcagggaggggaggggaacacacacacactggcactcaaaagttgttgtcacgcttggggaatatatccatttccagccaaaaaaaaaacgcagaaatgcgttgtgttcttgcgctctggttcgttgctgctgtgggtcagattcagctggtgaaaaaactacagtactactgaaactgaaactactagagcctagagggagattaagctaagttaattgcacgagtaattactccacggttgtgtttagggtctacgtcggcagattttgctttctggtagatccctaaccttatgtttgttgggaattttataaaggagctaagtttgcctattgatttgcaatctacacatatctcttgtgtcacaaaacattggtgccttcacgtctttggtctcccctctaaaaacttgcctggcgaatttcacatgaacttcacacgaagtcgttcatttcttgcaagaagtagggaaaagaatcactgctacaaatggtgtgaagtaattcatttcttgcaagaaataggaaaatttccctgctccaaactaaagagtttacaagaagtagggaaaagaatcactgctacaaatggtgtgaagtaattcatttcttgcaagaaataggaaaatttccctgctccaaacgataagagtttacaagcgtcgaccttgagcggattactatctttggcatgctagtttgtggaaactgaaaggattctgcaacttacagtgtgggactccagtaatatgacgcagcaagttggcaaaatggcaataattcagtgatta

SEQ ID NO: 23307 - DNA, 10044 bp, Oryza sativa
atgaatatccatagataagatgcctggtttgtttgtcttgtgaagtggatgactggagatctgggtatatctctcaattgcatcaattgatgccaaagttggaggaacctgtgagaaaatgtagagaactgttatctcatttcaaaagtaaggtgtaaagatggcaacaaacactgagaaataatgtcctggcgagatgagctagcattcttgagataatcttaactattggataaaaacattaatgcatgttttagaccttgtttgtagcataactatgaatacagatatgtacctgtcgtttcttacgatgcgcagagagcatggtattacactctgttagttcatcaatcatcacagggttgataccaggacgaatcttcttcccgtctggtccaacttcatcttcaaatgctgaatccaacaatgcagaactatgagaaggctgaaattatatgtagaaatttacttcaacaacttcaaacagtcagaaagtaggtacctcttttcccgttggagacaacagctgtaggtgcagctcctgccatcgatgcaggaatctgtctctcagcttgagccaaaagtgctctggcttcatctcgttctttctttaatctagctataacacggcaggcagcatcatgctggaaaagggacataaaacaactaaacagatcagattacaggataatgaatgttcttaaaagcaaaagtgttaactaaaagagcatttcattaaaacggtattcagcatttaacccataatagagctgtttaatcaagcgctgaaaaaaaaatgtagctgtaaagacaagcaatgccttaacaaagcttggtacttcagaccttttcctcaataacttacaagtagttttttaacatatcaacttgcagtaataatacttcattggccctgtttggatccaagggatattttttagccctccctccaatagcccaaatagcccaaaaagatccaaaagggtgagctatttgagggctatttggaaataacccacccaaaaaaaactatcccacccaaggggtgctaattggggctatttcgggtgggggcccactgaaaaagtgtcttctctctatctctctccatgggaagctacattaaaggccaaatagctctcaaaataaccctttgatccaaacaacttagggctattttattggagggctatttccttgtgctaaaaaatagctctcaaaataacttttggctagttctccaaacagggctattgttttcaagctcaaaccagactgcctagagcaaaaaaacaacctaaatatcaccagttatatggtatgcacaagaacccagaacagcatcacacatttctagactggtcagtgaatgattgattttataagcattttttcttcagcttatgaaaatataaattgcagtacaactcgaacaggagcaggaacaaggatagatatttaacagtcaacttaacaatgcccgtacaaaactagtggtcatttgcagattagcgaactttagttagatgggtaaacagatcagggctaacattgttgcccacttcaccacaggattagtgccaggaaataagccaacaactataccttgtacatatgcacaacaagaagcatagaaggaaaaataatctgtaaatcatcattagccatcttcggtactataagtgaaaaggcacaagcaccagcaggataaaaaaaagacaaatgtcaaatacaaaaaaagaagaagaagaaagacgatactccctccgtcccaaaatataaggttttctagagcttttgagggagattaagaaagtaggtggaatttaatgaggtatggctgtaattagtggatatgaggaagtatgtggagatattaaatgagagatggttgtgtgattggttgagatgaaggaataggtgaagttgctatattttggatggagggggtagtttatcaagagtcaaaagagtgactcaagattgggaatcaacagtgctgattacagggataaattcatctagaatcaagagtcaagtagcatttctaaataaaaattcgaatttttattatgtaaggacgttcaacatcctactgcatctgctctaaccatacacaaatacaaaatggccaccagagttcctaaaagagagcactgttccatagcaatctaacatgccccaacaatagacctatggaaaagctcaaaatcctctgagcagatccttcatcagctaaagctgctagcatatgtagaactataataacattcatagtttgtcaaaagaaaagggaagattttgtacttaacatgatacaatatgtaatagaaattctgcataggtaaaagacatacctgatatagcgcatgactaagttcttgtcttgctgtatgaagctgctgctccaaagcaaaactagaaagcatgatagcatcccactcctgtaaaagccatggtattgttctagtgagagctagggtgaatcatgatgggttctcacaagacatttttagttccatgattatttgtggcaaaatcaaggcactgtactatattactcttcctaatagttacatgagatcatttaaactgagggcgatgcaaattttaggaaacaaagaccagaaatttaactctaccacagaatctctgaatctgctttaaacataaccaatgagcaggcagtttgccaagctccaattatgaagattagtttactccctctagtaacctgactatgcttggaaacagcgcattaagttctgtcaaactggctggtgtgcaatggagaaagacgcttaacactgaatcattcccaattattatgcaacgtgtttatctttaattcaaacatcagataaaaagtactttcaggtacagttttaaattaacaaactatacatttaataaacaaaacaatgtgagaactattatcaaagaaaaagaatcagatcttcactgtctataacacagataactatgaagttagtggaaccacttacattttggaacatccccaggagtccgggaatgcttgcagcctgcaattgtctgggcttcacaacctgcaaatagtataacatgattgaggccttgaggattatgcaagtttttcagctaaaaggtatagcaccatcagttacttgtacaaaacataggtaaatccacgccacacgctgctgaagcctgccactccacaataattttctcagcattccagcgaagccttaccttgttggtcttcaccgccacgatgtcgtccatggtgagctcctccttggtgactgggcacttcccatggtcctgcgccatggccacgaccatgaccaccacaagaaacatcagctcaaagcacgacacacaaatgcgacgcgagatctaaacccacggaagctataataaccctaaccgacctcgatgtagcgctcgacgagccgccgctcgaagagaagcccggacttcttcgacaccaccggctcatccggcacctcgccggagacttcacaacaggcggaggccacaaatcagcgcacgcacggagagaacagctagggtttcggagagacagtgagagaagcttacttgcgcagatcatggctgcggcggcggcggcgacggagagtggaggaggggattagcgcgcgcgcgcgcaccgaggctgctcctcccaggcagctctctctctctccggcagtggtggtggcggcggcgccggcggcggcgggggggagcggagcaggtttagccggctagggttttaatccgaagcgggggcgaaaatctcgtcgcttgtgcggctcctccttccgccgtggtccactcgcggtgcctgaaatcggtcgcgcaagttgaaccgtttccattgggtgattgggctttaactgcgtgggccggctaagtttggtgggccgcattttgggtcctggaaaatacttcgtgggctatagatgttgtaggcttgtgaaatatctggccgaacacggctacgtaggcggtacctacgataccgtttctcagcttctcccctcctctaccccacgcacggttctcaatttgctaaagacagttgattttcagcgctttgatgtgaaaattaatttttaatatatatattttcactacaatcaagctaggggtaaaaaaaataaatgaaataccaaggcttatcagtttttatcatgaaacaaacaaataaaactcacactttaattgataagtttatgttaaatatcataagaatgattgataggtttgtaaaaatattgtggaaatgatgtgaggggtgatgattggatttatactatacataatgatttgtagaattaaatagattgtagatgatgttgcatgcttgaatgagattgagtatgtaattattgctagtgggtgataatgtggcatggttgcatattaagcattagagttagtgggttgtaactttatagagagtatagattgtgttttttcaaaaaaaaatctatggaaaaattattaaaatactaatacttagttaattatgtactaatgagtcacatcgttttatatatgagagggattagttttcatcccaaactaccgaacacagccaaaaatcttcaaggagtatcatcgtacaggcttgaagggaatcctatcttactataaagttatcccccactaactccataaccttaacatgcaaagatgccacatcatcatctactaattaacaagatgccacatcatcatccactaacaatcatcacatttaaacatcatgcaaatatgctatatctttatagtttttataatttaagagcttttcaaatacaaaaatgttaaattatcatccaacataattcacataatgtttcaatgtatatatttattatgttttatgatataggtatatagttcatcctcacttagtgcttaaatgattaatctatggtcaaattatcttctccttttttcctctaattaagtcatatcacatcaattgtttttagcctttagataattaatctactgtccaaactatctccatatttttcttcttccataaagtcataccaccttactttttacgtttgaatcaccattctacatactatttaaatttaaattatcataaaccacattaattcacttaatctgatgttatatagctattttacacgttattttttttattgttatcatactaaattctcgcagaaatgcacggagtttcacctagtgatggtaataaacgggacaccatgcatctcgcctccctgcatctcgccctgtcgatgtgcatcgacacctcacagcatgacccacccctaaaggcacaaagtcgcaactgatcctgtgcatccatgttgacatgtacacggcccctctctcacagctgaaacctgaaccgcatcgccatcctgatatctaggcttcacgagatgtagtgccttttggagctaaagtccaaccaaacagtttcagctctatataaagcggagctagatggaacattctcaataaaacaaaacgagatgtgaaactggatttaagctgctctatgaatttactctgtacccaaccatttaagctaaattttagagttgaaactttatcaaatagacccgtagtgctccgtatgggcctgtttagcaggggtggagctggagctcagccaaacagtttcagcttccctaggtggagctctctcacaaaatgaactagagttgttgagctgggtttaggcagctccacaactccactccagacccaactcctagagctaaatttaagagttgaagctgtaccaaacaggtccacatattttccgctcgattttgctatatctcacacgaaagattttttcttatctctcactcgattttctcactcaaatttacagtgcattttcttgtaagttacagtgtaatttatgaaacttacactgtaacttttgtaagttacactgtaatttttgaatcttcgcatgtaaattttaaattttgtattggatttggtctttttcttgaggatatggtaatttagtgtccattatggtgtttcttaattgctttttgctttttattatatctatcagattttaatctaaagattaaaaatctgtgtgatacgattataaaaatatttcgaaagatgcataggtactcccttttccgctcccgcctacgcacgctcgcgcgggccggcgcacggccttgagccgacatgagtacacgatcgggccgtgccatatatatggccccggcccccatccggccgtgcgcgtgtgcgcgcgcgcgattccaccatgttttgcgcgagaaaaacacaccgcatcaacagctcgcgcgcacacacggctccggaaaaaattttggtggagaccggatgcaagccccttcttctgcagccctgctctggattattgacgcgtggatgatgtatcgatcggactatcggacggggcgctccgctcggctccaggctcacccgagcccgatctatgcgcgtgcggctgatggagctcgaggctcgatccgtcccatcccggcttgatctgggcccgcgcggcttgatcttgtcaccgccacgaccatcggaggatggcggctgctcggggttcttgatctggatgaggtaggacgccttcgaatccacgttcatggcctcccgcggctcgatggcggcgacagcggcgtcggcatcatcgtgacaacgggccggcgaggggagctcgagcttgtagatggatgtgcacgcggtggccgtaccaccgtactcgccgctagcctgtgctgtgtgcggtgtgtcgtcgtgttgttctgaaaatcaaaattcaaaacaacgatgtcagactacatcatagcatcggcatgcacatctgacactgacaccaatcaatttatgattttgagccacaatttggtttacatcaattatcttcgaatgtggtgacgagctcgacgtatccccactccccagtagggccggcagcagtcgcgcaggctcatcttcatcttccccaatccccatcaagaattcaagaacagccggagcagcggctgctcctcgatcgatgttcacctcctgcaatcaacgacagcagcagcttcgaaaatgtccaaaacatctgtaattctccatctttcccttggccagtaatacgagacaacctccttcccatgtccaccttcgcggccgtcatggcttcttgtgtccattgacccattcttgccatagtccggcgcatgcttctcctcgacgccgccgacggtgacaagctgcacatctaacgctacttggtagagcagcggtggtagcctggtaggcggtggcaacccggggtggaggcagaaagcgacaacgactccctcaatatggaggttgaacgaggattgacggcgaacgggcaggcggcgtcctcctgctcatgagccgctcacgctcagatcgagccgggacggatcaagcgccatcagccgcatgcgcatagatcgggctcgggtgagcctggagccgagcggagcgccccgtccgatcaatacatcatccacgcgtcaataatccagagctgggctgtagaagacggggcttgcatccggtctccacaaattatccttagctacccggcctctctacgtggaagaaatccgggaatcgcgcgcgaggatgatcgacgtagcggtgtgtgccggtgttgcggcaaagcggcgacagtcagatcccccggtttggcctatgcacattccatagctagtggtaaagctaacactactcctgcactttcgatctcagacaccatactttcgatcgccttctatacgtttcggcaggcgacagcaaacacaggttcgacgtatgccttactgcattaaacatgctactatacgcaatggtaaaaagctagtgtagtcggcagctggcccacggcgatttggcctattgacgaacggatacaagattcctatcagaggtatatatgtatctacctagctacttgcaaaagggtactagctagcgtgcatggcgttgtgaagaacgttgtgaagaatcacgattgatggatgtgtgttgtgcacgggccgtgcaatgcatggctagctatggcaaagctaagctaagctaagctggaagataagccctcatgggggtgacaagagggggaggaagctgcttttgggggactgatgggcattagttctgtctggtaggctaaggtatagctttatctgttcgatctcatggactaatgtaatatcctttgggtgctaattgttgttgtgttgctgacaggattgatttttaatcttggacattacacgccgccatcgcatccatctcgcgcgtacgtggttcctttgatccttaatcctttcctcacttgcaggtgtgtacagtacacctgcaattaatggtttaatttgttcctagtgtgaagaaatggattagcttaatttgagatcgtacagttgattcacgcttccttcgatccgggttatgatctctaacacacatatgcttgtaatataactcattattgcttgaaaatataactcattagtgtgttgaactcatgtatattatgcagtgcaggtctcctacaccatatagcatggtactctcctactcatggctaaatttagctggagatgcttggctaggtagacaaaagggccgaggcttttctacccaggatcccaacaaatatatctccccgagatcgccagtaatctcacggcggtgaccgcacgaaacgcccgcccggccggatgccgcaacgatgcattcgcatctcagctactcgatcgtctactctgcccggccgcggctacctagcttagctagcttaattagctaccgatccgagagacgacgtacgagtagggagcgcgtgcggcggcttatgcctagtactacactactggtatcgcgtaggagtattcgcgtaggtgatcgacgtgacgagacgcgggcggccgaccggattcccccactggagcagcggcatgtcgatcgatcgtcgtgggcgctggatcatatcgctcgcgctcatcgatcggcacgcacggttagactctgctatatgtacgtgagccggtgatggtgaaaacggtggtgaatcggggggctccgctcggtacataccatttggtgattagattatgcatcgatctctctctctctctctcgatcgatcgaattctcgatggattgacacctgcctaatcagcacgttgatctagttctttggcagattttgcaccgccttaggtgtcgaacactaatgcatagtactctgatatttatgatactagtactctataataaaactggctatatgtaatggtattaggtagtatacaactttccacaattttttgaaaaaatactttcaaatatctatactctttactacttaaaatgttataatagtgggtgtcctttcccacatcatcactaccattgatatgtgggtcccctaatctgtactattacaccatctttatgagtcatctcctattttactattggatctcctcaaatttcaaaatcacctacttgttaataagaaaaatcatcatattacttggtaaataaatgctaattaattgatctaatgaggtagaaactgattttgttttccattgtaacgcacaagcctctaagctagcaactataggtggtgtttggatttagggactaaaactttagtccctgtcacatcggatatttggacactaatttagagtattaaacatatactacttacaaaactaattacataaatgagaactaattcgcgtgacaattttttaagcctaaataatccataattagcacatgtttactatagcatcacataggctaatcatggattaattatgctcaatagattcgtctcgtgaattagttcagggttatgaaataggttttgcatagtctacgtttaatactcctaattagtgtctaaacatccgatgtgacatggactaaaatttttagtcccatccaaacagccccatagtatgagcaattggatagagtgactttctcaaattacag

SEQ ID NO: 23308 - DNA, 12122 bp, Oryza sativa
gcaatattgaaagaagagtccatataggaacgcaatacaagattaatcaaaattcagaataaaaataaaataaaatccgaaattagcaaaagaaaaaagagagtctaagtaggaatataatctaaaaatagctgaaattcggaattaaaaataaggaatattgaaagaagagtccatataggaacccaatacgagattaatcaaaattcggaataaaaataaaataaaatcggaaattagccaaaaaaaaagagtccaagtaggattacaatttaaaaatagcagaaattcggaattaaaaataagaaatattgaaagaagagtcatataagaatccaatacgagattaattaaatttcggaataaaaaataaaaaaaatcaaaattagaaaaaggaaaagaaaagaagagttcaagtaggaatataatttaaaattaactaaaattcagaattaaatataagcaatattaaaatataagcagagtagtggcagttgatgggacatctaaaaactattaataaaacaccaaatacaatcctaatgatgactaaaaagaagtacaacgggcaggtcgtgaagcaatcggtcaaggtaggtggcaggacttctagaaagtaaaaaaataaacccaatgataatcatattagatttttaaaatctcaataataataaaatgagaggcagcggccgggtcgtataggagtacaatggcaaagtcgccgatggttggtgggtcttctataaagtaaaaaaaatgaattccaatgatagttatgtttgacttttacaatcctaataaagagtatgcggcggacgggtcatagaggagtatagtggtaacgtttgatgggatttctaaaaattataaaataaaaatgaaacccaacaagataataaactccaatttttaaaggttcgggcttctaaaaagtaaaaaaaataaaccccaatgataatcctgtttgattttaaaatctcaatgacaataaagaagggcggcagcgggtgagccgtagagtagtatagtgacaaagtcgctgacgttttggagaaacttctagaaagtaaaaaaataaacctaaaggataattatgttcgatttttaaaatagcaatgacaataaagagaagatgcaatggacgaacatagatgagtataatgatagtgtttgacgggacttctagaaattataaaaaagatgcccaataggacaataaactctaaaacatataaagattctaaggagaatgaatagaaaacggtggtagatcgagcaagcaaataaagaataatatgacagaagtaaggggtagcagttgttgtgactttagaaactaaggaaattagaaacacgaggataataaggtttagtctttaaaaatcttaagacaacgagataactatttaataaatttgaagtaaaatcatattaaaaatatataattttatatgggtgctagccgcgcaattgcgcgagccacccagctagtttatttttaaacaaagaaattcagaaattattggtggccaaagttttaaaattaagtttgattaaatcctattttaaacgttaaatatttataacttttagagggagtacgtcctagcgtcctactaagctcaagctgctagctatgacgtaaaaacacttctgtttaattatagtgctatagagtgataacataaccacacatcaacggtcggatttcagacttctggcaaaggaattatacgcagctagtacaactaaacagttccaatttcaggccaattgctgctggaactgtttgaggcctagtgcctagcttttatgttttgttattcgaaacctatattgcgagcttaaatactcagactatgtatctttggggctgcgtatatcctgctgcaggatgtataggtcgggttttaatccattattaaaaaaaattagttatattcattcgtcagcaagaacaacacattcagccgttgcagagtgtacatatctgcttagtgacatgatgacatttatctagcctttccttacgatcttatctactcataattaacaaatttctaggtcgtagtagtgagcatctcaggaaagcgaaaaaaggaaaaccactaagccctaaagctaaatctagctacgagatcaaagtgacattagatgatgagctgatgactcaccgacctgatcggctgattcacagatctcacaaaaggacgacggatggccggcagctttaggattaggaaagtatagttaaaaagcacaagtcaaattatccgagtcacttggcgatcagcttcgagcatggcgatcagattcgagcatgacatctttcttaagctcatcagattcacagaagctgccaccttaacagcaacatttatatctgatcagatagcaccacatgactacaacaacaaacaatagcaatggtgctagttaatcctatgggatttgtatgggtttttttttaccaatttacttatgcattatgcaggatctgtatgcattctatgttctaaacagatcattaaagtttgctaaagcatttatctggcatgtcatatatgatttcactttttttgaatctctcattttcctctgagcctgttggacggaccgagattggtgcagtccttactataagccctatcattttgcttattcgacgatatatttacaaacaaaaaatagtttgtgaataattttttattgtatatgttcttaacaatttaaaagcaaaggctaaaaaataaactatgataaaaaatcataaaaataaactttaaatttaaggttaaaattttaaattttggttgataagcataagcataagtgaaaagatgaacccatataactacaactttagcagttgcaccgcaactgatggatcaaaaaccaacggcttagatcataaaaaaaatattgttcatgaattactgtagcaaatctacaacggtgttgctataattatgtcaacacattttgtgagtaatcacagtcgatttcttgttcaattgatctcccttgagattcgtgctacaattgcaataccatgtgcattgaacgtctttacatatttcgtgttgcatcgtgaagccaatcaatttaaatttctcatctcgtcagcatgtgttttcatgaaaaaactactacatatataatttcaggacttagatatgtaattttagaacttacattataaatatactaaaattacatatgtaatttagagacttacatatataattttagaatttacattgtaaatacactaaaattacatatgtaatttagggacttacaatgtaaatacatgctgactattttttggtgaaaaatatggcgacataaatataaatatagttactcccaatctacaatgtaccgattactgtagcatcgatggtgcggcatgatggcagagcaaatccgagccgttggttccatcgatccaacagttattatgtgctccttgcagtcattactactacagcaccgatctcagttcctctcgacactgatggatcattcacatagccaaagccactttagggctaagtactgttcctagtaatctaggcccaattaaaactctaacattagcagtaaatgggccgcatattgagccgaaagcccaaagcccaaaggcccacatgcctctcgccttataagtagccgaggcagtgaagccctagccgggtcctcgtctcctcgcgccgccgccgccgccgcggacgccgccatgtcgaagcgaggtacgtgcgagccacctctctccccacctccgctccgtctccttcctccgccgctgcttctgcgtcgctgatctggtcttcgcgcgtgtcggaaatggtggcgcagggaggggtgggtcggcggggaacaagttccggatgtcgctgggtctgccggtggcggcgacggtgaactgcgccgacaacaccggcgccaagaacctctacatcatctccgtgaagggcatcaaggggaggctcaaccggctgccgtcggcctgcgtcggcgacatggtcatggccaccgtcaagaaggggaagcccgacctccggaagaaggtcatgcccgccgtcatcgtccgccagcgcaagccgtggcgccgcaaggacggcgtctacatgtacttcgaaggtacgcggaagctgcacccaatttcgcccatgccgatctgtgaaatcgtgatgctctctagtgtcttgatgattagtgttgcattatgacgtgttatgagctgcgttaagtttggtttctaagtattttagtgtgatcttttagtccacctgcataaattagtgtcaatttcattatgggttacacgatttaccatattgagaatgctgatcagttgtggctgctacgattggagcaatgctctatttttttatgcttacgtcattacgtgattaagttacacattcttatgagctacagtgagcttgttttgggggctaggctttaggttgattttacttgaactatcatcaaatctaccagaaaacaccaaatatgttagcaggttttttttagtttggtgaattatttttaagcaaaaatttatgtgtttgcttattgtgagtttgtaacatggcataaaagagggtacaaatattcttctatattttactgtcttcactaggaagatgttttagatggggccttttggttgggaacatgatctttattgcctgacatggtgctggtcctacttttaataactatggtgttctcaaaatatttttcaactggaagatggctggcattacttatctgattgcgctgtataggccaattgctgaattttgttcgttggagcttgttctgttattttatttgcactgccgtaggaaatacacagtgacgggaggactgcaaggttcttcagctttttctggagcaaacttatatacatgtttgcatattcctaagtaaacgtcacaaacaaagcattgttggatgtagaggttttcttataaagattttatcttcataagagttcctccatctggaagcggtcacatattccattgccctaggtagtggcatcgccgctatgaaactttgggactggccatgtgacatatatttttgtcttctgatgccataaatataatacattagcttttattcattctacatgttttgtgtgcttttattctttggtctcttttacattttgagcagcatttcatttgtacactattcccttggctattttgtcattggttttatcatttggagctgccatgtggtctatcgaattaataccggttatgaaatttgatgtgcagacaatgctggggtgattgtgaatcccaagggtgagatgaaaggtatggcgagaacactactatactcccatatgttatgtgttattgtattttctctcgaagcctaccaggcaataatttactcactgtgtattcttttccaggttctgctatcactggacccattggtaaggagtgcgccgacctctggccaaggattgctagcgcagcaaatgccattgtctagagcttgtttggagtagtagttttcagttctgtgccggatgtgataatgtgctccagttcttttttgtttccaaccaagtttaacctgaacttgaagcaaaccttcagttaaattttcagtgcggattgtgtccttgatgaatggaaaatggcatgtttgcttgtttaccttgctccttttaatcagttcacagtcagcaaccagatcgtattctggagaaactagctgaatgaacatcaatctcacctttctgccacctgaagctgcctgaagatttaggctttgttctatgcttccctacctaatctctactcgctcattttcaatgtgccgctgcacaacctctgcgatcagcgacggcccatttgactcctttctatgtacgttctgacgttatgtgatgttctaggatgatttcctctggggttaattggattcatgccactacaaatatgctaaattagaaaaatagcactactatttgtgatatcggttgggtgccactagaatttggagaaattagaaccgtgttactccgttggttttccatccactcctcgttaatttcccaacttcagtgcttggcctcgatgcggcagcgaaggaacttcggtgcttggcctcgatgcggtagcgaaggagctcggtggcagggaaagcgatgacagccttcaagcatgacagtgacaatgacgtttcccaactctggcggcgagcggagcttcggcgacgagcgactagagcggcggtaacttgggtacgcggggaaggcggcgctcggccttgatgtggcgaaggagctcggcggcaggaaaagcagcgacggccttctccgctctcaaggggcacgatggcgaagcacgccgagagggcgaagcggcggcgacgggccatggctgtgcgcggcaagagggcgaggtgatggcgaagggtctctaggggcacaatggcaaagcacgccaagagggcgaggcagcggcaacgggccatggctgtacgcgggcggcgagaggtcaaggtgacggcggcgggtctcaagggggatgatggcgaagcatgccgagagggcgaagcggcggcgacgggccatggttgtgcgcgggcggcgagagggtgaggtgatggcggcgggttgtgactctgtgtcggaggggagaaggagaggcggcggcggactgtggctgtgagtgggtggcgagagggcgaggtgatggcagcgggccgaggctatgtgtaggcggggagagcgtaaggctgcgccggttagtggggcgagggcaaggcggctcggttgtgcagggaaggcggtgctcggcctcgatgcgcgatggtgatggtggggagtttcgacgatggtggaggagatggcagcactcggcacaaacgaaagatggtggcgccaatggggagtagataacgcgacggagtggcatggatccaatttccccaaattttagcggtactagtcgatatcacgaatagtagcgatatttttctaatttggcatatttgtaatggtgaatagtagcgatatttttctaatttggcatatttgtaatggtatggatacaattaacccttttcctgtagcatagtaagagcatcactaacagtccttatattgttcccaaaactgatttttatgtttttaaaactgatttttatgtttttaggtgaaaaatcggatccaacataaccccacacacgttttagagttccttcaccatactgattgtaagggttttaaagtgaaaaatcggatccaacacacgtttcagagttcccttcaccgtactgattgtaagggttttaaagtgaaaaatcggatccaacagatcatctacacacggatataacagaaccctgtttcttccaaaactgattttaatggttttaggtgaaaaatcggatccaacatatccccacacacgttttagagttcctttaacttactgattttaatggtttttaagtgaaaaaatggattcagcagatcccctacacacggatctaacatatctcagtttcttcgtgatctattcttataaaatttaggttttctatgagagagatcagtttttttttctattttcagtttagaaaaccaaaaacaaaattttctattttcaatttagaaaaaaaaattgggagaagattattcgtaatgtcttgatgatgctctaagttcctcttgcgtaattttccaatattctcaatggatgtgcattgttacgacgataaatggtaataactgttaaaatttctgccaacaggattttcaaaagattcagcctttggtaaggaatttcttttttttatctgattctttttttagatagtcgtgtttttagatgccacagatttcattggtccctcacttgtatttcctaatgaagtaatgatatatctggagaacttttgggtcatttttttattttttatttgtgatctttttgggaccttaattagttgattgtttgaatcaggcattctgtgtaaacaaggtttgcataacagttttattcggtgtgcttctacttagcttaattttattcagccgcttatattttgactgaatagattaggtttcttgttcccaattacacgacatgtagaaattactttgacacgcaaaaggtttgcgcgttcgcgaaaaaagacatatagaaattacttcatccgtattcaaatatatgatgttgttaactttatttagtttgttttcagaaaagaaaaagaactttattcagtcaaacttttgaaagcttgatcattaatagctctcataatatttagtttgaaaaataccgtatgtgtagatttttctttactggagcatttacaataatacagttttgttagatagttttgttgtattctaatttaaaaaaaagtactgctcagacttgaacactagagaaggaataaagtcaatagtataatatattcatatagaggtattataccgtcaaacatttgcaaatatatccttttcctttacaccctcagattgctaaaggcctaaatctatattgattttccctgctccaattttctcaaccgtttccaggaccacctcaaaacatactaggcatttcaaaatgccttctaacatcgttaagtacacacgacatttgtatctatacaaattatgcaaattaactctatctatttcattcacctgcaagaatgacaaacaagtgaaaagcagattgatatgacaacagaccgaccctacagcaactccagctgatcaacatacatcaaatttctacaaaattattcagaggtttgaagtaaaggaccggttaaatctgcacaaaatagggtggaaaaaaaaagaaaaagcaattcgagagagtttctcagtgctgtgtcgtatgagtttatatccaggattccactgtgtgattgtacatgtatgagctcatcccgctgatatgcgctagagcgtcagaatcaagcatgtcttctcccttcacgccgccctgcaaattcaagacaaaaaaaaaaggacaaaaagtcctcaaatcattgccaaatttcacttcgtaaatataatcccaagtttcaaaccgataatatcactttgttttaaagatttttttgagggcgttcttggcatttgaatgcttacaatttgttcatactcttcgtgattctgcgagccgatcgacctggatgcctcgcagtagtcgtcgttcttggcgaacctaccacggacgcgaggccggctatccgcgagggtttttctgcaagcgtactgcagattttttttttaaaaaaaaaatctgagatgtcagtaacgtggtcggcggtgaggtgaaattcgtttgaaatatgggttgggggggggggtgatattttgaatttgaatttgaataatttggaagttcttgcctcaccttgatcttcttgctgaaattcctctcgttcctcttcttgatgtacctgtggatcttttccttcctctcctcgttggagaggcggacggtcttgaagctcgtgtcctccaagctcgtcgtctccgtcgtccccgtcgccggcagccgcgctgggctactcccgcctccgcccatctgtggcaccacgaccaccatggtgaaacggtcatggcgtcatgctgcgcgtgcgcgagaggttcttgcatggcggcaatgtcctacctgcaactctgcggcggcggcgttgccgaaggccatgtcggcgccgtcggcggcgtgggtggcgccgagaagcgcgccgccgcattccatcatccgctggtactcgccgatctcgtccattcccatcatcgacatcaccatgcttccgccgccgccgccggccgcggcgaagaaggcggcctgcgccgcgtgcgcgtccttgctgaagaacgcctcgccggcggcggcggcggcggcggggagcatcgcgccggaatgctgctgctgcgggcagagcgggtcgtccaggcccatgtaccctcccgccccagctccggctccagcggccaacgccgccgcgaagacctcgtcggtgaacccggcgtactgcatcagctcggtggcggtgctgctcagctgcgcctgcagcgccgggtgctccgccgccgcgccgcccatcaccgggagaggcatctgggtgaattgctgctgctgctgatgctccggtggtggtggtggctgcgtctcgtcgacggcggagaacgcgtagtcgtcgatggggaggaggagctcgccgtcggcgccgggcggctcgtcttgctcgaggagagccgagagcgtggagtccagcgacggcagcggcggcgacagggtgtcgccgccgccggcgatgggcgcggtggccgtcgacgacgacgaggcggacgcgtcctccgaggaggccgtgaacatgtccgaccctgccgccgccgccgcgttcaccgccgcgaagaggtcgccgccgttgccgtcgtcgcagaagtcatagatgtgctgcgctatcgggctcgagatgccatcctgcaaaaacaaaaacaaaattcagacaaaaaccatcaaaccaccaactcgtaaccatttctttcttcagaaaaaaaaactgtattcttctacaggcctgtgcaatgcaaacattcatcgccaaaatcctgaattgacaaaacggtgatttacagatttgtattaggctatttaaacccatttctatgattcttttataatctctttttttgcaaggaatcaaatgccatactgttgtatttgcaaattatactgttctatctgaaatctgaaatctctgaagatgtcaagaacagtagaggtataggtccgtatgccgtatgctggggggaatgttactgttaggatcaggcaactaatcaaaaattccaatgcgcaatgtcataaagctcgtggagattaggaagcagaaactatcaagtcgaggcatcgattcccatctgtactgcaagaggtccaaaaagcagaaagattttcgcaggatctggtgcccctttccgctttagtatgatagccacctaacaattattgctctagcaaaatctgatcagagcattagcatttgccaattgccattgctatggaatcctaatatgcatgggcaagcagaatgcaaaataaattatcagaccatatgcatgcagaataacaacagcagaaactgctgaaaacaaccatgctgaaactgactgaagcttgcaaataactgcagaattgagcctaatttgctttcaggagatttacggcgaaaggctcgtcgtcgacgtcgtcgagcatgatggatcttgcaccaaggaatgctctaaattgatactgagaaggtagaggctcatcaacggaatgggaatttgaagaggagaaaagctcacgacccatgctaatggcagtgtgttctatttataagcccatgaacaagaagaccaagcaataatccaggctaattatagagccataagagccggagacctaacaagaactagatgcgaagtaaccgtagcacttaattaggacaaaggacaaatatatttacatgtcacatggtgaaaatgtaagtacatatgcccaaagctaaagaagaaaaaaaaaggggaaaacacctatttttgtgcatgttctatgccgtaattcggctcctaacgaacaattaaaccgccctttgtctctccaagattagtttccccttactcctagatcagtttttgaccgagacgtcgtaattttcttttgcgagaaaaaagggatattgctatctagttgattcaacacatgaacacatgatcattaagagataacagtatgtgatatatataggttttcatttttttaaaaaaaaagaatgaaagagttcatggtcgcacaagatataggattccagttcctattgtctttctttgtaattctgttcgtttgcgatgtactcaaacacctcattacgtcttaatgatgcgtattcgccaaaaaaaagaatgtaagagttttgcctgatatattgtttttttatctctgcaatactgactcgatctcagaaattgtactccctccgtcccataatataagggattttgagtttttacttgtaatgtttgaccacttgtcttattcaatttt

SEQ ID NO: 23309 - DNA, 7414 bp, Oryza sativa
tgaaagatcacactgccgaggttagcaattgcgtggatattcttctgcaaaataacttcacattctttgccattttatgtttttggatattggaattacagattgctggatagctggtattcttcttgcatgcatacagtcatatttcctttctgtggcttctaaatttctgttacagtaaaattgaaaatatttatgaaatttctatctatcaaggatttgtcacaaatatgattataacacattttggcatgttgagctatgatactcaaaactcaagtcatactgcaaatgcagttctttcatcaaattttctttatcatttgtaccgttagctactctggtccattcatgtttcacagttacaaaacatgtgaaaatgccccaccattgtccttaaaggccctcttcacagttacaaaacatgtgaacatgccccatcattgcccttaaggcccttgttctttacagattattctctgcactggattattgaaatggattatttgctatatactttggaaaatacatcttctcaaaaaaatttcttttgctgcatttcttagataacttattttaagctatttattgagtttatttttaaaaatatttaatttatatagataatccatggtaataactcagtaatataaatcaaacagggcaacttttaccatattttatattgtaatatttcaattggtaatataaaatgtttcaattcaaattctattgtttcaaacttatttgttttacaaaaatctgtcaggttgaagctgttacagtccatgcgactcagaagtactttgtgactgcttccaaggataatacttggtgcttctacgatattccatcaggatcttgcctcacacaggtttactccattatctttctcatgtaacctgctcccattcatccatgtacttatacatgctttgtctgttagctcccaagatgtttatgagttaatgaataccttttctttactcaggttggcgagtcttcaggacaagagggatatacatctgcatctttccacccagatggtcttatcctggggacagggaccactgaagctgttgtcaaaatttgggatgtgaagacgcaggtgtgatactccggcaactcattcaagttcttttttcaggtgttcatgcatgtctgctcttgaaataccttgctaacaatcatcttttttctctagtcaaatgttgcaaagtttgaggggcatgttggaccagtgactgctatgtccttctctgaaaatggttacttccttgcggtatgaatctctccatagtgcaatctgcaaaatgttgaatttcttttttattctgatatatgtatcatcactgtacagactgctgctctcgatggagtcaagctttgggatcttcgaaaattaagaaactttaggacgatatcaccttatgactcagacacgccaacaaattctggtaaggaactttgcgcatgctccacactcacagtaaattgtgaatggtgcatgtgcttcgatgtgtgtatagatatagccaacaagcgagattatgttgatcattcaccctagatatatcttgctttctaggattttgattgtagctggaaggacatctcattccatttttgttatttgtactggagttccattaatcatatgatgcatgaatgtttttttgtttatcttacagtggaatttgactttagcggaagttatctagctgttggtggttcagatacaaggtattttctcaaaacctgcaagtctgaccttttggtgcaaatgttataccgtaaacttttatatttgatacctcctctgtttggccttcagggtttaccaagtagcaaatgttaagcttgaatggaatcttgtcaagaccttaccagatttgtcaggcacaggttcgtccctttcttatggcccacattctcggttcgtgattggcatctgtgcttgcacttaactaatttggtttctgtggcgtacacttttctcagggaaagtgacaaacgtcaagtttggcaccgatgcgaagtacattgccgtaggttctatggatcgtaacctacggatatttgggcatccgggagaagatgatcaaatggacgacgcaaagccatcggaagagtgatgaaaccaattgtacttcatttggcctgcgtaaattgctccctgtttgtgtgttttgacggtggatgagctggctgagattggaggcacataacaacgggagacgagaagttccttgcaggagcaatttggtgggctttggtcgatgtaaacaaatttgacattgttattgtatttgtaggccttactacctaatgaggatacggtttgttttggagatgaatacaatgctgaagtgctcgacttgcggacatgccaatgaaatctagaatgtgtttaaatttgtggttacgtaatgtccatgcactaacgctcgtttattcatttctcaaagttgctggcgcgatattaaggaatggtttgatggttaactaattagtcgtctaatctgagaaatctggcagcatccgaattaccttgaacagtacatcaaggcagactaagtatattgaggacctttccgtgccaccgacaagcgtggtcacataagctcactgaaatgtgggcaaagagggtaaatcctcaatttcaaacaaaagaataatgaggactctcccgtgccactaacatgtggggtcataacaagctcaatgaaatgtgggccaggaaggtaaatccttatatgtgatcaaattttaattcaaagatcaaactatggccgttggatataaatcggatggtgatgaaatatgttctggcatgggctgaaattgtcgagtggatcagtaatgggcctcgtgtgggcctcaactaaaaccctaacaaagagagaggcgcagccatcccactcacagacacacaacaagtcgattcgatccatcccggaggatcctccgccgccgccgtcccggagcgccgccgccgccgccgtcgtaccggaggtaccactccctcccctctcacatagcagccccccttcccgtcttcacctaggtcggattagctcgtggtgctctccctctctcctcgttggttctagttactctggtggtttagggcgtagagggtgtggaggggatcgggttggttgattgcgcttttttttctgtgatgtttttccttctgtgctccgtatcaaatagattgaagtgataatatgtgattcttgtggaaatgggtatggttgaaaccgctatgtccttaagagagagattggtaaggaactctgaaaccgctgtgccttaagagaattgatatgaatatataattgaagtgctaaaataaggatagtttgtagctttctttctttcaaacagctcatcattttcagggtttcggtgctgatttacctttctatagtgaagtcccttgtataatgcagcatagaggtgacaggagacgatgaaagtactcctttctgaagttttaactcctgagaggcattagaagctgtgtaaattaatgacaagttttttcattcaataatagagaagttctctaggagaatgccaacaataaactcccttgtataatagaagtctgatgttgcgttcgagttatcaacaaatatttctctgacttctctttcatgttatttcctgctggtttttgttgaacattaatggttttgatggagggtcttgtttcggttcagatcttcataagcctacggcatggcaaccactctgaaagatgcagttgcacggaagcctgtgttggcaacaatccgccttatcgttccagctggtgccgcccgccctgcgccaccagttggtccagcgctaggtttctacaggctgaacctgatggcgttctgcaaggatttcaatgccaggactcagaagtataaggcagaaactcctatgcaggttaccttaactgcctacaaggacagcacattcgagtttgtagtcaagtcaccatctgtctcatggttcctcaagaaggccgccgggattgagacagccagcggccgtccagggcacactgtagtgtcatccctttcacttcgccatgtctacgagatcgcgaaattgaagcaatctgatccctactgcaagcacatgtcactcgaggcgctgtgcaagtcaatcattggcacagccaactccatgggcattgagattgttaaagatctatgagctgcttggccccatctttgtcatgaggggagttggtgagttgcttaatgattttgtgtattactaatttttagttggggaagtaaattgtgtcctggtttattgagcagagatcttgagagttccatgcctctgaaattgccttcagcacagccttttttctctctgcaattctgatctgaaacatgtagttcccacaaatcgttctcaccgatgtcaatttgttcaatgtggtgatggtacaatgaaaataatagatttctctgatgatggactcatcaagtctgggtgaacctttgagtgaacaacctgtaatgcagcatttgctcatataagcaggatagttttccagttaatctgtgattcttccggaaatctggtcataagattcatctagcttgccttccactgcccattatgatgtgcttgcagtttcaactttaatccaaatcttcacgctgttttactacaaagaactcaatgagtaggttgtcgggtttttccaggtttttctttcttttttttttttaaaaaaaatcctccattctacaacctacattcattgttcatcttgctgtccaagtgagtttaagagaaaccgagcaaatttattttttgttcatgtgagttgaagagaaaccgagcaaaaattactttttgttcttctttgaaaagtcatcttgctgtccaagtgagttcaagagaaaccaagcaaatttaatttttgttcatatgagttgaagagaaaccgtgcaaaaattactttttgttcttttttgaaaaggaaatcgaacaaatttactttttgttcacctagtgagttgaagaccgaacaaaattactttctgttattttctaaaaaaaggaaatcgagcaaaaattacttggtagaaaacattcactgggagatcaaacgaatgtattccccagaagttcaaattcgtatacattaatctgactgccctttatctgagataaaaatgaactagaagaacagaatctattcacccagtagcggcttgttttcgggttggctctaattcataaatagacatacattcaattaaggatgcagttctcgtttacaatgaacacatttgtgccagttgaaattgatactcttcgtgcataccaaactagctggaacagtctttttttctgcttctccaaggttatgattgtacatgtttgggtactgggaccaaacagtagaaaatatgatctatccattgctgatatgttcaagcacaagatattgcagtgctattgagtacttggctgctcttccttccctggacccacaatctgaactgctaatgctcttgagtatgtaggatccatgcccatcacctaaggaagccaaattaaatcgtgcaaacataacgggaagaaacaaaaagatttagattgatagccatgaactatcatagactagaaactgacatagcacaaagaaatgaaacaaataaagtgaatcagtcatttacagttttggacaatttagttggtattcatagcagtctcatcaaacaaaactttctaagacggatacaaactaaaatgagaagtatcttgactgtcatgccatctatgtaagtgcagtgaatgaaaccaagagggtatctcatctatatattttgttactacagtgaatgaaccaagagggtacctcatcaaataagatttcaaagatggatataaaatgcaacgagtaaatgtccaaactaaaaagaattatatgcaagcacaagatgttctctgttaatgtgaaacaaagagccgatgaatagcaatagaaacaaaaggtttacttaacaaaatatgggtgaacaataaaatgacaaccggcactgtacatcagatatcttgtaagatttaccttggattgtatatattgaacttatccacctcttgtaaatgaacatggatcttggggtgtcaccttgatgaacatcagagagcaagagattacaagacccagggactccgagctttgtgctaggatagagattgagatgtttattctcaggaacataggaacatgcagaagtttaaagatctggcattgaatttatcactcactttgcatgcgcaacagcattttgacacagagctaatatgcgaaccactgctagatcccgagccctagcatttccatatctttgctgacagctcctatagtttcagtattgtcagaactagtcataccaaaaattgggaatgcacaccatacataattcaagtcaattactatagtgtataaagttctcgctttgatgatgtagatcaaacctagttttctcagaaagatcagaaaatccctaaaataaatttgtgcagcaggtggtctaatgcatcattcagtagaacaactaatagccatatcataatggagcatacagacctaacagaagtctacaccaaacattctgcacgtaaggacttggatcatcattatcacaactacaggtgcccagaattctcagctgagattattgagaccaaaaaaaaaaaaatctagaatgatcaagcaggacgacaagacaaaattaaaaacacacctttctgagaagaaatctgcaaaatcatcaataattactgcagcagggaagctgccaagcagatgaaatgccgcgaagtactttctgatgccctcatcatcttcaatgtatctacaagcacggagtacataaattagagcataaatccccatctttttgtcatgaagtaacacaaataggcatttcaatacgatcacagaccatatgcttagctgacaatagcatgcaaatctcacaaatcatcaatagtaaataaaatgtaactagagagatctcatacttgatatggattctctgaagcacgctgtgtgatagatcaataccctgaaagaaagaaataagagtaagatttagcttcacaaatgaggagcaggtgagattttgtaacccaagattccagagcacgagtagagaacaatcgctcacctgggacaagaacggggggctattctccagtctccccttcctgcagatgaacaccacgcctcgtccactctccgtcgcgcggtttatcgcgaactggaagagaagcgacgtcttcccgctgttctagcaccaggagaggcggcgaaatcggagcaagagcggagtgagccaagccgcagcatcggggatgggacacggaacgcacgggattc

SEQ ID NO: 23310 - DNA, 10543 bp, Oryza sativa
taaattttttgtaaaaaaagtaatccgagcatgtgtttaattgatttggcacaaactattgacttttgaaatgaacatcattattatgtgcttcctccgtcatataatataagggattttgactttttcttacactatttgaccactcgtcttattctaaaaatttgtgcaaatataaaaaagaaaaattgtgcttaaagtattttggataataaagtaagtcacaaataaaataaataataattctaaatgtttttaaataagacgaatggtcaaacaatataagcaaaaagtcaaaatcccttatattatggaacggaggaaataccaacactacatgtttgtcttattgaccaaagtctaagctgtgaattataaaccactctaataattcttttgtatatgctaaaaaatgaaaataaaactaaaaccattgaagtaaaagaatgacacgttcacttaaaagtaataaaggaataaagtaaatactttacgtattggttacttctctatagctctataacccatttgagaaaaatatattttacagatctaaaaattaagataagatacacaaatgaaagtctaaaaatttatatattatagatctaattgcgtttgatttgctcaggtcatctcgactaaaatttttactctctacgattaaatctaagagtaaaaagatttactcaagataatatggataaatcttaaacacccatttacatatctagaagtagttttcggatttacaatatatgtatatatgtatagtttgcatcatatattttcctcatttaggatgagcctcatcggccaacatattatacgttttgtgttgagttaaaaagagaccggatgcttataaaagctactaaggatgaaaaaaataactaaaaacataaaaaagcagtagagtggctgccgctacaagcctacaaccaatgatatgctactatggttgccgaatatgatcctttttactatggttggtgcccaaactatgagctcacggaattttcatcactactccttccattctaaaatatgaacacttctggcatttaaaatttacactaaaatataaatacttcaagcgctatttagagtattttctccaccgattatatccctctcaaatatgttcttatggtttcttaaaaaaatatatgttcttatgttgaatcctaatcattatgtcatttcataaatctatcaaaatattttctacttaagcataaattctactcccttcgtttttaaaatataacaacttaataacaaattcaacaatcttactactacggatgagattacaaaaaaaaatagattttagaacagatgaagtattgtattaatataaatttcttaccctcaaaaacttgtcgatccttctctattagtacaaccagcagcctacatttctagatgagtaaagtccatcaccggtccctaaacttgtaccgctgtgtcatcccggtccctaaactcgtaaaatcgaccattcagatcctcagacttgttcgactgtatcatcccagtccctaaacttacagatcactcgtttaggtcctccaacttgttcagttgtgttaccccggtccctaaacaggacggtctaaaaattttatatcaaaaaataattcataactttttcatgtgaactctaatgaagacaatctttatatcaaaattgtagctctagacgtgacctacaactttatagttgaaaagtttttgaattaaaactgtttagggtcccaaaatattgttgcatgtttatatattttgaaattttaattttaaaattacattttgggacaaaaaatgacttaaaataaaaaaaatcaactacaaagttgtagatcgcgtcgaggactgtaagtttgatataaagtttatcttcattagaattcacatgaaaaagttataaattatttttaaatataaagtttttagacagttctatttgacccagatgatattcaaatacaagtttagggactggggtgacacaactgaataagttagagtatttaaacgagtgatctgcaaatttagggaccaggataatactgtcgaacaagtttgagaacctgaacagtcgatttgctagtttagggaccgagatgatacaacggtggaccggtgatggactttactctttctatattctaactgctcctaattgattatgcaactacaccatcttttatattggattctcggatgatattcatcctaatatccaatatccactcattagcagtttagcaccgagactttgagattaggccaagtcaaagcggatccatctgctcatcccggaaatgaatccaaccctctaaacccggaaaccctaaaccctctaagagcacgaatgcacgatgccatttccactcggtaaaaaaaaaagaaaaaaagaaaaaaaaaagagcaaagcaaagcaacggcttttcgcccatcggaaaaccaagcacgacgacgtataaaatccacgtttttgagcgcgagaaattaatttctctcggtattttcttctttcttctctctatactccagtactccaccctccaggagcagttagcttctccccctgctttctgctcctgacgcgagagcaagaagaagaaaaggccatggcggagaagagggcttcttcttgaggtgaggttggttgctcgcttctcttctcttctcttcctcctgctgccgattcggttggcgattttgctcgagacttttttttttcttcttctttgttgcgagtcttcgcgccgctttaatccggagagcatttggagtctgacttggcttccactcgcgcgcggtttaatccccttttttttttctatttttttcttcacttctgatgatgatttcgtgctcttctccctcatcacgatttcttggcttgcaggcagctgcttcgctttcctcaccccccaaatcgcgccagaattcgatcttttccggcggcggctggtggagcgcaagatcgcgctgcgcgtttgatgggcaaggcgtgttcttggtggagtttcttgggagccgcctctcgtcctggatccgtggcggccggcgacatcctgggccggggagggtttctcggatccggttcttgctaatccgatcggaatccgagcggatggggtcagcgatggatgtggtggacatcagctccgacgaggagggcttcgccgcggcggcggtggcggtggcgacgacgaccaagaaggcgtccgtcgactccctcgggtggattgcggaccttcttagagaggaggatgagagggctttgtcggatgagttcgatgatctggaggtgatgagtgagctgtcggcgccgccggtgatggcgcagcagaaggggggcaagcccgattgcggcggcgaggaagacgacgatgattgcgtggtgctggatggggatcctgatgatgttgtcgctgtcgcgggggagaaagggagtgagggagatggcagctcggatgaattgcagatcgtcgcagagaaaggcccggtattttggcttaattgcttattactaaaattttgatctgtatttattgcattctgtgcatgaaataggagcagctcaattgttatgtttgtaggctatgtatatagagatgaaatgttctcgtaattgggggaaactgttcgtaataagtcattttgttatgatctgaactttgaattactatattgttctgatttcatttgaaggcttatttactcattgcatagtttagtttgatctcctttgttcagtgatgtggaattcagattcaaatacattggatagcgtggaagtggtttgatttaagtgcatgtgtttctttccccatctgtacttgcctatttgtctatgaatacatgtacctctagttcatgtcacttgtaataacgaaatgataaatttcatgctagctttttaacagaaaccacagtgtggagtggacatgtagtagcattcatttcttttgttattttccttaactagtagttgtctatttatccacaggtagcatgcagggacttccctcattcccgccatttatgttctaacttgcccttcagcaccacttctcatgtgaagtattgtagcatggtaagtaagaaataattttccctccagtgaatctactagaggagcagcttatagattttgttttgacacgatttccatgttcgcttttcaaatgcagtgccactgttttgtatgtgacactccagccccatgcaattattggggtaagggcaccgagatttatgatcattgtcatgctacagataaggaaaaaaagtggaaagcaatgagacatacattcaagagcaaaggtctgccaacatctcatccagaaaagcgccagaatgtcgtatacccaacaacaacgtcatttgtacagcaagatacacagtgcgaaatttcactcatacaatcgcatatgactacttactttcccaaccaaagtcatcttgcgaatgttgtgaaccaggggttaactcaaacaagacatacatcagtaagagtctcaccgagtgtagggagaactgtcagtgcaacaagaacaactcctgcaacaagggctggaagaggtatgagcaatgctcccagcattcagattcctcaatcacgcacaagattcaaacgagtaggggctacttctccaggcatagtaactctaaatgataaccagtttggttctgctgctccgaacaatacccagttgcaccagccatcctcgccacatgcatcccagccagctcaagttgcaccaagaacattgtttggtactgttcagaaaaatccccctcagagatcgctaagtgccccaatagcgcttcaagggcaacaagatcagtcggcgtcgtcctatcaggctgcctcaaacggaacacacggtacaggaccacaattttctcggtgcatttctcttacggctcagagaacacaattactgcctgaaccagcattggatgtttacagcaaaagctggcaagacataattgatagtctggcatctgatctggaggtaccagattacaatatgggcgctgcagagtctcagcagccagacaggactatttctcaacctcttgattccattacattccagggggtaggtcttcacagtgagcctgttgtggcattggcgaacttgatgccttgtaatgggcagaatgtggccaatggcatgataggcagcaattgtcttgcacaaacaacacaaattttgcctcacctcaatcaccagcctagccttgttcccaatgaatcccatcttaataattcagtaagttccactgcggacggattactaatggaagctgctcatcagagagacacgcaaggatcggattctctagatcttctatttgactttgagtttgaggattgggattcagcagagccctgacaaacaacctccgcatttctgaaccccaaggacaataaaatctggcgtcaccgacaagctggttcgttagcttccttcctaggaagaggaagagatgttccttgtacattctgtaggttcagtggtagaaatgttttttttttccttccatgggtgcttgtttacagtagcggctatacaggccttctaggccttagattagcagttatcgctctgaagttttagggatgaagttcaattcccaaactgttgttgatcatatatctatgggccataactccataatcctatatctatggtccataactccataatccaattgccagaatgcatgtttcaggtagcatagcactgaagcaaaatcttctgagcactggtgtggattggctctagtaactgctgatccagcgaagcaatgtatagtttttgcttgataatggcaaagagtgatctgctcttgaaaagccttaagctttccttgcaatgtgaaatttgtgttacaaatagctgagttggctatgcagaataccaaggcaaggaggaagaaaccaatgcttgcgttgttctacctccattgaggtaaaaatctttccttttcctcttatcgtagagatttgtcatttatatgacatgagttactccggctataaatatttgataaaattaagtcaaaaatttgaaattgtgaccgtcaataatttttctccaatacttattagttactttgaaaagtactgccataatatcataaacttatttaaatgtaaaaccgatggccaaagttttaaaagtgtaatcgaatctcattctaaactcaaatactccatttatgaccagttaaccacagggagagtacacaattccttttgttaagagtcagtaataaaatcagcatgtagaggggataataatttctttggtggccccacttgtcaggaagggtcgaaggcgtagtgcatgtccacggcggcggcgatgtgccaggtgcaccgtgtgcccttggggaagacgacgatgtcgccggcgccgaactcgacgcgccgcccattctccggcgagccctccgccgccgacgccgccgccgtcgccgtcgccgtcaccttccctctcacgatgtagcacgtctgccgcgcgccgtagctcagcgccatcctccccggaccaccgccccacctacaacacaagtacatatatacggtacaatacgtgtattttgtacaccgtataaaatacgcgtatgatgtatcggagggagatttatacttgggccaggacctggcgccgagctctgacaggcgagactccggcgggctcctctcgacggcgatgccgccgccggcggccaccgtgcacggcggcggcggcgacgagctcgaagccatggacaatggacgatgcagtggtttggattcgccaggtcctcttcttcggagaagttgcaatctcttgccggaaacaagacatagtagcatactttccgacgacttgctgctgtcgtggaccgcacctcgacatgtcggcagcggccgccggcggcggcggtggcagaggacatgtcggccgcagcctgcaggtggcgcttggtcagccacgttgaccggctgccagctggctgatgacgtggcgacgcagcactgggcataaataaatgtgtatgatgctgatgccgttgatttttcgcatagcatttggccatttgttttatttgaaaatttagtataaatatataaaagtataagttaagattatattttatttgatgataaaatatgtgctaacaaaataaataacattcatataatttttagtaagacaaatggttaaacattacgtcaaaagtcaacaatgtcatacattaaaaaaaacgagaaaattgacattttaccatcatcaaaaaggggtttcgcccaaataccactatgcaattgggattcaccaaaataccattctcaattgaggggcttcacccatatgccattttcttccaattctctctttcctctcatcattattgaccaaaatggccctagttgaatcaatttaagtatatcaaaatacgtagattataaagtaaatacgctaaaatatttttacatgctatttttttcttacacagtatgcatcgtattatatccataacataaaaaaaaagacactatcaacggaaactctcataaaaaatacgtaattatttttttatttatgctgtggagatagtgtcttatactctgtaatttggtgtaaagaaaaaaatatattgcatgtcaagatatttggacgatatgtactttgtctgtaatctacatatttgctttacttgaattaattcaactaggggcattttggtcagcaaagatgaaaggaaagagagaattggaagaaaatggtgtttcggcgaagcccctcaattgagaatgatattttggcgaatcccaactgcatagtggtatttgggcgaaacctgttttgacgatggtattatgccaattttctcgatttttgtagttgttaacccttgctatgaaaaatctgaactttgacaacggttattcaacccattcattcaactgaaagtccttaaattcagcagggagctgaagacttttgtttctgattggttttgttaaaccaaacataatgctctagaacttcaaatgatagctccaagggaagaaatcacaagtccaatccttgacctggtagtctatgactctatgttacaaagagatcaccatgtcccaacctgtcgacttttgaacaatagctgaagcatggatcttttttttttttgaaagtagaaacatggatcatttattcaatgacaatcttttttttgtccctcgcaatttcgacaaggtctaacacaggtacttagtcaggcgtggatcggattgccatggtaggccagatcgtgcgccgattgctctacatttgatgcctgcctgaagcatgaacaggaaatatcccaatcaaggtaagaagtgaagaacaaaaaaactagtagtatttttgtttcatttctgtaaatgaaggaagttgttataccacttggcaagcaaaaggcagcatcttttctggaggcatctctgtggatagtcctaagtatattcaatagaggaaacattgaggtcacaataaataattaatgataggcgatagctaactggattttaatatttagttaaaacaaaaatacttgaatagcatcatatatataagaatcatattcttgagcaaagaagtagtaatcttaataactgtttatgtcgaattcccgtctcctcagggagacataatgaagaaagtaaatagttattctggaagaagttaatggctcaccatgaagtactgctcctatgaatgcatcaccacaaccagttgtatcaacaagctctgaagctggaatactttctgctgttcctatgagcagccttgcaaatatattcccagaccctcttgcagtaagtctcatgaactagaaagtaaaatggaaaaaggttaggtaaagcagtaaaagagatccaaagcagtcatcaaattactcacatttctgatgacataacaatgtaaacgattttgattgccagaaatatctcataccttagatgatacacaagttggcaggatatcatctttatctactttcagccttaaggactcagcgacattctctatatctactggctcagtttcataattttcacctatttaagagtggaactgcagataaataggttgaagtcacaaaggcaaaacttatacacaaactttatccagcatgtaattaaaattgtctggacaagatcaaaactaaccatctttgcccctctcaagcatcatgcatccattttctccaagggttacaactgcgaagcatgcacgaggatattgcagaaggatttctagtagtgcagagggaatagatgggactgatgtccatttctgtaggtaaagagtcactgtaaatagtgagtgggaaaaaaaactaatgcagctttactaaagcatgccttttaaaaccattcatgcctgtcaaaatgtatcacaaacctctggaaatttcccattacagactatgtaacttgctaggctgagcaaacctcccaattcttcccttgttctttctggttcggcatcaaccaaaataggaatcttcatctgatcagcctgtacatttctggttttaatcaagcaacaaatcaaaatatgatctaattctctacaggtttatgatactgttactgtaaaacaaaggtcatttacattattgaaatttacctagacagtactaactactaagatgtatgaagattggacaacctagactacatggtgaaagcattacatgatacatgaatggattaatgttgcacactccaaacgaacttacctgcttagcaactgccaaggccatctcatctgaatatccatctaagtatagtaagcttacgtcttgcagtgcagctgacaaacttgacattctcaagtcactaggtatcattggagggtaccctgatgtgattatacacgtacgagtttttctgcaaatgtaaatggcccttctatgaatatgcacagaaacttgctatgatgccagaaagtgttattgtaaaaaagcaataattgagtaagtgtggctaaataaccatattgcttagacaagcttaacagcttcaaccatataaaggatgttcagtaaccagcaaaacaaaaaagtagtgaccaaacatcaaaatggtcaagtataaagggtcagttggagggtaaaatttttatccttatttacatgtatctactaaatgcatatatgccctatttccatgcatttttttcctttatctgatctagatgcccagtcctttagaataactgagcgaacggtgtacgcgccgaaagggaagtttataatgaagtgagaaccatgatttataaaagcaccttgtttttatatataaaaaggtaagtcaggttactctaatataaataggtgtaacaaaactaaaaattggttgaacttcattcgaaatgtacctgattgagtgtgcaaggtgaccagaaaattcatttggaatatttcagaaatgcttatcattacaacctaggagcatgcctttaattgt

SEQ ID NO: 23311 - DNA, 2795 bp, Oryza sativa
tgatgaaaaaaaaaagagaacatcagcacttcagcagggttgtacttgtaaataggcaatgctgtacaaatagatgactcaatttgacaattcagtaaatgctgcactgtaaatgctaatttcaaaatgactctaaattcaatttaccttggagatgagcctcgtgttgaggcccaggcgggcggctcctgtcagcgcgttcccggcgttgccacctccagacacctgcaacaatggcgaaaccccaagaaatcgccaggagcgaaacgtcaatcttttccccatgtttcttggtgaagaactaaagaagtggggggtttggtttggtgtggtgtgtcacctgcagctcgccgctgcggatcttgtcgtcgggccgcgggtacgcgtccaccgtggcgaggtagtccagcgtcaccagcccgcaacccagctgcaagaagaagaacacctcacgccaggagtcaggtcaggtcagaccaaccaaaggcagcgggagagcagagggcgcaaatcacagtagctcaccacgacgcggcctgcggcggcgggagcagcggccggcgccccggcggcgcagcggagaggagggagccgctgcggcggcgcgggagcagaggcggtgacgccgccggcgagcagcccaggaggagcggcatggtgagagcgagtgattaccgctcgctgctgccggtggagccgacgagagttgtttggtgggtagttggatggatcatggatggctcccgttgtcattgtcgcgtcgtcacctctgattgcgtcattccatttccatggattgctcgatcagttcagacattttcgagttgaagaaaaagtttagaaactttcacctcaaagaggggagaattccatctcaaagaaagaatttccgaaactttcagtgcctgtaatttttatttaccggcatccaaatcccaagaactgatgttcttatcagtgaagtttgcagacctatcttagacatgcatggttcttagaaaaactgaacacatatgtcgaaaattttttgggactcttgcctttttaatttcaagtaggattgagctaacaatgatgccagtacagcaacaaaaaaatgcaaatatatttctttcacacctcaagttcactttataacttaaaaacacacaaagaaaggaaagaagagccctcacatttgcaactttattctgcagaaaagcccctcatttggatcgcacagaaagaatggctgagagccagacgaagacgaacagctcatgggccttaattcgggatgtactatagactttgtttcatggaccataaaaggcccacattgcgagcccagcccaactccgccacggcaagacgcaaacctaagcttaaaccgcaactataaaatgcagcactatctccaaaccctcgcgaaccctagcgccgcacacacgctcaccccacctcttcacccgccgccgccgccgccgccgcgcgaagggaagcaggaggaggagccgccaggatgccggcgggccacgggctgcgtgcgcggacgcgcgacctgttcgcgcggccgttcaggaagaaggggtacatcccgctcaccacctacctccgcacctacaagatcggcgagcacgtcgacgtcaaggtgaacggcgccgtgcacaaggggatgccgcacaagttctaccacggccgcaccggccgcgtctggaacgtcaccaagcgcgccatcggcgtcgagatcaacaagcaggtataacccccgatccccaaacaccccggcggcggcgccgcctctttgtcatagatctgtggttgtgtcgcttaagtgacttggtgtcatgtttttgccccaagtgactttggaatcatgtagtttagttgtgccaatatgaaatttcatttttgcagttgcaggaatgggaagccattgcatactcttgcatggttgtgtaagatctgataaatagtgtagtctagatggtttactggttatatttactggtaacatttgtgcgattttactttgtgctttagtatttggattttgttttctctttaaatgtattgagaatgttgtgtactgaagtagagctattgtgattgtggctttggttcatttcatttctaggtttccattcgtccaagtaggatagtggcaaatcaatcctcaagtttacgtcgattgtattgttatcggttatgtggaaagtttaaccgtttggttttatgatgtagttatgagaagtgcatttaaagatatacttctgattgttcatttaatcctgtgtgcatgtgtagttatatgtttcaatcatataacatgctaccgtctaaacacattctgttggtgtagataaattggatagatatgtagttagctgtcggcatgtgtaatgttcagtcatgtggatatgtagtcttcgggattatttaatttttgaaatcatgtatctgttttactgattgtttgttaatctcttggtaggttgggaaccgcattatcagaagaggatccatgtccgtgtggagcatgtgcagccatccaggtgcactgaggagttccgcctgaggaagatcaagaacgaccagttcaaggcagatgccaaggctcgtggtgaggtcatcagcacgaagaggcagccgcagggtcttaagcccggcttcatggttgagggtgcaacactggagactgtcacccccatcccgtagatgtggtcaatgatttcaagggtggttactaggattttcaatctatctgcctgcgctaccaattttaaatccctgtcactctaatgagtagaagtttg

SEQ ID NO: 23312 - DNA, 13678 bp, Oryza sativa
  unsure (1)..(13678): unsure at all n locations
aggttttatgacctattgaaaaaaaaggatgaatttgagtattccactttagcaaacaatgaaagattaaatcatgcaaaacagtaaatgattgaacttcaagcaactattagttccaaagagaacagataacagtgcatttaaggattctgatatacccaaaattttctgtacctgcttttgacttttaaagtctgatacatcccacagacgaatagatccatcttctgatgacgtcagtatggtttcttttgacttgggattccattcaccaccggtaagcccagaaatgtgcccttttgtattcttcagatctcggatatacatgtcacccttaataaactcacctagtgtgagcccgtcccgatcatatatctgattacaagcataattccaaacatcaatacaattttcaagtcatagggagtgcacttttgggaacttacagaagactataaaggcagattaccttggcctgagctgaaccagtaacacataagaaccgatccgatgttgggctccaacttaagctgcgaacttggtgcccctcaaagggttctaactgcctgaatgattgcagctttgagttcataccttggaagtcatacatacatacagtgtagtcatagcttccagagagcactcgggatcctgtatggtcaacagcgagggctgagacaacctgcaaagaaaatcatttaattgttaaccagtaaatacaatatgtgtatctagtaatctcataacaaagacaaaaaaaatggttctggaattaacctatccctcacttgtgtacctcaactagattaagcaatcaacaaaaccaagtaaacaactaagcacgcaaagttgcagaaatcccttaatggcaccaccaggagaccaaacctttgagggccatctcaagaaagcaccatttgatttattccttttcaaaactaaaatttaccatgcccttcatctagctaagatcaccaacaattctctttctttggacttgccaagtcgctcaattaggccaaataagtcaccagtaatactcaatcataaatatatcttctctggaacctagcctacaacaatactacagacaacaaaatgtgtaggaattctggtttgtctaattcagctaaataactgctaatgaaaccaacttagctgagctaaattattcacaaaatgatacaaatgtaaatggcacaataaatatccagaaatttgagcacacaaactttagcaaggacaaacagataatatcggcgagttgcttatgggctaccttggtgtgcccccgcagaacaacttcgttgctgagaggaatccgattgtaacgctcgccgtcatcctccatctcgtcgtcgctgtcatccccatcgtcgtcgtcgtcatcctcgtcctcctcgtcatcatccttcaccggtggcggccgaggcggcccaatcatgccgccatccgcgtcctccccctcaccgcgagaggacgaccgcggcggcggccgaggtggcccaatcatcaccccgccgccctcctcgtcgtcctccccctcgccgccgccagcgggctggggcgggggccgagggggcccgaccatgggcccttcgtcgtcgtcgtcgtcgtcgtcgtcgtcgtcgtcgcccgcggcggcggcggcggcagcggaggaggtggagggcttggcgctagggttttggggcggcttgcggagggtggaggcgtgcgcggaggcggcggcgccggcgcgcgtgggcgccttgccgaaggacatcgggaagaaggcccgcatggcctcctcgtccatctccccgccgtccgccatcggccgctcgccgctcgccgccgccgcgccgacgtcctgtgcgctgtgcgcgagacgcgcgctctgtttttcttttctttttttttttccgagcgggtcggtgcgtgttccagcacgggcggggagaggcgtggtgcctttcggagaaactggtcgagtcggttcgtcgcgttaacttagggcccactagaaaaactgcgtggcagccacgtatggtaaagtgaacccagctcattcgactttagtggagtatctaattaggaccccttaacttgaaagaaaaatatagaaacttttattctgtatagaataatattttttttctatatgattatttgaaccaaaggattattgaaaactatcgaatcttatcaaatttctaaggaatgcccaaattcatataagttttggagtatttttaacatgaggtccaatatcatgcaaagtcttttatgagtttatctctatcatccaattcttgcatttttcgtacggtccaatcaaatggtgatttcatatattttttatgtgttttataattctttgttttgcgcttgattttttgttagaattgtatgtttttcctattcatccctcgatcttccttccaaagtagcccttacaagacatatataggttgcatttgactgagggagaaaagagaaaggggcaattttgtttgtacccctactttaatatccaataccgattttaccctatattttagggttgttgttttttgcccaatttttttaaaacggatgaggcatttacctttttttttacggaaatgagtgggatcggacttaatgcggtaaagaattagagaaagaaagagataacgatatttaaattattgattgacccttttacccctagaaaatatccaagtaacgcttgggctgtgtttgaaaccatgagttcccaacccctctccctcgttttccgcacgcacgcttttcaaactgctaaacggtacgttttttgcaaaaagtttctatacgaaagttgcttaaaaaaatcaaattaatccattttttaaaaaaatagctaatatttaattaatcatgcactaatagatcgctccgttttccgtgtgggagggtaacgttccaatccatggctagcgaacacagccttggtgtactttcaggcttgggcacttggcatcgactattcccttcccaaacccgaatctccgttgtgaaacagtggcggcagtgttcgtgggccggccaggcaacggggatgactcggccagatgcaggccacccaacccagttgcagcgtgcaggagggggctaggcattgcgcaagaggacgtgatagggaggaggacaatggcggctgctgtagttcagcgcagggagaaggcgtagctgctcgacgtgtcgaggagacgacagggaggaggacaacgggtcaacggcggtggcggtggctcgatgagaggaggaggcgacaacagtggcttagcgcggggaggtgatggtagcagctcgacgtgaggaggaggcgacggcggcggcggttcgtgagaggaggaggcaacaatgacagcttggcacatgtaggcaatagatttgcttgacttgtctatttgttttttttttcaagatgtcaaatttttaagcaatttttttgttgatatttctatcaaaattattatattggtaaaagtatatcaaaattgcaaggttcatgtgctaaatgtggtgcaaattctcaatcatgaataaaaacaggggaagttgcaacatgagtaagagtattgaatgccttctcactgaagatttaacatcgttaatctatccatcaaaagtaggggcaaaatttatcttaatttaaaaaaccatgggcaaaaataaaaccctaaaatattgggcaacatcaatattaaacatcaaagtagaagaaagaatgaaattgccccaaagagaaaaggtcctatgatttcggtagaggaaaacacatgaaagaaataatataaatcacatgaatacggatacaaaataaaaggatggatgtttgcaacttaggaattttagtgggtgatttgattacatcctgttaatcctcttttagtctctaaccaaagtatgtattattacttctttaatcctcaatatccggtggtaggaggaagcaatagctgcctgagctttgccagctgtacggcggcaacgcgactacgcgggaaatcacatagcctacagtgcccccatggacctaagagtaggtaaaatagcaggctataagccagctgcaaacatattttaagaagataaatgaggagagagaagggcagcgagctacagatttgtagccagctgcagcacggactccaagacgcggtgtgtgtatgacgggtgggaccagatattaatagtgtagtatgtaactattgtatgaatgagctattagattcgctatagatgaattgaagccagtagtgggctatactattaaacttgctctaattgctccatcgatagaaacttccggacgaccttcttgacaactgttgcacgcacgcacacgagcgtttcacgctgcacgcgcgcaagcaggaacgagccgttccgcgaaaccggtgttgccacgtggcacaattcttctttggatttttttgcatggaattcgtattataagattggttattcacatgattggaaaaacacataaataggaaaaacataggattttaagtggtaggatttttaaattctatggaaaagaaaacagagcaaaatgtaagaagatcctttaacagaggcatagggaaaacaaagaaatttacacatcacttcatttccaagaggtctgacctctttttagtttcctttgaaatccactcataaaaatgcaatcctatggaatttatacttgcctttcctataaatcaaagaggcttgaaggaaaaaatcctttggaatcccattcctccgaaaatcctttggcattcctttaaatcaaagaggcccattattactacttcatctcggttttggtttgttacaatgccaaaatattaacaatactaaacccaaattttaatagcgccaaatattttaggggttgttcagattgatgccattttcaaccatactattttttggtaaagttgccaaaaaatgtctatgtttaatttattgccaaatttggtagatacataagaaatcttgccaaaattttggtaatattaattttggcaatattgctaacttgctaaaatttggtaacgtttattttttatacaatctgaacaggcgcttagcaacttattatattatattgggcattggcacattttggtagtaaatcaaacactagccaaattattattcaaaatttcaacaatcaggtgtcgacgtttgatgtcgcgattccggtatttgcatactatggggatcgttggtactaggatatacgtgagattgagataaaagagatggagacatggatttttatacaggttcgggcccctgaattgtcaggtattaaccctacatcctgttggccaaagccgatattgctcttattcaccataatcacaccagtacaatatttggggtagcctatctaactgttgttgacatggcggtctgaagttctgactcgtagtcaacaacagggtagtcttcctcctcgagttcgtgcccggcgagatcagagacatcgctagatccctacggccggcctctgtaggtaccggatagggtcgatccaggcatatctctgatgtcgatatacggcgccttgtcttgcgtatgttggcttgtatgttgatctgttctcttgatctattatctgtgtccccctctcctcctagggtgtcttgtatttatactcataggtgtccccttgtccaaatanaactagtgaanacaatatggatccatctgagtagtacttgtcgtttccatgtataactctagttgtctttccttatccaaaactccctccatatccgaggtcagttttcatataagacatggtatatggtgggtcctgtcaagatttaatcaactactattaggtatatggtatctataaccctgacatctgttagggcatattttgacatcaaaccaaaatgtcctccgtcttcattctatctctcaatttatcccaatataaatttagtttatagtagttgttgcatcgtagtttgtaaaagtagataataattatattaaataagataatgaactcacctaactattacggctaaatagtaaatgtacaagattgtaagtataggttcctttatggctattggattttgctcaaagtatattcgagaagtactaattcgcgcgtacgcgcatgatatcttaccagcgcacggacacatgtcactcgtgaagcgtaggagcgcacggtgctataggataaaatcggaaacaaaaaatgattagtacggttgtcgacgtttgttgtcgtgattccgatatttgcatagtatgagaatcgttggtactaggatatatgcgagattgtagtaaaagagatggggacgaggatttttatataggttcgggcccctaaattgtcaggtaataaccctactcctgttggccgaagccggtcattgctcttattcaccataatcacaccagtataatatttggggtagcctatctaattgttgtcgacttggtgtatgttgtcttgtatgttgatcttgtgtcttgatctattattttgtgtcccctctcctcctagggtgtcttgtatttatacccataggtgtccccttgtccaagtagaactagggaaaatcaatatggatacaatctgagtagtccttgtcgtttccatgtataactccggttgtctttccttatccaaaactccctccatatccgaggtcagtttccgtataagacatgatatgtggtgggtcctgccgagatttaatcaactactattagatatgtggtatccataaccctgacaacggtgattagaacgattagtacggcgattaggggattattgtgattagttcagatctttttgtttcttttcgaataattataccgtattcagcgttgcttctttttaacttttcaaatataagttagatctttcaaataaaattttgaaaaactctacccaaaatttaagacatcatatcccaaatttaaaactttcaactcatatttgaaaacattcaattaaattttttttttcaacatatacttttcatctcaaatttgaaaaactttcaactcaaatttaaaacttttagttcagatttgaaaactttcaacccagattggaaaactttcaagtcaaatttgaaaactttcaactcaaatttaaaaacttttaactcaaaatttgaaaacttttaactcaaatttgaaactttctaacacaaaatttgaatcctttcaagtcaagatttgaaatcttttaagtcaaaattaaaaactttcaattgtatatttgtaaagagttgtgcgaaagattgaaaaaaattggaaagaagcggcacctgcccttttttatccaatgtggaatcgacgacctatgtataaaaaaaggagaaagtttttgaagaaaaacaccacgccaaaatcggacgaaaaaaatgaaacgcgtgaaaaaaagggcgccaggagggggcccaactgacgcgcgcgacagttaaattgctagcgcgtatgtgcgtgctggaactgtatcctctgatattacacactaatgtcacggtgtgatattcttgaatccagaccatccaaactaaatcaatggctatagattaattggcatacaagtaatcaaattaattagcagattatgtagttaaatattaccatacttaatgagtaggaaatttttttagcactaaagtagtcccttcatgttcattaacatgagcccaccaacttgtagattaagagaattgtctttttcttatggaagatgtggcaacacaaagaaaattgatgcacgagattcattccttaacaggttcatatgctaatcattgcgtctaataggtaagttaaacctaattatcgtcatgtgctagttacttgccgattcctgtagcatttagcgatatttgcctccttgataatatatttggtctactggaatttgtttaactacataatctactaattagtttgattaattgcatgctaaataatctatgaccgtatttagaatggatggtgtggatcaaaggaatgtcacaccgtgacattagagcatctccaacagcctctccaaatcgaactctccaaacacccacatagccaaccctccatctgatttggctagtcaaactagttgttcacttcaacagtctctccatctaccctctctattacaactctattacaaatgggacccttatgtttcttcctccctccagctggactactgcattctctccggcggagaacagcgagcggcggcggcgctgtgcggaggccggcggccgtagcgagcggaggcggcgagcggcggcgccacgcagaggccggcggccgcggtgagccgaggcggcgagcggcgccgcgcggggcggcgggcggcggtgccgcgcggaggccggggaccgcgaccagccgaggcggcaggcggtggtgccgcgcgcaggccggcggccgagtcagagcggaggcagcgggcggcgccgccgcgcggaggccggcaagcgaaggcggctagaggcaccgcgcggtggccggcgccggcgactggcttggtgcggcggcgagagaaggccggcggtcgccgtgctcgtcctcgtttccgtgctcctctcgcgcctatccctggttgcctcgtgtggggatggagccatggaggagtttggctgtgtgggacccaccattggccagccaaatagaatggccaaatttagctagtgaggagagggttttggccagccaatcggggttagccatccggttagagaggctgttgaagcacgttttttgggtgaatagctaaaatttggcttggagagtgggatggagaggctgttggagatgctcttagtgtgtaatgttagaggatacggttccacgcgggctagggttccccaagtatattttcaatcctaaatataaaattggttattttttcctaacttttaaaaccaaacaaatagcatctatttcttttattagttttgattggaaatggggttggttttcgtaatatattattatgcatgttttgttacatgtagatgccaattaaaacttacctaattgaaactgcaaacaaagtttcgtaattaagggagtataagtaatcaggattatttgtgcatccttaaagtgcagcggtggggatatttattccattattaaaaagcagcaaatttgcaatactacaatcgacgtcgcgagaaccccaacgcgtacacatcagcaaaacacatttcccggtgacataacacaaacacgcccggttattattatttggaaattaatgaaattgatccagagagctcgatcgagatgatcatgcgtcggcggcgcaggcgaggccgcagcgctcgccggcgacggcggcgtgcagcagcagcacgtagaggagctgcgtgaacgccagcgtcacggtgagcccctccagcgcgcgcatccgccacccgcgcgcggcgccggcgggccccgccgcggcggcgtcgtggatctccctgcacgccaccccgaacgccagcgcggtggccgcccacgcggcggtgccgagcgacgccgcggcggcgagcccctgcggccgccacgacgcgcccgagcggccgccgtggtacgccgcggacgccttcgccgcgacgcccagcgcccccgccagcgccgcgaacgttgcgaggtggaacctcgaggcgaaccacgcgctctggcggtagtacggcgaccacggctgctccccccagccgacgccgacgtcggcgccggcgttcttgatggagctgttgagcgcccacccggcgaaccccagcaagaagacgtacatgaggaggttcagcagcagcagcgaccccgccacgttcctcctcccgagatgctccaacgccatggctgctaattaacacagcttgatcgaactgttcgattgacgaagacgagcggtgtcgcgtgtacttgaagagggtttcgtgtgcgtgtgcgcgcttcgctcgcggtcgatcgctcgtcgccgcacgcgggctcttcccatggcggagacggcagcgcgcgcgtcacgacgggcgtcggcgtcatcaccggggcggctttagcttcgtctcggcgttcacggcgagcaaaagatgagaagaggccaaaaaaagcacaaaaggcaacggatcgaggagcaagcgatcgaagctctcgatcgccaagttgctgcttccgggtggcaaaacgcgactactactgacaaagaggctttggcctgatttgtgtgttgccgtgggagaagctttgccgtttgccgtgtgccctcgcaactgacaatgagcaatatcgtgttttctcgagttccttgtgaaggttgtgaaactgttctcgtagctggtaaccaacaataaccgagctttatttgctttctacccctccatccaaaaagaatccaattctagctatgagcctaaacatatgcgtgtccaggttcgtagctaggatttgcatttttctagaatggagtagtactttatagtatatctttatacacactgtaatgaaataccaatctcaatgcatattagaaaagttaattcagaacgttagatagacagcctaagcttcacatggtcagagccacaacacacgtgcaaattttcagacatcttgtgcattccattctaggagtaggtgaccatttgagaagatagtagttggctgcttctaactcaactttctgacgaacatagacccttactggtattctcattgtagtcaagagcatgttccaagtattcatggaacataatgcagcagtacaagcacaagaacagtagtgctctttctgcatcaacaacgctgcgaaagagaattcttcatgtctttcacttcacaacgttgaatcacttggaatctatcactgactggttcccgttagcagaattgtcctccttcaaggaatttcttaggtacggcgagtctttatacttggcgtataatggtaaattcagggccttatctgatatccttgcatcctcgtgaatcctctctatcaagctctcaagtgaaggaaagttggcctaggcattttcataacaacgtgacaagtcaggaacatgcatcaacatatagtgggatggcttctgcagtataaatagtctggtcctaaattacctcgggtcgtatgtaaccaacaataacaaggcgcagctcctctccgtaaaagtcttcaccaaaatcgtgaagcaaccatggttcctgtgaccaatgtcttttagaataaactaatatactgaagtactaaacatgaaaggggatgtattgagaaacactcacaatagtcttctccgtgttatcaaaataagggttccagccaatgctcatgaccatcttaaatatacctcgcgttgaaagtccagcccagccaaagtatacccctgatgtatgctctgatagtacgtcggagaagttttctgcaggtaagttggctgcaaggaaaatatatagctatcagtgctcacaatggaaattcggcatgctagcattgaaaaaatgaatcggctgagtactttgacatggtccagcaaataaagagagtaacacaccatatgagaaaaatcattcttgcaattcatagaatgtaaaaccacaaaagccgtagagctcataaattactctctagttatatgctccaccatacctgttggaattcctagtactttagaaccacggccaaatcctttaatcacaggtccaccaataaaccatggttctattggtaaggtatcatcgatccctgcataagaaatatgtcagtagataagttaaagatgcccagaattttctaacagaagtagtcccaagagttagagcatacaatcactaaatggtggcaatccccatttttcaggctttacgtcaaggagggaattgatcacctcatcagcagaactgaattcagcagtccttttggggactgaaggtacagctatgacatgcattcctgcagcttttccagctgcaacacctggtctagcacaatcaataacttacagtattaaaggtaaagttgtgaagagaaaagtagaatatgcacagttatgtttaagtgtagatcaagataaaatgtacacagctaatcatgcagtgcaaatttgcacacaggagaaccatacataacaggaaaaaaacttacaaggagtcctcgattactaagcaatttggaggatttgtattcattcgttttgcagcttccaaaaatcttgaatatcaacaccccagcagttttaaggaatgtcggaacaaaagcagatcaaagcaaaggaaatgatatgagatgagttcaaaagatccataaagtaccagtaacgaaaatgctacatagcacacagccttacatatctggggatggcttccccttctctacttcatcaccaccaacaattgcggagaacgactctttccatcctaaacatggtgagaatacagtaattaatatatgatatatctgtccacaaaatcaaagaaaatagcatgcaaattcaggaaaaaattttaccctaaagtatgagagggttaccttgatggcaggaaattttgcgtcaatgtttgatcttggtgagttggaagccaaagcagctggtactccattactcttcaaatgttttatcaaccgattagctccaggaagagcttttatgttgcaccatctgcaatatgaaattcattatgagaacacgatattttttccctttttctatacaatcttctttgcacattacaacatgaaaattttatcttttgaacaatacaatctttccaaaacttcagtttaaaataaaatctgcataaagggctttactatgttacacattgaacaattcttctccatttatataaagtacttctctgcaccatacggaagttcagtttcatgttcaacttgaatcgaaggagcttaacaaaccagatattataagaaatccggctatttagtgacagcatacgtagtttcttacacagtgacttacaaagtgaaacttgcatttcattatttcaaacaaatgctatacaaaaaaacagacatacttcctacttggcattgacattttgacatggttccataacaactagatgcttgttcatagagtaaggtagaaaaattggaatccatgctaataaactatagaggaatgtgtaaggccaacctactggtgacattttatattactattatttccatgaatcatttggcaccaaattcatcagagcatggcgtgtcgatgcatattatgtgcagatgcaaacataggtgatttaggtgcaccaaaggaagagatgatttaagatttctcgaggcaacattttgggggatactgttgagaagtggtctataaaggacacatgtcagtaatttaaaatatccaaagagaaatgtacaaagattctccattgaggtagcacggcagtatgcaatttacaaaatgcaagttatatgagtgttaagaagtttcagcaacagtactgctcattgaacattggagtaagcattgagagaaattcttctgttgagtaagggagtccataatcttctaaaacaacagctgctgcctcataaggtgtctttccaactaatttatgagctttcttgctgtcccactttttcccatttttgactagaaatggtttcagcacttgacttacaacacagtctgccaaatggtta

SEQ ID NO: 23313 - DNA, 5470 bp, Oryza sativa
atgttcttataactaaattagtaagaaatcagaattaaaagcaaggttttcaagctttgatggaaaatgagtactgttcacaggcaatcagtatacatacatattaagcaatgtttagggtgatcatgaaacaattggaacaattaaatgcttcatatttccatatacgcgggcttgctattttgttgtaaaattggaactttgtttcaagctgagattgtgtttaaaattgctcctttggctgtcctcaactggtcacataagttcactcggtttatactaattaaggttacgaactaaatgatgaggccatgtcatcagcactagactgaattctacaagatggcaaaggcaaaatactggcatgacgcacaataaccctccagcccatgctaccaaggtgagctgaaccgtccgcaaccagcagcaacagattgctgcgagacagcctcagacttggcatgaagccaaattcgcccgcttggggcgcccggctcaaccccaccacactagggcatttcaccgaacagctaccgcgcagaggtgaggcgactctatacgtctgagcaacaagggcgatcccgcaatctaatccaatccccccacccgcctttgtcgttcccgtagctacccgagcacgcacccgccaacgcacgcgaaccaaccccgctgctcggggaaggcatcaacggcgatgtacgccccaccccccgggcgcgcctggcggaggggaggaccggacgagcgaagcgaccacggtggaggtgaggttcaggagggctgcggcttaccccgcatgtgtccggcgacggcgtccttccctgcagctgcctccggcgacgggtccggcggccttggcggagggaggccggggaggaggggggataagccgaggggacggtgggacttgggacggaatgattcgggtggaaacggtgagtgggtgggagacgtgggagtggggatggggagcgacccggagagagacgggctcgaatccgacccgcagaggcggcgatcggggattttttttaaactttttatttttttaatatttataaaaatattattccgataaaaatatttacataagtaaaccctgcagccactaacggccgctgagcgggcatacgaattttgcatgcgatgaaaattgcgtttcgacaagggacctcaatgcaaaatacgcacacggcgccgtgtgccgcactgccacgtcaccttgttgctcttcacttgggcgggtctatttctgtaaatattaaaaaaaattaaaaatgaaaaaaaatcgcgatcgagcagctcgagaagtgggcctcacgcgatgcgcggaggcgggcctggccgtgtgatactaagcggccgacgatgaggcccaacacctggcatgcagagtcaattaaatagttctaataaatttaaataattaataagatgggttagtattatatatcactccataatctaattttaaattcgaattcaacaaattataaaaaataaatttgactatgaattcaaatggttgtttttttggttaaagaatggaattgctagaaacttttgcaagttttttctcccaaaacttccagatttgtggccatcgaatcatctcaagatttatgcatgaaggaaaaaattgctacaaagaaatttttacacatataagcgtaagatcccggtgctagccaatcaaaccatagtcgaatataagttatatcgtagttatagtgcaactatagggcatgtttgggggagcttctagccgctgtagcttctcctagaatcagaagctcccctaacagtttagcttttggttcagattctgagaagctgtagttatagctagaaaataaactagaagccaaaagctgggaaactcaatttttccaaattctcagaaattggttaccaactagctgcttcttaaaattttaagctccccaaataggcccataatatagttacaatataattatactttagttattctatacttacatttgaaagttttttactcaaaattacattctatcattcttaagtgactagctaagggcctgttcactttgatgctaaaaaaaaccttaccacttgccaaaattttggtagtatttcttatatagttaccaaaatttggcagcaaactaaatgtagttattttttggcaactttaccaaaatttggtaaggttaaaaatggcatcaaagtgaacaggccctaaatacccatgcgttccaatgggatttacaataaagcccaaaaagaaaaaaaatcccaacctctaatcatcatatcatatattcatatttggtatgcttctaatcggtcgtccaatccaaacataaaaatcggacagctcttgactgccttgctctgacatttgtgaccgcacatcagcacatgcgatgcatgccacctttgccagtgacttgctactgcatacctattgctactctctctcttctctctccactccatgcttgcatgcatacatttcataatattcaaaacgatttttctcctaaattacttatccaatctacaattcgatcacaccattgtattcgttgtaatgaaatcttcacaacaaaatgtcacatgattatattataataaaaaataattatatgtttcaatctgttaacattctttgtttcatacgtaatagcgatatgtttcaatgtgtgtattcaacatgtttcgcaaaatttccaaaactaactgcactactctctctccacctcatccatacatgcatgcatgcattttaacaagtttcaaaatactttttctcctaaactaattatccaatctacgatccgatcccatcgttgtattcattttaacaagatatggcttgattatattttgataaaaaaatagcgtatgttttaatccgttaatacttgttgtttcatatgtgacagcgacatgttttaacgtgtatcttcaccatgtttcataaaatattcaaatgtttcagttgctagttttttgtttcaccatatataacttaatgtttcacttgttggttaactgcaacatttgaccgtccgatattttttggggcattggacgtccgatgggtagattcctcctacccatcggacgtttaatgtttcacttgttggttaactgcaacatttgaccgtccgatattttttggggcattggacgtccgatgggtagattcctcctgtacgttgagctactcaattgatcgtagagagtaacaattgatataaattatccatattgtattttagtgtatctatattattgtatttgatttatagagtgaacattgacatcatgggcccacatgaaagtggtggcggtggtggcagaaccatcactacgactatagaaatactaaaaaaatacatattaatatatattttcctcaaaaaatacatattaatttagggttaggatttatcttataattcttttaaaaaatgtatttttttataaattagcgtggacatacactcaaagtgattagaatctctctccgagctcatctcgctttgatttgcctagctagattatttctttatttacactataacttacttccattagattagatatatgattgtatattttttttcccttataatcgatatatttttctgatcatatgctatcacgttcttttattttagaacgtacagcaccttaatgatcatgtggtaggcaataaccacgcgtccatgccaatgttagaaggatatcatagccctaagaaaaacttcctaacaaaagtttgatcaccatttgacaaccatcctctgcaccaaccaaaccatgtcctgatgtcatgtgaccctcggtataagactgacccaacggtcggtaaactgaaaaaaacctcactgcaacgaacgagaaagatacatgaaacgaacgaaacaatggcttccatatggttctctcccacctagtactagctaagctagcttctgcttcacaagttattattagctactgcattcggcgttgccatggcgcgcgcgaacatcacgaacgccgcccggggaacgacatggccggcctcaccgagcggcgccgcagctgcgacggcggcggcggcggcgacagcgacagggacggcgccggtagcggcgccgagcggctcatcgccacgacgacctccggctggagcgtctgcgagcgctgcagcatgtcgaccatgaagggcgtctggtaggtatggatgacgctggtgagctccgtcgagtcgccgcgcgccgtggcgcgctgccacgagtgggagctcaggccggcgagcatgtaggcgcggccggactcctcgtaccgctccgcgtctccaccctgtcatgcatctccatcaggtccgccgccagcgccacggactgcgggtcgtcgtccgcccgcgactcgagcacgccgcggcgctcgtcgaggatggcggcggccagctcgaagtcgccccgctccgcggcggcgcgcgcggcggccatgtcctccgtggcctggacgcgatgcagctcccgctcgacctccggcgacatgccgtcgtagcccacgggggcgtccaccgtgcgagggacggtcaccgtgtcgcccccgacgcggacggtctccatggtggccgtgctccggtaggtgcagctcggcgtgatcagggcggacaccccgcgcgccgccgggacgcgcacggtgacgaggaagtccctctcctcgtcggcgtagaggtcgccgacgtgacgaagccgccgcggccgtcgccgtccacgtggctcgcgtagccgcccgacctgacggaggtcagcagcacgccgtcgtcgccgcactcgacgctcagccgcagctcctgcgccaccacgctgagtaggccgccgatgcactgggcgaacgcgtcctggatcgagcccgccgcgtcgatgaacgagaacgtgccgccggacatctcagcgatggagtgcatcgccggcgagtcgtggtcggcgccgaagccgaaggcgtggacctgcacgtggcgcgccgacccgcccccgggaaggagccagctcccgaccagcagcgcgcagtccggctggtcgccgcccccgccgccgccgcgcggcaccgggacggtgtaggtgtcccggccgtcggagaggaggacgatgctgcacacggggttcctctccctcctgtcctccatcaccctcgccgccttcctcagcgcgtcggcgatgttggtgccgccgtcggcgacgagcgagctcaccctctgcaacgcgcgctgccgcccggactccgtcatcttcctcagcgggaacagcctcctcgccgacgacgagaacgtgacgacggacagccggtcgccggggccgagcgcctggatcacgaagctcatggcgcgcttcagcagcgccagcttcgtcccggccatgctccagctcacgtcgagcacggtgacgaggtcgatgggcgcgcgggaggtcaccgtcgccgg

SEQ ID NO: 23314 - DNA, 2770 bp, Oryza sativa
ttcagcaggatgaagatccaactgttcatcgtcatcgaaaatgccgccatccagcgtacgaaagatcgggagctgccattgccgggtcacgctgtctccgcgagacagcctgcggacaacggccattcgctgatgctgatgcctgtcatccagtgggtgagggttcactcgagctgttccaagaagactagcatctgctgctgctgctgcagggagagggccctggaacggcagctccttccacacggcgcggcaaatcgggcagacggtgttgccgtggcgaacgctggaggagatgcagtggaagtggaacttgtgggagcattccgcggtgaacaaggcttggccattgcctgaacacattcctccgaggcaaatggcacatatcttctgaaaaaagtaaccaagaaaagcaacagaagatagttagtaactgcagatcgatatagcaatcggcagagtggagtttctttgaaaaaaaaacaccaattgaagttaaataaaaaatatgatccagattcatgctaacatgtaaagctttgttccctagaatgaactgtacttatttcacattacaaaatgaaggaatgagttgttttcaagagcatcagatattagcaatgactgaaaagagggaagggagcctaaataatagccaaattgtatgctcctagtgagtcttagagaaaactatagtagtatcaacaatgtcaactgtcatcagcatcagcacaagaggctaatgtccagtccaagtcatgcaatccaagtatacaaggcagactgtaagtcgtaaactactactattattaattaaacatcaagcaaaatagtcaactcatgcagccggaccctgatattatccagatgctgatagaagacacgaaatcgaattagatgcagctagtaaaacattacaaaagcacatcaatcgatgacattgatgtcagctatctgtgtgtctatcctttcattattcagctcacccctttctggaaaagtatgaagcacacagtatatggggcagagcacatatactctgaattataccatatgggccaatctttcaagaagcatccacatattctcaaatacatgctgtttgcagcagaggatcacttgaccaattattgataaccagaaaaggatgctggtctccccctctgatcctctccctgtctttagatcaatgttgatatctaagtcaaaccaaccaagatgctttgcagatcaattttaactatagcatgataaggcacataattagagatgacattcgtgcatgtgaaatcatgaagtggattgatttaattgccaattgctgaggtaaatcttatccagtaaactatgttgaccaaatgtcattttatttcaagtatattttagaagctccattggaatattaggacaacatgttatatgataaatataacaggctacctcatcacatactactacttgggaatatttgtttgttaaaacgatccagtgttttgctcatcagagtgatgtcaagagctgaatttcctaaaaaaaaaaggtttctgtaagccttatctcgtacatggcatcacccaactgatcaaagaaaaaacatgggctggaaagggaaagaaaacagtaggcttcaaaagatgaggagagagttggtgaacaagagaggtgtcctgcccttcctcggaattgcacacataattatacaacagaacaagcaatcaaaattttcgtccttttctagtcctaaataattaagaaactattgcatacttctccggttgcttactagcacacaacgcgctacattcatgataatttcaatggataaaaaaataaaaaaaacaaacataaaagtattaaacacgcgcaagaaattcaaatgcaagaatcaacccaaagaccaaaaaaatacagagaaaaggtccatgcaagcaaccgggcaagcagaattccctagaagtaaaaacaactaattcttttagatggcaatgtaccaatcaaagcagaaaggtattgcatggtagtacgatgttaagtagcaacgacgttttctccaggtttttggcacagtttaacatcgttggcatgatatggtgttgatctacaagacgatcaacgaaatcaggtaccccgacaaaaaccctgtctcagatgaaacacaagtagcacaagcttgggtatcataatgaaacaaaggatctgttgatttcggtgaaagatggcaaagggagcaaaataatgcagaacaacaattgtattcggcatcatctctactactttggaagtcatccttctccttcaccactacaattcaccatcatagttcctcatgtaaacaaaccaactctctaaaaaaaatctccccacccaaaaaccattgttttcacgcgaagattaacctgaaaatccagataggacgtagcactattcttttttaaaaaaagatcaggcaaaagtttggccttcaggatcactgcagtttttctttttgtgacaaaaggcatatatcagcataagatggatatccctttacaaaaagaaatctgactaagtttcacaatgattccaaattgcagatatgattaaaatccccgcttacgtgcggggaacaaaaagaactagcgaacactgattaaagtgccgtgtttccttacctaaaccctacaaagttatgctaatctaaacggatgcagccctcttgatcatgaatcattcgaacaaaaatatcgtatcaactttccccaggcgtgtcctagaactactatcagatttc

SEQ ID NO: 23315 - DNA, 16246 bp, Oryza sativa
ccttgagaacacccttaaagactatcgaggagtcatcccttctaaatacggtcacatcaacatcggtaaaaagacaattgtagcccatggaacacaattgagaaacggacaagagattatagtttagagattttaccaagaggacgttagaaatggaaaggtcattgtagattgcaatcttacccaatcccattacttttccctttccatcgtccccgaagactatgttctcttgcaaagagccattaggatcaagggagcaaaacattgattcttctccggtcatgtgatttgtgcatccactatcgatcacccaacttcttccaccggagagatattcctacaagagatcaatttctagttttaggtacccacacttgcttgggtcctctcatgttagtgacaagtgccttaggcacccaaagaactctcttgatggaaacatttttgccccttgggcctacatacttagcaacaacacgaccactagcattcttcctaagaacataagatgcatcaaaagaacaatgtgaagcataatcattaggaaggatacttttggccttaacaaaattgctaagaccttggggcctcttgatcgtcatactcttgtccacctttccttttggtggaggaacataccaaagaccctcatggttgaagttgtccctttgatagcctaggtactcctttagggccttactacccatatggcacttaagtaggccattgtgaaggagtcccataagcttctcattttgcttttgcaaagcactcaaagaaatagagttagtagcacaagcttcaatatcaatatctttgcatctcacacatgattcattgcttgggagaattttggaacaagacggctcgctagggagagagacactattctttaaggtttcgaacttctcttcaagagagatgtatgctttgtccaagccatccactctctcttgaaattgagcgttcgccaccccaagattagcatgagactctttggtttgcttgtaaagccgtgccaaagcctcatttttctctctctccttagcaagctcactcttgagttcatgagatcgctctttctcacgaatgagcaaagcctcttgcctctcaagagttgcatattggtcctcaattctcccaagcaactcactcaagtgtggtagagattccttagttatggacttgaacaattcgtcatccataacctcatcctcaacctcatcctcctcatcactaacaagatcatcattaaatgatttgagaggagaaggtaccttaggctcctttgccatgaggcaaatgggagcatcctcatcacttgagtagtcgaagagtctcggcggtgatggaggcttgacagcgaacgtggcaactccttcttcatcacttgagcttgacttggaatcagagccgaaaatcatcccaaggtgagcttggccataatgttcccgcttgctatgcttatacttctccttcttctcatccttcttcttatcttccttgatgtgggaaccatccttgaggtgagggcaatccgcaatgaagtgcccgggctcttttcacacgtagcacactcttgcggaatgtcttccacttgacttgttggagtgatgcttggaagaatttcccttgaagaagccgcttcgcctcataaacttgccgaacttcttgacgaagagagccatttcttcatcatcgatctcctccttgctcttgctcttgtggttctcttcttcttcttcctttgccttcaatgccaagtcttccttcttgatgcttgtcgttgagctttggttgatgtattggatgacctccttggactcttgcacaagcatgtcatgggcaagaatgcgtccgagcaaatcatgaggtgtgagagtcttgtagtccggacgctcatgaatgatggtaaccaaggtagagttccttggagtgattgctcgaaccatcttcttgaccacaacctcatcggtcatgtccttggaaccaagtcccttgatctcattgataatcttgctcaaccggtcatacatgtcacttgggctctcaccatccagcatcacaaatctctcaaattgccccttgaggatctccaccttggactcacgaacactatccatgccttcatgcaagttccgaagcgtgtcccaaatcactttggcactctcaatgccatccacacggttgaactcacttccactcaaggcactaagtattgcattggcggcttgagcgttcttgtgctcattctcgtcgtcctccttggtgggatcttcgggattctgcaaaacatagcccttttcgactattctccaaatagatgggttaatagacttcaaatgcatcttcatcttatgcttccaagcggcatagtccataccattgaagtacggagctttgccgctataggtactcacataagatgtggatgtagttggatagtcataaggaaacgtagctcccttatcaccatctttgccttcccccgtttggcccgacatgatctctccaagcggttaagcctaattaggagattaggctctgataccaattgaaagggtcaattaggcctagagggggggcgaataggctaatttaaaactttatgcggaagctaaaactgagttagggtcggaaagtctgatccacagtcagactatccgaaaatatcagatagtctgatattggatcagactgtctgatccactaaaagaacactacaagtagatctagtgcacaaacaagagtatggcgcaaacagcgactagatctatagcggcacaaaaaacaaatctaaataatgggagaagagatatcaccaacaatgaagctcacctagttgttcctagagttcaaatccttgaggggattctattctccgttgaggagctcactaagagccgggtctttgctaaccctttcctcaagaggttgcactaagcacttctacttccactaaggggtatctctttccttgtggaggcgagatccggtcttcacaaacttctcccgaccaaccacacgtagatcggtggctcgggagtgacacctagccgtctaggagtcctcaacctccaagagtaacaaactccacacaactcttggtcaaccctagtgctcaagatcgagtgaaacacacactaggccctcaaaccccaaatccacaaccaccaagatccaccacacaaagaacaagaggggatttgagagagggagagagagctcaaagatccaaaccaccttagcagcaagctcaacccaaagtgaatatgaatgaatgagttgggtaaccctagaaaagggttaggtggggggtatttatagaagcccccaaaatgtggccgttgggagagaatcttttcatcccacctcggaaagtccgaggtgacatcggatagtccgatgtttttgaccaccaaccaggccagagacagagaacgaaattctggaaaatttcggacaatccgatcgatcggatagtccgatgtcatatcggatattccgttatttttgaaccaagaatttcatcctctcacagagactcaagttccattgaatttcggagtctctggatcatcggatactccgatcacatcggatagtctgatttaaaactcactcaaaaggaataaaaagcaattcaaaacagagagtgaagttctgagaaatttcagatagtccgacgtatcggatagtccgaccttatatcggatagtccgatattttttagccaacactcagacccaagacagtgagcaaagttctgtgaaatttcggatagtctgagcatcggatagtctgatcaacatcggatagtccgacagacataaaacaggaacacttcaaataaatgattttgagcactagtgttctaccaattatatgcatgtggcatccctcttaatagtacggcatcctaatactcaagaacacaagatatacatggattagaagacaattaccacaaaagatgccgcaatacttattgtgttgacatccactcctttttcatccttgcatatatctcaacaaaaagcattagttaccctctaactgtgttgtcattaacaccaaaataaatgaggggtcctagatgcactttcactcttctctttcttctcttctctcctcctcatattcctctctctctcaaactccccactcccgggagagaacattcttctctctctctctggggcacgcggcggcagaggccggtcggcacgcggcagcgagcgccccacgcgtcaaaggcgacgagggcaacgccggctctcccctacccagatccgtgcgaatccaacagcggtggcggggggagcacaggggctgcggcgggtgcatggcgggcggacaatccgcgcccagatcctgcggtggcggcagcggctgccgtccctcacccaaatctgatggtggtggccgtcccccgcccagatccagcggtggctggccagcaggcgttttgctatttttatttttgtgtgtggacgacataaacatccgcacacggaaatccgattttcgcatgtgggtgcgccaccctcatagaaaaatagagattttcatagacatttctgggcaaacggcccggaggtccgcaagcaaaaatcacttttggcctgtttgaaaaaaattatattttactagtcccggcattcgtcagccaatccgtcagcagttgcaccaacaaaattaacgaatctgaaaattacaattttaccactccacgctcatatttctatgactatcgtaccttcctacgtttctactttcattaattagagtggtagtacaattaaatcttacccattggaaaaataataattgacggtttagattaatttctaccagtagatatatagcatcggacagggactcgtgactgttgtcttgaagtatcccagcagaaatcaattgttcttctattggtgttcatttttttctgaatgactgcttttctagtactaaatattggtgatgaaacaatgtataacattgggtgtttctgttataataatctcaccacactggtgatgttaatgtatatattgtctgacataagctgtaaatctgagatctttgctgatgaaattgtttggttttgcaggtttggctgccactggttgctaagagctacaactgcttccaatatatatttaccgtggcctatgactctggttcatgtggatcaaagttagattctaaggagtagacttgtaagtgtgaaatcatcgtcatgattaatatttgtgatgaacaattggctttacaaatgatttaatcaaagaattggtttgaatagatgtgtggatgttggtgtgagtgcgtgtgactaatgtgggtcaggttgtgatatctgcgcccagaaacggttattttgtctaattatgtgcaggtgacttgaggtcagccttggacaatggtgaggaccgggactatgctcaggaagaagcagaggtctagtgcggtcgggataccatgtgaaaaggtgactagagtcagaattcttggaggtcaacttcggtcaatggtgaggatcgggactaaacttagggaggagttgaggtccagacggtcaaggataccgggtgacaaaattggatacgagatggcatacggtggatggacatcgtgtgggagagatcttcacaacgggcttcacgaggtgtgtgtgcaagcgtcggtgttcgcgaaggagattggagtgacaaattgagttagagtatatgatgctacagtacacgtggtactgtagcatgcatatatgtgtgcctactgtggattgcagtagcgtggtgatgcatgttgtgctatgcatgtgtgtatgcgtactgtgcagcatgcagcggctcggcttggtgatgcaagcagggcgtcggtctggcctgggcatgcggcaaggcaagccgagtctgactcggtgaattttatgtggccggctgtggctgcaggtttcggagagtttgtgagaattacaatttggtaaattgtaatttgatttggtgattaaggatagagtcatagtatgactaggagttatattcctactttgagtaggaggattttcatgtataaatagagagggagcatgaggctttccgggatcggttttaggaagccgagtttgagagattagatagggtttcgagagaaacttataagggtgctttggctgcaccttgtgaacaatacttgagcaataaagaccatattcaatcatcaacgcatcgacgatctatatatattccggttttataagttttacatttatgtttggttttggcattaacatgtgattgttcgttttgctgcgattttgttcaagttaatccattcaaaacctttctagtacttcatagatcagatctggaaagtttcgttgattggttcttgttagatttgaatttgcttaaattttaggttttgttcggatttgctgaaattctgatacagctgactttcgagggtgttttctcttaaaccgtttattagtttgcaaatcccttctgtggagttcttccttagtttgtctagtttattctatcaagtttgtaactcgatccaatggttgtttaagagaaatcgtgtttttgccgaagcgctgtcgtgctgttttcaggctgacggtcagaccgcgagaggacctgcgttctgaccggttagagttcggtcagaccgatcctagtaggtcagatagaccaccaaacgtgtgttccattggcttttgagattggggtgtgttttgatcgattaagattcgattatttgacttcgctgacgtaatctaccattcaccctttctggtaggcttggctactcgtgttcgatcctacggtaggactcaagtatctgttttggctgttttcctaataattaattcctagttgagagtcagtgattcatgtagacattagccaatagggattgctagagagtggctgattccattaatacaatagcatatgcctttttaattacggctggttagtatggttaatttttgctttgcttgtctagctagcttcggagcacatttgattacttgaggcaagctcatctatcattgaacgatttggtgttccatcttctcagtactcaataccggtgacggcacactgtttctttagcccttttactcgtactttgatgatgactgggttctttaagatggagcaacataaattttatatattttgtttgaaaataagtcgagttgaccttctgttcatcacagtaagcgccgttccataagcttggtcgtatgctatatggaagtggtggccagatcatacatataacatggcatctcgctaaactatttttcaagacaaagctagctaggctgatcatattaaatctatactttctataaagttaaaattaaaatggactaagtctaaagctcaacatacaaccatgccgcatcgtcagccactagcaataattacatatttaatctcatgcaagtatacaacatgatctacaatttatttaattctgcaaatcaaaatgcaagcatatccaatcatcaccactcatgtcatttgcacaatattttaacaaatctatctatcacttctacaatatttaacatatacttatcaataagttttacactaaagcacatgtatcatttgactgataaaccctgttgtttcattattttttttctttttactgctagcttgattgtaaaagaaatatatattgagaattacttagtaattcccacagcaaagcgcggggaatcacctagtataaaaacgaataaaaccttacacgaaaaagagattaaacatgccaacacataacaacgatgattcacattctataatgctacaagggatgctagcagaccagcgcaaccacaacgctgactaaattctatattcatgtaacgggacaaagtctttaaaatggcatattgcttgattatagaaaaatgatactgggtaagcttccaatgcttggatcctcacatgcagacctcggagaagttcatgttataacctcggataacttccattacacaaaaattgctaaactcattgcaaaagagagcactgagaggttgacaccgacggctaccctgtcttaggctcttagcctgctccgctaccgatagatccggtgcgccgccgtctctccttccgcgccaccgcacgctgccgcggcttaggccttgtttagatgggactaaaacttttaagtccctatcacatcggatgtttgaatattaattataaatattaaacgtagactattaataaaacccatccataatcttggactaattcgcgagacgaatctattgagcctaactaatccatgattagcctatgtgatgctacagtaaacattctctaattatggattaattaggcttaaaaaatttgtcttgtgaattagctttcatttatgtaattagttttgtaagtagtctatatttaatactctaaattagtgtataaagacagggactaaagttaagtctctggatccaaacaccaccttaccaccggtgagcgtatctgaattctattgataaaggaagactagtttgtatgtctgtgttcttatcttcttattgacatgtcatatattgtttttgttatacatatataggttacagcatgtgtatatcaaagttaggcattccaacgagtagtattgtaggactcaagtatgtgttttggctgttttgctaataattcatacctgtcgagagtcagtgcctcagtggttcatgtagatattagccaatagggatagctacagagtggctgattccattaatacaatagcaatctgctttttttaattacggctggttagtacgttaattttttgcgcttagcttgtctagctttcgagcacaattggttaactcatctgtcactgaacgacttggtgttccatcttgtcagtactcaataccggtgacggcacactgtttcttagcccttttactcgtactttgatgatgtctgggttctttaagatggagcaacataaatttctcatatattttgtttgaaaataaatcgagttgaccttctgttcatcacagtaagcgccgttccttaagcttggtcgtatgctatatggaagtggccagccagatcatgcatataacatgacatcgcgttaacttctttttcaaaacaaaggctgataatattaaatagaagaaacaattataaccttacatgcaaacaagacattaagcatgtcaacacacaacaaaggcgattcacattctataatgctacaagagattcgagcaaacgagcgcaactacaacgctgactaaattatatatacatctaacgggagaaaggctttaaaattgaatattgaatgattatagaaaattgatttatactgggtaagcatccaatgcttggatcctcacatgcagacctcggagaagttcatgctataattaccttggacaacttccaatacacaaagtgaaaattgctaaactccttgcaaaagagagcactgagaggttgacaccaccggcaaccctgtcttagcttgctccgccgccgacaggtccggtgcgccgccttctctccttccgcgccaccgcacgccgccgcggcttaccaccggtatgtctgtgttcttatcttcttattgacatgtcatatattgtttttgttatacatatataggttacagcatgtgtatatcatacatacctcatcttagagttccttgacttcagagttaattaaaaagcgatattgttcttgtgctgaaaagtttcaagttgaaagcaaaagcatattggatgcaataaactcaggtttacaccaaatgttaccctttttattttgtcacgtgtaactgtgtaagcaacgacacgaagtttcatgagattgttggtaaattaagttgcaatctgttgcaactctgcttttagtggacgattacttttggaatagaaatattgttgatgctatgcacctgcgggcaggggccaacacatgatttttacaatgagggtaggaagtttattaagaaaccaatgctatataatactagagtactgaagatttatgtagaaaagcttaaacaaaaatagttgtctcatatgctttaagtaggctaataattagtgttttggttgaaaaggcaattttttgtaccctactatagtataaatacctaattggcatactatctaatgaatattttaccaaaacatatataaaaaagagtgtgcatctgtacacctcttgtcccatactagctctgcctctgcccgagggattaaaatctacaattcatttagatggatctttaacatacagttttcatatgaccaggcgatcatcaatttatttggagcaaggacaatcatattgtctaatggatcttcaaaaaaacaagcataatgaattcatcgaaaagccaaaatggatagaggacaacatttctaatataaaggcattcacgaaagaagatataaaaggaattaccagtaactacagcaaaaggcttggaaatggtaaactcggaaaagtttacaagggtattcttgatgataaccatgctgttgtggtgaagaagtatattcatatggattctgaagaagagtttgctaaagaagtaattgtccatagtcaaatcaaccataagaatatagtcaggcttatcggctattgtactgagaaaaataatctaatgatggtcatggagtatatgtctaatggagaccttgattaccatcttcatgtcaagaatagcctcgattcattggacataagattgaacattgctatagattgtgcagatgctctagggtatatgcattccatgtgcagccctgttttacatggtgatgtcaagccctccaacattcttctagatgacagttttaatgcaaaaatatcagattttggaatatctaggcttctctcaacagacaaaactcatactgaaaatatgattacatgttatatggaccctctgtattaccaggaggggcgtctcacctcaaaaagtgatgtttatagttttggaattgttctaatggaactaatcaccaagaaaagggctacatgtctcactcaagctcttgctgaaggacaagagatgacagaattgcttgatcctatgattgctaatgagagcaacatgaaggttctactggagattgaaaaactagtgcaggaatgcctagcagaggatattgatagacgccctgatatatgtgatgtggctgcataccttcggatgcttaggaagatgagtcaacaagcaccacaagaaaattttggttggcacttgtttgcagaaacacaaaatgattttaaaaagcaaagccatcaaggtacaaacattatcagctctatcaagatggtgttccctaggatgatgggcattctcaacgtgaacatggccaaatctgaaaacaaaggaactccgctctatgttagtggcaaaagaatattcacagcattggaaataaagaaaataacaggaaactattcaagaattatcggtaaagatatgtttactgtggtctactctggaattcttgaggataacacacaggtggcagtgaagacacacaacatgtttgaacgtgggaagtggagatgtgccaatgaactgaatagcctttctgaacttatccataagaacattatcaatctgttgggtttctgctatgagatggacgctgtaatattggtttatgaattgatcgagcgagggcacctctgcaacattctccacggcaatgatactaaaagattccctctcccactagatttacgtctagacattgctattgggttggcagaaggattgtcatatatgcatagtagatcaaaacccatactacatggaaacataagaacagtcactgtacttctcgacgacaaatttgtcccaaagatatcgggttttgggtcatcaaagattggtgaagatggtaaatgcaggattgtggggagcgagatgggctacatggatgaaacattcgttaataccagagttctcacacggaagagcgatgtctatagttttggagttgttctcttggaactgattaccaggaaacgaatttattataatggtaaggacaataatactgccatcaattttgccaaagtttatgagaaagagggcagtgggagggctatgtttgacaatgagatcagtgctgacaaaaatatccctaccctcgaagacattggcattctagcaatgaagtgcttcaatccggacatagataagcgccctgaaatgaaagaagtatgcgaacaactgttgatgcttaaaaggtctagtaagaagggcaaaggaaaaatataagttctcacattgaagatagttaagagaaataaactaaaacttgatgcaggagatttgtgaggatgaggaatatgaagtacattacattagctcacaagatcatttcagcatttgtttgatcagtcaattgctttttctcgttgtttggtgttatggtttatcattatatatctgaacttctttttagtatttggaacactaatgttccaactctgtattttctgtagggtgtgattatagtgccaataattttttattccttttttatctgtggttaacaaatactattatcgtacataagaaaataatacaataacaagcaaaatgacacactaacatcaaccaatgttcttaaaaaaaacatcatagtccaccacattatgcattccatataattttgtagataaaattgcaaaaccatgtagattcagcctgttcttctgtcaaatatgccattttttcacacaatttattcaccaacagtacatctggttgttcaaaagtattttaagatcagggtaggaagttaaaactagcattacagtaccagataattattatgctggagagtggaactataatagcggcaggtggagctaggaattttattaagcctgggcaagtctaactaagatggtaaaaccgctaccgactgatgtgatgcttatatgctaattttactatcaaattgaacatggaacaattttctaatagaagcatagttcaacatgtatgtaaatttttacttgttgaaaaacaagccgactgatgattcgttaggctgctaattgagtggatcacatcagccatggtgaagtgggcaagtcggcaacaggtagccacggtctaattgcatgcaacagtgctgcaaagctagctggttctaattaaaattctagcctgctactaattttgtccaagatgtcagcaaatctatggaattcaacacagagaaatcattagacctcaatggatcgcacaggcaaagcccgggcatgcaactgcccgtggtgcccaggcggtgaatccaccactgaatagcgggtatccgagtatggactccgactcaccacgcgaattaaactgtcgacctttctcgtggcatgtttggagatgcttcattcattaactagatggaatcccacgcgttgctgtgggacactatgtgaataaattatgtacgattaaaggaaaggtttaaaaatgaagccaatcaataaaaggatatctacagtttggttggaatatgatatgtatgacatataagtgatctaacaaggtcatccataagttcaatgaagttatgttgttcacttcatactacacgcacgaaggaaataaaaaggtaaattgtacggttggttttaattagagaatgaataaaattgcttcttgctaatctggtaggaagtgcataggtgaaacatgagaaatcatgtcatgatttaatcatggtaataaataattgtcaaaggtaagtgtttgtgataaacaaaatatgtatccgttcgtggtcatttgaaaaactataaaaaaaaaattaatattgaccccacaaacaatcttaaattaaaaaaatcaactacaaagttgtatatcccgtcaagagatacaattttttatataaaatttgtcatcatccaactttatatgatgggcattgtttccatattagtgatgctcacaatattttactaacgcggaacatactgaggtgaacaatcatttttataaagagagcctcaagaaaattactgaaagacgattttgttccaaccggagatcaaattgcagacggcattttttttatttttacaaaagcattttcagtttgacggtttaaatattttaagtataagtagaaaagttgtgattgaaggaggctgttagataaaatgtaatatttcatgtgtatgttatcttgattcagaatgtaaatgcaatcctagagctagttggcaataccaatccagctgctcacgcggcaccattcttgtaaaaccacggcgatgcatgattgatatcgcccctatattaacacaggtgcggcccaagagagattaattcaacgcttccacagctcatccgatcgagttctttctttacacccgcccaagctcaaaggaattgtctcctatcaatgtatctgagagcatgcaagttggtgcttaaatggcagtggaatcaactcatcgttacatttagatatcaatcttatgttactgtcccctagtcattggtacatgcactgtagtgtagtgtcaataatctggatgctttggtaagtatgtacaactgtttaacaatgctgtcgttattttttaaggagaaaagtccacggggccgcaatcaagttaattaagcaagattaatcaaacgcatgcatgcacacatagacatataagtaaacaaataatccctctattaatatattggatgaagaattgaacaagtccacaagagctagcgcagtcaagtgcgattatattagcccagtccattggaactgagcaattaatatattacaacttgagtatcaatatgaccatatgcatggcttagtcgtgcgcttatatattggattagccagggggttcaaaatgaatccaactctgatctctcacttcaactctatgtgtaataggtagagatagatcgagcgcaatagatacacagatagctcattggctgtgtatacccactttgggtgtaacagactgggttttcatccattttcttaagaaaagatagatagatagatatagcataggtgagatatacggagagacagggagaacataatgggtctctctagtgctattgaatggtgggaggagtggcagctgcgcatcctcgccctcagtagtatgggcattcaagtgttccttttcttctctgctatgatgcgtaagcgtgctattccttcctggttcagatccatagtatggcttgcttaccttggcagcgatgctacggtaatatatgccatggcctctctcttcaaccgccacaagaaccaagattacactaatagcttcaaagtacagggcagctacagcctggaagtgttctgggctcccatcctcctaatccaccttggtgggcaagatgttataactgcgtacaacatcgaagacaatgagctttggaggaggcaggtcctcaccactgtgtcacaaataaccgtgtctgtctatgtgtaggtcctcaccactgtgtcacaaataaccgtgtctgtctatgtgttctacaagtcatggtggctggacattattcacagtgacttgaggatgatgcaggcagctatgcagatgtttgtctttggagttctcaaatgcatagagaagccgtgggctctcaggagcgctagcattaacatgcttgttagctctaatagcctcattacaaagatagaaaagagcaatgaagaaggggatagaattgatatttctcttgagtcctatgtggaagaagcgaggaaatttgtcttgaatccttctgatgttgacggtaatagatgccactttaagccctatatgctatttgttgatctttcattgccatattctcttcggcttagtatcctcaaaaccttgtggatacgtgatgatgtgcatttattgttgcaagaagaactcgcgcacacttttcaccgactctacactaaattgagaacgttagtaccagatcatcatgtcgtgtggagtacggattggaaaaatattccaaaaagtccaagatcgatccgatcggttctcgagagtattcaaggattttacggatattgggtttgttcttcctgtttgaagcctccggaatcttcctcctaagtcataaagaagtttataagagcaatgatatcaaggttacatatgtactcctgtgttgcacaacaatgatt

SEQ ID NO: 23316 - DNA, 6227 bp, Oryza sativa
cgaagatgtgggaggtgatcgagggcgtgtgggtagagatgctatgcttctctgcatctagatgcagagggtacctacatgcgaagagtctgggtaatggcggagagttgctcacctttgtatggctcctgttgttacaaatggggatggagcccctagcagagaagctgcagagggcagagattccaaaaagaggaggaaacggagccgctagtgctgcttcattgtcttctgataagagcttggcactacagcgaaagaagactgaggttccaagtggagatgaaggaaatattgccgatgtgccatcgacttccaatgacagtatagtcattgatattggagacaatgcttcttgacacccatatttttaatatcttgttttgtatatttccttttttatgctgcatattgtttagtaattttgtttcatgtgttgttgctaacaaataaatctatgtaatgtcgtgtgatttttgttataattctaccattgcaacaatttaatcttgtgagtgcaatttttacatttgattgattatccttttgtgtcattgcccaaaagattacaactccactggtattttatataataataccaagcccgtttttcgaatgtgctcatatgaatagtgtatgtgcgtacttacagtgatgagtgtgcacacgttatgagcgcatacgtttgtagtattgatttatgtgaaccgtggatcttttgtacggactcgcgtgtcccctacagaagaaaactactactcccactaggagataattacttgataagaagcgcgcctcgtgccgtgagtggcgtagcgcatcgcacgggccatctgtcttgggggcacgcagcgtgaaggcgtggaggcgtgtggggtgggtggtggcggtcgacatggcgagggcacgcgtgtgtagcatattttagctgtgcgccattgtgccatatcccgtatgtgcgttaggcatgcgagagcgaggtttggcatcatgcgagccttgggcctggcaccatgacagaggtggattgcttgctaggccttgcctctatcggctgggctggccttggttgagggctagggggtagttagcgggatggcattgtttggttggggaataagttcattttaggtctctttatttgtctccgaattcgaaatttatatctagaccgtaaaaccggatacaacacatcccctaagttacaaaaccgtgcaaaagagatccctcagcagtattgtcccctactttgactgacgtggcgtctacgtggctcttttgactagtcttcgtcctacatggcattgacgtgacgcttacgtgacaattcgatccggaaaaataatagaacttgtggggtgcaatatcagtttcacacaaaaaataataaaaaatggtgaggtccatgtgagcccacatatcatcctcacaactccttatctctcgacgagaaggtttttccccaaatcggttcaccgtagttcgccattgatgccgccaatgggtctcgtaatagcggaaggtaatggccctatttctcctctcctctcttcctttcatcatgccgctcccaatcactaccaagccgaaccccctccgccgtgccgtgcacctgactcgattccaggacggaggctacgccatcgcagcgaggtgctcgccgacccgctgtctctcgtagactggaatcgcacgcacgcatgcggaatttaattatcagtttttgtgaaacaacatcactctctttttgtctcttctacaagcaatcccgaacaggtggagtgattcgttcagaaaacactcacccgtagatcgaagaacagccacgcaccgtgtaaatgacgtggatctggccactggtcaatcaacagcagcagctgtgatcgtgctccaccctgtcaaaacgagccactaaccatcccaatccagagagccggagagcagacgcgctgcagcaaccggcggcgattcggggagtaagggtcggggatcggggaaaactcgggtggtggtacggtgctggtgagcatgacacatgggcccatggtttttattattttacaaatcaaattactacgtaagcgtcacatcaataccacttgagacgaagtcctaatcaaaattcaaaagagctgcataggtaccacgtcaaccaacactagggataatactgccgtgaaatgagaattgagaggagaggaagtgagaagataaggatgacttgaaattgttttgaagatgatgagagggaaagagaagggcagtcagacttgtaggcaacctttaagaggcaagtttgcgaaaatcaattttctcatgcggtcgcttaagaggctagctgcaaaaatcaacttattttcacatgagggcctgttagtaggcctgcttgcgaaaatatattttttttacacaggtcttctaaggagccgtatgaaaaaatgtaggccgatttttgcatacggctcaaatcgatttttataaaccctaaccctaaaccctaaacccatacggatagacggtcttgcactcaaaagtttgtaaaaatggggatttttgcgtgtggccaatgcaaccgcatgcgaggatccaatttttacatgcgggcgcttaagctgaccgcatacaaaataaaaaaaatcgcaaaaataaaaaattccaagaatcgtaaaatacaccgccgccaccgtcctcgtcctctagtcgctgccggtgtccacgttgtcctccatcgcaagtgtaggcgcaggcggcgacagtggcaactcctgtgctggcgacgcccgacctatcggcggcggcggcggcggtgatgatgccgccgcaatcgccgcctccgaaccccgaggaggagacgctcctggcggattactaccggctcgcgacggtctagctacctgtcgtcagcgggggcggccgggttaatcgtgccggtggtggtgcagcccggctaagggtccgccgcgaagaagtggcggccacggtcgtcggagctggtgcgggtgtcctcgctgagcgtgcaggaccagatctacttccgcaacctggtgcgccaggcgcgcatcacgttcgagttactccgcgggatcctgctgcgggacgacgagcgcgcggaggtgctcggcctcacgggcgtcgccgggttcggcgccgccgcgtccgcgccgacctgcgtgccgcggtactgatgggggaccgagacctgtggctcaaccgcgactgccgaatcgtggggccgttcccgaggatctcggttggggacgccttcttcttccgcatggagctttgcgtgctatagggctacacggccaggtgcaggcttggattgactttgtcaaggctaggcagtcttcctcaggggaacccatagccacatctatcatcgtgtccggtggttatgaagatgatgacgatcgcggcgatgtacttgtatacactggacatggtggccgtggccccaacctccacaagcattgcgttgatcagaagtttgagggtggcaaccttgccctcgagcgtatagcatggcccctatggtattgagattcgcgtgatctgtgctgtcggcaaggtatacttctatgatggcctctataaggttgtttttggccttctttcccgatgcttcttcctttttaagaagaagtaaaattaacgcggtgcaccctgataacatctttgcatgctagtggctgttttgttttagtaaaataaaatgcttgtttttttaaataaaatcggtacatgttcatgtaccatcctaaccaaacacttaaattagcaagattagcctcgtttattcttttggccttggctcgcacgcacgcaggcacgaacattttgtgaatggttccgcacaggctattcctttgcatttaaacaaaagtaaaggattttgatatcatttatatgatgtcatttaaacaaaaataaattgtgcttatgcgcttcgcaaagcttcatgacatggaaaccatcagtttcatgcaatttggcacatgtgcgtgcactggtggagaaaagatttttactcccggttgggaaccttctatagtcccggttttccaaccgggagtaacaatccgggactaaagacgctatctttagtctcggttcaaatacctgggactaaagatcgatttttagtctcggttgatgttacaacctgggactaaagatgtggtcccggttgaaggtttttttttcttttttttcttttctctcttcctttttcactgttcttttcctattttcccaaatcatctcagatcaaacattcacagcacacaacaatatagttcatccaaatcattcacagcaatagttcatcccaaatcattcacataatagttcatccccaaatcattcacaacaacaacacaaatcaaatcacacattcaacacagatcgtatcaatcaacacacagattgaatctcacattaagaaaaaaaggaaaaaaaatccacggcagcgccggcctccaccgcctgccgccgcactggacgccgccgggcgcctcccccttcagatccggcagtggccggccgcctcccctctggatccgccgccgctcggctgccgcggcgcgagggccccgccgccgcctggctggccgccgcggcgcgaggctgcctccgcctccgcccggccgccgccgccgcttggccgctgacggaaaagaggggaggaatagaacagggagaggaggaggaggaagagataaagaatataatttattaactcctcgatctcgcgcacgcctcgtcctctccgccacgcatgccgatattttgttccggtttaggctaccaaccgggactaaaaataatagagatattttttctcggttgtcgttaccaaccggaactaaaaatagatctttagtcccggtaaaaccgggactattgtggattttgactgaccgatcaaagatggtttctccaccagtggtggatgtagcaaaaactgatggtttacatgacaaataaagatgtattatggtaaacctttttgtgaagtttgttttcctctatttgaataaatatgaattgtttctaagattgatgaattttttaaaaaattaactcagaaatgtaattcaagtttgattccctttgtactaagaacttagccatcttatcttttacctcctgaattattggatgtaattatttttctaatacatattataaataatgtgcattgcagttatatggttactgtaattttttttattgtttatttcattctattctgagcaaaacatgtattccgtagcgtttagaacgggcggattacttgtataacccaaggcagaaaagccaaatttgagtcatctgcgtcgacggagatgactcaatgccaggttcgttcttgggcccgtcccctacttcacatcgatgcatgcatcatctctgtttcacactggaccttgacatattggtcttgctagctgctgcctctgatatgatcgacctcttatgccatttccaacccgatgaccagaatggtgtccatagtattaaataagctgccacctaagatgaaaaaaatgatatggtaaagtgaataaatgaggaaagagaaggaaaccatattttgcatgagacatggtttctacacaatatccaagacatgatgtgagataagtagcattaaatttaagtatgaaatagtggtatttgcattggaagagtagtgtctagtactagtttcttgatgatgtggagtctatgaaaaggaaaaagtacgaattacccccccccgaactatcacagtcatccgaattaccaccctaaaccacaaaaccggacatttttcacccccaactatgcaaaccggacgaattacccccctcgacccaatccgcggtggttttggtctacgtggcgtacgcgtggcagcccagtcagcattttatttttttaaaaaatgtgggacccacctgtcatagactcatagtctctcatctctctctcctctcactctctgtctctctcactcatcctctctcgcgcgcacaggacaagcggcagcggcggcgcacacggcgggcagcggcgcgggtcaagcggcagcagcggtgcacacggctggcggcggcgcgggacgagcggtcggcaggggcgcgcgggtcaaacgggagcggcggcgcgcacggcggggggcggcgtgggacggccggtgggcaggggtgggcaggcgtgcggtcggcgcatacggcggcgct

SEQ ID NO: 23317 - DNA, 2723 bp, Oryza sativa
gtcaccgcccatccttgagccgccatgagcgccgccatccgcaccgttcgcgtcgaccgccctcctgcctgtccctgcataccgcccgtctcgtgccaccgcgcgccgtgcgcgcacccctgcccaccgcccatcccgcgccgtcccgcgccgccgctgccgcttgtcctgcgcgcgagagagaggatgagtgagagagacagagtgagagatgagagactatgacaggtgggtcccacatttttaaaaaaaataaaatgctgattgggctgccacgcgtacgccacatagaccaaaaccaccgcggattgggtcgagcggggtaattcgtccggtttgcataatggagggtgaagaatatccggttttgtggtttaggggggtaattcggacgaccgcaatagttcgggggggtaattcgtactttttcctttatgaaaactatgtctagtgtattgggttaggaatgaccttagacgcttcaacgtattcctccaacagccacgctgacctccacgtcgatcggctgtttgcattaattgcagcagcacgtggttccgattctcctctacgaggcggccggtggcagcttacggtgagcggaggcggtcgcagtccattgcccattggtgatgcacgggcgcgcgtcaattcgcgttatggacaggggcggataaaaaaataatagtggggctaaacaaactaggagagccttcagctcccatatcttttggatctataaaaataatttatttttaatgggggcttaaggggagtctctgtggtcccagtaacagtagtgggtctcaagaccactccgttcccacgttaaatctgccacggattatggataccttgtgcggttttctacaatttactttaaactattttctcctaactagtaatcgactcatgtgtattgatctcatgttctcatctcggtgcgtgtgtatatatacaactcttttttggtaagtgtaacatcctgaaaattcaagacaataaaaaaaatcactaaaatttcaaactttttaaaaacttttgcatcatgctggttgttatgattcctattgcttgccaaaccgtaaatgatcaccaagaaggtaaagaaaagaactacatttaagcaatagatatgatttatgagaatatatttaatcctacgaataattatgtgcaagatattaaaatcaaataaaataaaagttattattaacctattttatcaaatattaaaatatttgaataatataggtgggtgccataatacaagtacacatgaaatgatgatcattcaaatgaactgagctctctgtatatataatagaattacggaagtatttaattcgatatgtagatcgattttgcaccaagttcctaattgcatttagggattgaaatttgatatattaaacccctccatataaaataaactaacatatagataaattgagctaatgtgctattatgttaataacggtctcattagaaaaaattatagaatctttaataaaccttaaaaacaaattggtaaaataaatataaattaaaaataaaagattaggtacggatagtaataaataaaatattatcgcgaccatatttggatcaattaaatttaattgcgatagaataagaatttaccctaattaaaactcaaataaattatataaacaaaatatgagtgatatcaaattaaggagaattttagttaggataacacaaatatgggataaacttcatttatacaagatttagaaattatgaaattaaatttatatgggaaataaactaaaatcgggttaattagaaaacggcactattcattgccccctaggtgttcgatcgcgttccctagccctagcccctcctctgccgcgtgcccccgcgccccgcgcgccgcgcgccgctctgcctctcctctgtcgtcgccatcaccgcgcgtgccgccgccgcctgccgccgcgccgacgtcgccgagccaccccgagcccgcgccgacatcaccacccctaggccgcgcgtgctgccgagccgtcgccgtcatcgcctcgcgccccgtgccgcgccgctcccccgagccccgtgccgccgctgctaccgcgccgcgccgcccgttccatcgcctcgccgcctgtcgccatcgccatctcatcgccgctgccgcgccgtcaccatcgcatccctcctcgtgccgcgcgccaccgctgccgccccgtcaccacccgtcccgtcgccgcgcgcgtcccctcgtcgctccgagccgcgcgccgccgctgccaagccgtccccatcgccatcccgctgccgcaccgctcgcccgtcgcgtcgccgtcgtcgccacaccgagccccgtgccgagccgcgccgagccccgcgccgcgccgcccgctcgtcgccatcaccggccgccgcgcgcccgtcccgttgccacgccatccgacgcatagccgtcaccgcgcatcgccgtcccgcgtcgcgtcgcccgcccattccatcgccgcgcgactgtcccgtcgccacgccgcgcgcctatcgtatcgccgctgtcgccccgtcccgtcgccttgcgccccgcgcgccgtctcgcgccccgctcgccatcgcgtcgccgcctcgcgccccgcgccgctgccgcatcgcgtcatcatcgcgtcgccatcgccgtcacaccgagccgcgcgccgccccaagccccgccgcttctcccctctctacaaata

SEQ ID NO: 23318 - DNA, 5402 bp, Oryza sativa
ccccccctctctgtccattctcccccaccccatatcacctttcctcccctctcccctttccattgagccgccgcctccacgtcgccgcgccgccaccttcgaagccgccgcgccgtcgccccggagccgccgcgccgtgcgtcgccgccttgcgccgccgtcgccatcgtcaccaccaccgccgccgccggtgagccgtcttccccccccccccttcacctcgcggccaacgccgtcaccgcccggggaggcaaagagccgagagagaaagagagaaaccgagggagggaaaggagaggaagggagaaagaagccgggagggaggagagaaagaaaagaaaagggaaaggggagaaaagaaagaaaagaaaagaaaagaaagaaaagaaaagaaaagaggaaaagaaaagagaggagaggaaaaaggaaagaaaagaaaagagaagaaaagaaaagagagagagagagggaaaagaaaagggaaaaatttagggggaaatttaaaatatttgcaaatattagaaattaattataggattaatgaaaatataattagatgaaatcttactaattaaatacctagaatactagcatttaattataggatcaattatttaagaactaaacaattagatgaattcttatagactattatagattattttgggtaatctctataagtaattgagtcacgatggaaattcggatttaatttctaggaatcttagccgtgtattatatttaatcgtttagtcatagactaaattaaattgtataatatttctaggatttcgtccaatatttagctcataatagaaatttctaacctattatatacaatgctcggggagagtaaattattgacaacgaaataattatacccgcaaaatagtataaatcgaaattgggtttgccgtagttcgcagatagtaaagttaataaaaaggaatcgactttcgcattcgacttattagttatttaaatagagttagccttataattattaggtaagtagaatatagatacacatagatcggtcctaagctttttatggcaaataataacagagctagtgtgattaaatcatctatatgaaattaatcaacgacatatcccatataatagcatatggtaggagaggtgagcaacccttagttaaccaagcagtaaatagaaactattcaaataaatgattcaatatattaagatattgtgcacacatatattgtacatcccattatagatatatggtatcgtattaatttgcttgttgcatatattaatttagagggagtatatgacaaacatgaatattagataaatactagttatacatcttgtcctcgtataattacagatcaactgtaaatttggattattcattgtaaaattatgtgatgggataatccgtaaccataatatgattgacctaaacgattctaacatacaaagcatgggtaattgctaaccttttataatttattttgacaagtgaaatatgtacataattaaaataaagcctccatcaataaaataaataatacaaatgattcactgtaattgtttgattgatcctaaatccatctagcaacagaacctctagtatataaccgttctatttagatagatacatacatagccaaaatccttccatagccatttgatagactaaaccactgattagccaaatatatacgtatcccataaatgctatgttggttaactcctaaataggccacgatgacaatagaaagattaggaaactttagccttagcatgattgggatccattagcaaacacgaatagtgcattttgttgcgcatatttgattgttgtttgaatattggtttttctcgcgtattatagaccttgtgtatcggttagtcgtgaggcaacgtctgcaacttccaggaggtgaaggttgatcaagattatatcaataataaggattatcctgagcaaggcaagtcatcactattctttgaacatgttgatcctaattgcgaaattgttttgtttacaaataaaattgcatgcaatgatgaacgtcctacttgtgattatgccatgccttgattattgtttacccttaaaatccttgtacccatgattacgtatgagtccctagtcaattatgacaattgcttagaaatgctattctagaatcatgcatactcatatttatcaaatgctatatgcttgggcaattacctttgggaaggtaattgagatgcggcatgtggagacatgagcgccacattgccatgatgttgatgacatgatttgtgaaaggagaaataaaattaaacaacggttttcgactggggcggacggaggatttgggtggtatctggaaaaggctagtaccgtccccggtcaattaaggaccgagccatgaagttaagcatgaaacgacccccgtacaaccgtacttctcgaatgggtatagacctagcggattagatagccgagcggaggcagtatccctgcatagatggttcacccctgagtgagacatgtgcgctacgatgggacagccgttgaggtagggccaagaggcgtgccctacatcggtgtcgccattggtaggactgccatgagtgtgtgagagagagaacttaacttgaaccataatttaatatgtgtgtgagacttctctttcccgggagcgccagaactcctctcactgctagaaacatggacgcctagagtgcatgaggatttaagttcatggagcgggtactgccaatgcgaggttatcgaaaagctttgccgtgacgcgtctcatgtgttgggacgaggctcatgtgttgggcagtcgcggagtgcgggtaaagtgtacatccactgcagtgtgagtaaaccaaatctattcgaatagccgtgctcgcggttattgagcaccgggacatgtattacacttggctagactctaaattcttaacttgtgggggatgggatattgcatgatgaattttatgctgatggagccacttcccgagaggagggaaggtggacatcctcagaaaaccatgacgaatcaatggcgggaagctatccttgggatcacaatggatggtggacagaaccgtcgttgtttaaagtgaacactggtactaaaatttgatcagtctatgctaggttttaggcttgtgaaaagaattgtaaaattagctttatgcaaaagaacctgaagccattccttgaaataccctctatcatatgcattgttattgtggtggcttgctgagtacggttggtactcacccttgctatttatatatcttttaggagagtgttgaagagaagcccttgtcggtacgcttgcgtatcccacaagatgatcggagtgcggtcttgttctaggtctcgttccccagtcgactgcttgtggcatgttaaccgggcccttatattattttgtcttccgctgttgttctctgatagttgttggcctacctggccctaatgtaagtatttaactcttttagcctaaattcattcgtgatatgttgtgatccaactatgtatgtgtgtaccaactactgatccagggattggtacggataaacacagaagatttccgatttccaaaatcgggggtctacagtaagagttgacacaaatttgtaagagactgttttaacaatgaccttgttatttctaacacaaagtcggcgtgggggcagtttgtcaagtcaagaaaaaaaaatatatcatggaccccatgctggcgtatccaccctagctggcttacacacatgtataaacaaattgtccattaactagtgttagatgaacatgacatatatgtatgttaagacttgaacaagtccacaagagcacagtcaaggaaaatatatgattacaagttaatttcctgtatgataaaatgttgccgctgttaccggtcgcacttaattagttatatactactacgtatgtgcttatatatattggatacgcgggggagtttcaaatcactcaaatccacctctgatctctcgcttggtccgcatttgtgtgtaagtgagtagatagagagagagagagaatgggtgtctcaggtgttcttgaatggtggcaggagtggcagctgcgcaccctggtccttagcagcacagccattcaactgctccattacctctttgctaacaggcgtaagcatgccacttcttcccagttcagaaccataatatggctttcttaccttggcagtgacgctatagctatatatgctctcgctaccctattcaaccgtcacaagaaccaagattccacatctagctccaccgcacaaggcagtagaatcctcgaggtggtatgggctcccatcctcctaatccaccttggtgggcaggattctataaccgcatacaacatcgaagacaacgaactctggaagaggaatgtcgtcaccatggtgtcccaggtaaccgtgtctatctatgtcttttgtaagtcatggccaggcggcgacaagagattgttgcaggcagctattctcctgtttgttcccggagtcctgaaatgcattgagaagccttgggctctcaggagtgctagcattaacagcctagttagctccgatgaccttgttccaaggacaggaaagggcaatgaacaagggggtagtatttctcttgagtcctacgtggaagaagtaaggaaatttgtcataggaaacgtgatccttttgaagttaatgttaatgcaagcgactgttggagacaaccatgagccctataagctattcgtagatctctcacttccatactctatacggcttcttgacctgaaatcatggtggaaaatgacgcaattaatttgacgcatatatccagttgacaaaaaagctcaccgaaacgttttatcgtctctacactaaatcaaagatgctcgacaaacaacaaaatagatacttacttacaggctttctacgggtagtatctgtttacctaccgtttgcagcaattggcttatttcacaatagtcatagacaagcttataacagatatgacataaaggttacatatacaatcttgtgttgtactgcttttgtcgaggcatttgccgcacatggttggaacactcctatgatggataatgttctgccatggttttacaaggtttcccagtgtaggttaataggttcctatgctggtggtagcaccaagtcatgtgactcagttgtcgacattatagaactggtactgcaacatttaaaatctgggtggaaggattgcataacagattttccctcttatagggcgtttagtgatcataggggtcaatgggcgcttcggcgcaacaactgtgaccaagaagacctggcttggagtcttagagtaccatttgatgaaagtgtccttctctggcacctcgccacagatttctgctt

SEQ ID NO: 23319 - DNA, 14570 bp, Oryza sativa
aaaagaataacagaaacgctacttgagtttgatttaggacctgtttagtaaagttttcacttatcccgtagagctggagttatacaactcgggtattctactcctaaaaattacatataaacataaagcgacattcttttcctccaactttaaaataggagatgtactaaatggaccttaaaaccttcctcccgccacgagccacgcaccacatggcgtagcatatactatgcgtatgtttgggggagctttgtagcagttgtatcttctctcagaatcaaaagctttcccaaacagtccagcttttcaagctacttctctcagtctcaagcttttatatagctgtgcggctgtgttgggcatgtgagtgcgagggtgtggcatcatgcaagccttgggcttggcacacgacgcaaggctaagttcactctaggtccctcaatttgtcaccgagttcgaaattcatccctgaaccgaaaaaccggatataatgtatcctccaacttacaaaactgtgcaaacaacgtcccttggtggtattatcccctggtttttgctgacgtggcacatggctcctttgactaggtattcatcccgcatgacattggcgtggcgctcacgtggcagtttggtgtaaaaaaaatgaaaactaaaaaagtaaacaaatatgcgggacccacaattcagttaaacaaagaaaataaaacagtgggacccacatgtcagtggccccactttcctccatctcaccctgagatctctctaactggaggaggagacgaggaggctgaggccgtaggcctctctgccacctcgtcggccaccgcgcgccacttgtctctccttccgattgccgtgtgccgttcttctatcccgtcggccactgcgagccactcctttctcccttgaccaccgtgcgtcgtttctctctccctgccgcgccgcgcgccgttctcctctctcccgttggccgccgcgcgccgctcctctctccccgccacgccacgcgacgttctcctctctcccgacggccgccggacgccgctcctctctccccgctgcacaccgcgggccgttcttctctctcccgtgagccgcctctcatcgctcctctctccctccggccaccgtgaccacaagtcgctcctctcgccgcttctctctccccgccgtgtcacgcgtcattcctctctatcccatcggccaccacgtgccattcctctctctcgccgtgcgctgctcctctccctcacctgtgtcgtgtgccgctcctctctcctgccgaccaccgcgcaccgctcctctctccccgccacgccgtgctccgttcttcaatcctgtcggtcgccacgggccgcttctctctccctcaggcggccgtgcgctgttcgtctcactctcgccggctgccactcgtcgctcctctcccccatcggtcgccgctcctctcttccgccgatcaccgcgtgccactcctctcctctctgcctgcaagttcgggcgcccttcccgcaacccgtcgctggtcgccggccgcctgctgagattggaaaaaggaggaagagagagataggtgcggagagatgtgaagaaacgctgacatgtggggcccacgctgactcatcgatgtaaactcgggtcaaattgccacgtaggataaaaccactcaccatactgccttaggacttatattgtgccggttttgacagttgagggaccgttatgtctggttttctggttcagggacaaaaattagatttgttgtctagttaagggacctaaaataaacttattccccagcgtgcaatgtgagcagctcaggctgggccgaggtgcattgtttggtgatgccttcctcggctaggcctgccttagttgtgggctaggaggtagcggcctggcctgcttggttggctaggccattcggcctgctttggctcggccgtctagatcggtcttcgtgcccaggtgagcctgctttggtttaaggaaaaagtacaccgaaggtccctcaacttgtcagcgagttacaaaatcatccttgaaccgtaaaaccggataggacgtatccctcaacttataaaaccagtgtaaactatgtccctcggcggttttgacgactcagcgtgagacccacgtcagccttttttcccctcccctctccacctctcttcctctctcctctcttctccaatctccacgggcggcggcgagggagcagctgcacgggcagcggggggaggagccacgcgcgggcagtggtcggcgggtgcaggcggcgggggaggagctgcacgggcggaagacgacggccatggtgcacgccgacacacccaccgcctgctcctcatacgccacgaaggcgtgggagatgtgcttgaactgcatctccgtgtggctgcgcccgtggacggaggcgtcataggaggacgatgacgacgtggatgcgttgatgaggaggagcgcggaggagcggccaacgaactcgatgaggtggagggcgtggacgccgacgggcgaccggctggacggcgtcaccacgtcgtggagcgtcagtagcgcaggcacgtaggccaggatgcggagctccgattccgggtgagcccacgccaccgtgcaccgcttgtagaacacgaggcgcccaccatcgccgtgaatccgtgatcagcgattcagtgtcgacacgaacaccagcactgtgaacgactggtaactcatgctctacacaacacaagcagctacctagccttaattaatcacgacatgcatcgcatggcgatcgattaagtaattaactaatggattaccccattgttccttgcaatgttgaggatgacgagctcgatgatccccttggtgttgagcagcagcccgatggatgtgccgtcactgaacggcatgccgaacacaccggcgacgccgacagcggcggtagccttcaagaccgcagagaccatggcggcgaccatgagtagcacggcagaatgcatgctggtgatatcccaaccatgaacaggtccttgttccccatagcctccacgctctgtatctccaccaccatctcgctcgcgttgaacacgtcgcgctccctgtactccaccgtcgcaccgtcgccctcgttcgccctctccaggaagtcacgcaggcacccctcgtcgcctcatcggccttccgctctttcagcgctttggaggagctcgtgcaccgccgcccagctgctcccccgccggcttccgcccgtgcagctgctccccacgccgcctgcgtccgccggccgctgcccgtgcagctgctcccccgccgcctcccatggagatcggagaagagaggagagcggaagagaggtggagaggggagagaagagattgacacaaggggtccacgtgggtactatgctgagtcaggtgccacataggacaaaaccagagtcaaaaccaccgagtgacctagtttgcttgattttgtaagttgatggatacgtcatatccggttagttcaaggacgattttgtaactcgatgataagttgagggaccttcggtgtactttttccttggtttaaggcctgagtagtattagagggtctaggttttattgggccttgtgtttgggccaggtcgacctaggaggagtgaagaaatttttataacaggtttgagaattctgaaaatactccctctgttagacatattccatattttggtttttccaaccaagttagttatatttgtagtttttgtgtataagatataaattaaatgtttaatcgaaacttgaggagctatcttaatactcattagttgcatatgtatgcatacacttcttgatcattgttacggtcccgtttcacacagctccagctccaaactctaacttacctagagctggagttgtgccaaacggtatagattgtctattttttcggagcggagtcagcagagctgctccattaatttgtactacgggggtggagctaggtttttgctgctccacagctccactccacctcaaaagacctagcaccctttttttaagtgtatttacaccaaaataccactgaactaccccttcctaccccatctcctcatgttctctctcctcctcatcttcttcccctcttcttccattctcttctcccatcagccaccggcgacaggatgcggcggtggcaagcagcgcatggttggcggcggcaacgacgtctacagggcgatggcacgcgcattcagaggaggtggccggttgagcgatgggcggtggcactggcggcgacagcgcacaggctaacgtgcggcggcggagggttgagcgacgggcgccgtcgccgtcggtgcgcaggctgacctacggcggcggttggtggagtgacgggcgccgacgccgcgcgggctaacctgcggctgtggtgggtggattgacgggcgctggcgccggtgacacgcggcggacctgcggcagcggcgacaggcaggctgaccggcggttgcggctgcagggcgatgcacttgctaagcgacaacggcaggaccacgtcaacaaggtgttcgataaaatggcgacgaataacgtggtggagtggagctgaccagtgtaaccaaacactttcatacgcaactcagctcctataggagacagctctcactggagttgaagttgggaattaggagttagagtttggagcccaccaactaatatgagttaatatggctaattctccttggccttcgtgataaaaataatatgttaattctcgcggatggagggtgtactttgcacttttcggaacacagtactcctttccgttttaaactacttgtctgtggtagatttgtccaagatttgacatgtctatatttagccactattttagaaatccatataattttaagaacatgtgaattatgtactactcccctgttccaaaaatacgatgatttctaggattaaaatcttattccactgtagaagcaaatggcgattggactcgatggcggttcggctgaaccacactagtggttcggccgaacccaaaagcccacctctcgggctatcctttggttgagaagcttcttattgcgcctccaacattatgtactatgttttggctcaattataagttgttttgattgacatatgggtcctccaattcgtgtaatcgcgtcctgattttctagaggtgtattttatcgcatgacgggtgattttcatccataaaatacctgcatacacatatttcaccaacactattaaaaatgattagtaataatccctaccactaagttgaataccatattttatttcattatgtgcagacattgaatgtcagatattattatttgaggaccgtcaaaatacagtaaaatttaattgacttttatttattatagtagaactagaatgaatcactagttttgaaaaaataagtacttaaaactaaatgtgtatagacaaaatggtcaacatacttaagttgttggattacttattaattaattgtgccaaaatcacacccagctcacttattaagttcatatactaaattgcaccctattatactagcacactcacttcttgagctcttacactaaattatggcccacctaccaatatatatagtgtaaatgcaatttatactccttatttctatctattattattatatactaaaagtccatcaaacttcctaaaaacactcttgagtcgccatgtggcacttctattaaaagtccattaaacttcctaaaaacgctcttgagtcaccatgtggtacttctacaaacgctcctagatcgctgtaatgccccgattttcgttcgagattaaaaatcattaaataatacatttcctagaaattaaataaaaatttaatcaatttaatcaagtaaaattatagagggaatttaaaattttcccttaaaaatcatggccgagaatattttgtaatattctctgtgctctaaaatactctccggatttttccacgaattttcggagctcaagaaatttaaaagtcacaaagttcatttaatcaattaaaataaatagaaaaccaagttaaatctccccttcctccttgggccattttcggcccaagatcttctccccctccttggcccgctcgcccctctctccttcccacctcccaggccaggccgtcctcccctcctccctcctctttgggccgctcggcctgttcgccctctctcccttgaagtctgcatcgcgtcccccaaccagtctcctctctctctctctctacctgacaggtgggacccaaggccccacctgtcaattcctccttccacctccagccggccagcaactgccattgttgccgacgccactccaccaccaaatccatgccattctttcccgttttctctggtcaaacgtgtggaaccgcatcctctccactccctccaccatttcccccacttttccccaatttttggcgccaaattgaacccctctactccccgcttcgcccacgtcgtcgtcacccacgtcgccggccgttgccgcctcgtcccggcctcctcgccacctcctcaccctataaaaacaatccccatgcctccctctctcttttccccttttttcccgagccctccgcatcctccctcgctctttccgcgccgagcccgtgcgccactgcattccgacgagctccggccgcctctagccaccactcccgtcgctgccgcactgcgccgccggccccaatagcttcgctgcgtcgtgccgcaccccgtccaccgctccccttcccaatccattgtcgaagtctaccccggcagccgctccattttccccaatagccaccggaaagccgccccaccgcaccaccaacctccgccgctcgccggcgtcgttcagccgcccaccgccgccgttcccgtcgccgtcgcgctgccccgccaccgccgtcggcaccgctgcgccaagctccacctcggcctccactatttccccattccagtgccggagctccgcttccaccaccaacccgagatcgccgtcgtgtttgctgtctccagctgtgtcgagccgcctccccggtcaacgtcgacctgcgtcgtcgccttccccggcaccacagtcctcatgtgtagctcggccacccctctgcctcttcgaatcgtcgccggaaccgggttcccttcccgcgccggtgagctccactaatttccccgatcttcggccggctttccgcgcctcctattcctcccctagtccctcctccttgttccccaggttccgtcggtcctcggccgcgcctccgctgtggtcgggagtcgccggagcgccgcctcgcctccatcatggggagcccgccgccgccggccgtcggccgtcgccatgccccatggcggccgctccttgtcggtgccagctcggtgagcaccctcctccctcctccttgccccctccccttcaccgctccccgcgccgcccgccggtcgccgtcgctggtggcctcgcgtgccgtcggtccaaggctcagctcctcgtcgcgcccgtgctttggccgctcgtggaccactcctgtggtccgggtccacggtgccgctaggccgcggtggaccgagtccaccgtgcgccctccccctttgacccgctgacgtgtggggcccgcctgtcggcgctggttcaccttgctgacgtcagcgaatgccttttcctttgagaaaataattaataaatgcgtcatagaccgataatagttatagaaattcaattaaatggctcaaaacttctaaaatttatatctaattcatccgaactccaaattgagccattcaacttgcaaaattcatctaaaattgagctctacatatttgtttacttttatatactatttccttggtttttattagtgtttttcctcgttttgcatgccagcgtgtagtttccgtcgtttcagaagtccgcggttgtgaggataagagttcggaagattgttcgaagaagcaaggcaagtcacacattccccttgagcattttgatcctactttacaaatgttttaccgtttgcaaataaatatgcatgttttgctaattacatgggatcagaatttacctatctgctcgcttgtgccatgtttacttgttatctgtcccttgtcaaccttgggtgataaatcgactagctcatgttacttatgtgacacagctagaactatatgctcagccatgcttaattgccactagctcagtagatgggataattgcagtattagacctttttagtatcagaacgagctgcgtgctcgagacatccggctatgtttcatggccgtaattatccaactaaaatgcgattgaatggtgggctgtgggtgcatggttttgcgagtcgcacccatggcaattaaggaccggctcatgggaaaccctggaagactaacagtgcttaccacaagcgggagtgggtaactacttgatctgaagtatagctcgaccctttcctaggcaccggtggcgagggtgggcgtgatggagttgggtcggccggggtgtccggttgtccagctgccgaattcaccgcggcgcatgaggggactacccgttgccttgcgaggagtgggggtgaaaccttagcgtggtgtggatggttaggggagagttatatgaaggatcttgtcacaatcactcgatgtggtgatgtgttcatcatgggcacatgatgacacggtgacatgccggtggattgtgttttgtgggtacagttgtgcacctctggctagagtaaaactattcgaatagccatacccgcggttatgggcgatcgaccagatttactgtgattagtctcacccctaataaatcgacccaatgcactgtagttcaggtgggttggttgggcctgttcaacgtggtgtagcgttgataagtgaagatctaatttactttaattaatcaactgttttactgttttgcttaataaaaatgttttacaaccgcctttatgcaaatagccacaaacccctctttgtgtccccttgcacgaatgcatagttggtgtggcttgctgagtacggtggttgtactcagccttgatattgtttcccccttttcagaagtgtagtgcttctgagctgaagacgaagttagaggaccaaggcttagaccccagttgagttttgcctgtggagtggagctgaagccccgctaagatcgcctttttccgctgctgctgctttcgtttcggtgtaaggactaagtgcctcttctgtaagtattttacgctttatttacgtttggaactgaatattacttgtcgttttgtataccctggctggttctggacagggatttaatacacaaaagtagtctggaaatttgggttaaatttatgggcatgacaatcgccacatagcattatctaatcttaccgtcgattttcatttaaattggtggcccctatatttttttaccattagattagatctgttattaaaaaaataatacattcctcccacacaagaaatatataactgtttgtactacgtacgattcaaaggaaaaaaaataaagcttacctactgtgccgcaagaaaaaacaaaaaccatatacatgtacttatatatacgatatatagaagaaaataaagccaaagaaacatatgtacgtgtactatcgttggaaagaaaatcgacgggatttcctacaatttttttaaaaataaaatatatctatctatctatctatctattatatactaaaagtccattaaactttctacaaacgctctcgaaccgtcacgtgatgcactaataaattagagaaattcctagaaattctaagaataaacaaaccaaatactatggggttccacctctcctcttctctcgggcatgtgtaggtatactaaaagtacattaaacttcctacaaacgctctcaagccgccacgtgacgctctaataaattagagaaaatcatagaaattctaagaataaacaaacaaaatactatggggtcccacatctcctcttctcccgcgcatgtgtaggtatacgtatgtacttacattcctcgcctcaaccgccgccggccatcgccatcaaccgccacggtgtcgtcatcctcctctatggtgtgtcgccgatctgtgtgctaggatggtgtgctaggatggtggatcgattcagatccgaaaaaaaggaaaaaatgaagtgggggcgagagtggttggttgggtacgggaaaataaaatatataccagaagtagagaagttgttttttattgaagtaaatcatttactccgataatggtggaagcacgatgcgggacgtggggtgggatcagaagcaggggagttgtttttattatcgaagtaaattgtttactctgacaatggtaggagtgggatgacgggacgtggggtggggtgggcctgggctgatgcatgtttggcgcttagaatattctatatttattatatatatatattataatagaaaaataaggtcaaagatatattttgtagaccgtgttattgtccaaaacttcaattagaatgaaaccggagggagtaagataatttccacttaaaccgtcatactcattactttgtactattattttcaaataatacactattttaaaataaagtttatacaattatattgtgtacctatcaaataaaaaatttaagatatatattaactaatttatacgtgcacttaaaccggtgaacccattatttaaatcatcggatcaatttttattacattggactatcattctcaaataatgtactgtttcaaaacaaagtctacgacattatattgtgtacccactaatttacacttacactataaccggtggacccattatttaaatcatcagatctattatttgctaataaataaagcgtccaaagttccctttttggcccgctgcacaatacacgtctgctcatttcccttttgcacacgtgacaaagcatcgtatctgaggcataaggtgatcacgaccgccgtagcactaccgctttgctacatgtcaaatcatatatggagatgataaattttgttaataacatgaaaagaaaattaaaggtgtgatgtagcgagagaagaattaagcaccgtgggttgtgttattaaaaaacttagctccatttaagccgaaccgatagttgattacagaataattataatgtattgtagtattgcgttatgtcgtattgaattttgtactatttgttcgtacaagtgaaagaaattattatattataaatgtgagcacaatattaacgaatatcactagaactcttataagacaagggagtttaagaccctctttttttcgactccatagtttggattttcatttgcacgctttccaagtttctaaatggtgtcttttttaaacaacattttaacttttagaagtcaattcattcgtttataccctcaaatagctatcatgtaaatcagataattcatcaatttcaattgtcctagaccctaagtagtacatatttttttcatgcgagtcatggtgaacagtaaattggggatcaacggatacccaaaatcataagatgagtatgtaagagctactatgaacaactgtaaataggtgccaaaattaattgcgattaattagatatctaatggcttgctagccatatactacctccgtcccaaaataagtgcagccataagtttccgcgcccaactttgaccgtccgttttatttgaattttttttataattagcacttttgttgttataagatgataaaacatggatagtactttactcgtaacttatgtctttaatttttttcaaaaaaattttaaataagacgaatggtcaaagttgggcgctgaaaaccatggctgcacttattttgggacggaggtagtaattaatttctctctacattcatgtatataaacattgacgaagctagaataaatattaccatatgccccacatatatatattacgcatttaatattctaattacatgtgttaagtcctttaaaatttcttaaaatactctccgtggtgctctaataaattagagcaaatattaaaaattctattgaaaaaagcaaagtatatattacttaaatcggtacgcctaatattataaaccgttagattaaattgatcttagaaaaaactaaatactacgaggtcacacctctcctctcacggcataggtgcgcacctacatacgtgggtacatacacttcccctcccttttttcattttcccatttgttctttctttttcttttttcattcatacacttcctttccttttttactatatcatgcgcctttatgagacgatttaattataagaattttgaatatattgctctcgcatttttcatttttggacatactacgcgatatgtatatggatggattgtatgatatataattaactagcaatttagtttgcctttaatctatttgacaaagttttttaacaaacaataatcttacctttcaataattaacaataatataagtgcccaagcatgcgcgcgggccaccttcctagttaactaaatgagaatattgaaatcctactattacgaggaagagccttataagagctgccaggaaacaaacatagactgtccacatcttgatagggataataattgcacttgtatgatttgccaaattttattagaggatttgactttataaattttaatttctaaatattaattgcatttatttgctttggtactggcaataaattaaagaaacaacaaaaatcatccgcagattaaaaaaagatttaaaactttaagttctccaactttaaattcacaactttgaggttgttaccttcctcttctagatctgcttccgtcgcggggcaacgcagacgccgaacagccacagctcgcacgcgatacggacagccagcccaagcgcgagcaacaactgatcccttgttggctttgttgcaaactgtcctactacacctccagagcaaggtaattagtatagagataatatgtagcatcattttctgatttgtagtatcataatatcggggtacaccataggatcgggataatattagattttacaaagtacatatttttatataaaatatataatatgtggtataaattaaagcatatataatattgattttgataaatttaattggtttttatgtaaacttaagcacatttgttcacagtatttttaattcaccatattttaaataatatttgatgggatcatagggatcgtagtatcggatactatctaagatttcttaaaatttgtaaaaatgaagattaagatcaagatactaaaaaattaggatatcagatgggatcatcattttggttttataggattgtagtatcataagatactagaatacggatagaagaatacggatagagatactaacaattttgctccagagatacagatatgctcaaattgattgcgtttctgacaattccgagactcaaatcaacccgagtcaggatctaactagtcatctccttcacctcgtccaattactccacgccaagctaggttcgttattaagcccgtacaccccatacttcccatccatccatcaatttatgtttcctggaccttgacatgtcgatcgctgctgcctccgaccttgacgcctcaacatacgcctccagcgtccttctcctcgtcacgtatgaggttcatcgtcttcaagctagcgtggcgacgagcttggccgcacaggcttggctcggattcagtagcggacgcagaatttcagcgagaggtacagagttactcaagcaaaagcattatccaatgagaaaaatatcaaagtgctaatatgtattattagcgcaaatagaaatcattattatatatagaaaaattataaaatagttaagggaaaatgataataatcttggaaaggataattacttacaaatgattgttttgatgacttaccggttaggtacatgtataccaaacatattaaatcacatttgtttgaaaaaaaaattggggtacaactgtacacccatctcctagtgtaggtacggccctgagcccattggtgatgatggatgggtgctcgtcatgtgcgggtgaaatgtataacatgagtaagactcatcccatacgcatccgcccatgtctctccaaagaaaaacaaggctcatccagaatcccttcaatcatcccatcccatccatccttttctctatcccaaccttccaatcaaatacaagtttatagttaaagcctcattctctttgcgacacgtgcggaatatcctccctcctgttctcatcaacagagaattgtgtttttttgatggcctggaaaaacctgtataataaattgtaatatgcttttctaaatcagtatcaccacttattattatatgaccactatctagcaattggtatattcttatttttctgtgcttaccattagccacaaactgaaagtatttggtattggaatcatcttccaacaagtcctttactttatcacgttggtaccacttaatctcctcatcttttagaagcatagctaatctattcaaaaactgctttaa

SEQ ID NO: 23320 - DNA, 17487 bp, Oryza sativa
gctttaaatctaattcctcttgtgatagtaaatttattatcagtgtattaccataatatctacacaaataatagtggcaatcgttgtcgttgtaccaggttggtgatgggtggtaatagtggtgtggtggtggttgtggtaggtagtcaaggttacggataaaatatactctctatcttaggaatcatcagatatacggatacgttgtatcctcaagtataagaaagtatccatttgagttaaggaaatcagtgagttcttatggagatattctttaaggatgggaaatatcagagtactattcggaggggataaggaatgtatcatatcgtaaggggtccgttgtctctgtgttctggagagcaagatgatctgcggtataaacacatacctgtcagggttatggacccaccacataccatgtcctatacggaaacaacctgcggatataggagaagttacggataagaaaagacaagtagagttctacatggaaacgacaaggactactcggattgtatccatattaggtttccctagttctacttagacaaagggacacctatgggtataaatataataccccctaagaggagaggggggagccaccacaatcaacaatctacggaacaacaaaagccacaatgtacaagccagcatacgccaagacaagacgccggatatcgacttcagggataagcacggctagtcccctacggtgtctccggatactgtcaggagagacgaaagcgttatctctgatctcgccggatgccgattcgaggaggaaggctaccctgttgtcgactatgagtcagacctacagaccgccatgtgacaacagttagataggctatcccaaatattgtactggtgtgattatggtgaataagatcaataccggctttgcttaacaggatatagagttattacctgacaattcagggcccgaacctgtataaaaatcctcgtctatgtctcttttacctcagtctcgcgtataccctagtaccaacgatccccatactatgcaaataccggaatcgcgacatcaaacgtcgacagatttatattgaaaaaaagatttatgtgttggagacttcagtgcacaagcgttggttttcaggagaaaaattgcgtgttccagagtgctctatgtgtgtcgtgtgactcgtgtcccaacgagatcggaaccatcgtcatcaacaatttgatctcgcgagatcgaccaagcttcaggaaatcgtcgccgcagagaatcaacaatattcgctgcatacggaatcgatttgatatgagcctgttctggatcgggatcaatcagtgctccatcttccttcgtgcagagttgctgatcaagttctccgcccacgacatcggctggtatggctggtgcaaaagcatcagcagcccaggccgaacacgacgccgtgtccgagccgagcacagtgcaatgctacatactgcacggggactcgttcgagtacctatgcctttgtattactgtgttctaatcggagatgatcaacagagggtatttccctaatcacgtcacgtgcatatgcacacgcgtgcgagcatatgacgggtcatcatgctccacaagaccaacaaacaatcaagtctaagtttactgcatacatgtgtcttctgcagtgtgtagtagacactaacaaggtaattagtagattagattaatctaattaatctactaatttcatatatatatccggcatatatctacacaggtacgcaatattttatataaaatttatcgtacctatttttttagacttatacagcattgtcagatttataatttattatgtttacctagagcatgtttttatataatatctattgcgtgagtgtccccgatgttaaatcgactacggtctaacgctgggggcttgctctattctcttctgtatgaatcatgtttgtttacggtttacataatacctgatatttacatctgctcgttatatcctgataatactagaagatccatgcagtttttcgaatacatactcgatattatctgctatatgtcttgccttctagaaaatatttttcaggaacaattgagcactcgagtaggttgtggtcaagtacaccgcattatcgagaacgatctcgacgaatgcagagtcgtcgcgcccaacctgccaacgaagaccgacaacctatctcacagcaccggccatggctggactactcgagaaaaggttgttaacggataattcctcgcgaacgctgtcggcttgatcacccgacatgattgcgaacggacatccggatatgctacaagttgggtgtgtaagtcatgttggccacatgagatgcacatgtaataaaccaactatagcgcttccattgatgttcgagagatgattctactcactcgctggttctcgaaccagtacgtagcaaacttccattggtgttcgggagatgattctactcgctagctggttctcgaaccagtacgtagcaatctcctgcaccacaaacttccattggtgttcgggagatgattctactcgctcgctggttctcgaaccagtacgtagcaatctctcgcaccgcaaacttctattggtgttcaggagatgattctactcgctcgctggttctggaaccagtacgtagcaatctcccgcaccgcagcctccattggtgttcgagagatgattctactcgctcgctggttcgtgttcgagagatgattctacacgttcgctggtcctcgaaccagtacgtagcaatctcccgcaccgcaaacctccaatggtgttcgggagatgattctactcgctcgctggtcctcgaaccagtacgtagcaatctcccgcaccgcaaacctccattggtgttcgggagatgattctactcgctcgctggttctcgaaccagtacgtggcaatctctcgcaccgcaacttccattggtgttcgagagatgattctactcgctcgctggttcttgaaccagtacgtaggaatctcccgcaccgcaagctccattggtgttcgagagatgattgtactcgctcgctggtcctcgaaccagtacgtagcaatctctcgcaccgcaatctccattggtgttcgagatatgattctacacgttcgctggtcctcgaaccagtacgtagcaatctctcgcaccgcaatctccattggtgtttgagatatgattctacacgttcgctggtcctcgaaccagtacgtagcaatctctcacaccgcaacctcagatggtcgagatacgactacagcaataatgcagcggtcctcttaccacgacttcaaatgatcgagagacacctactcactggttctcaaccagtcaatcgtagcgatctctcgtacatttacttctagtggttgagttacgactactacctggttcttgaccagaggtgtagcgattctcccattacctctacttcaacaaagttgatatcaagtacacaatatcgccaagtgttttacctagagatcccttaccacaaagacacctagcattgaaacctatcctaatgtccctttacgccgtcttgacaaggcctctgaggaacctaagggaacttcggctggggacgcccagagtggataaggccttgtcggatcctttagagacgaaagaccatgtaagatctggtcgtgtaagagttctcgtcgtgcgtattaaccaagccgtgtaatcggaaattgggttttccaacttcacggctgggggctaggatcagtgcttgttcaaacgaggcaggtcaaaggtccaagagccttatcctccaagaacgattctccgacgacaaggctgggggctagggagagtgtataactcaacaaactgactgatcgaagtcgataaaagagtagacgctcatatacaaaacattggtctgtaagtttaattcattttcagttttccatacatattataacatgtcaccctttgagcgttcgctcggggggctatttctatctaatattcttatctgagtattgatttcaggaaaattctatttgacattatcgaagacttcatgtatctattgttctacaccaaaatcgactaaggcgagtacgacaaatgttgacaagacttcgttgcagattttacgccttctcgatcattcgagaaaggttggtggatctcggcaaggaatacggaatgaaaagatggtgtacccgccgagataaaatttcttgacttcaatccaaattctcgattacagcaagacgggagacttaattgtatgctctgtactttcttggttgacgtcggagattgactcagacaaaccctttaggtgcccgtacgaggctaataaaggaagtctaacattatctctgaactcaccgagaacggtcacgtgagctcgataacagttactccaaggtctgcagttgagaatatgaactcgctcatttgcattaaagtcgggggctactgtcagggttatggataccacatacctaatagtagttgactaaatctcggcaggacccaccacataccatgttctatacggagacaacctgcagatataggaggagttccggataaggaaagacaaccagagttctacatggaaacgacaaggactactcggattgtatccatattggtttccctagttctacttgaacaaagggacacctatgggtataaatacaagaccccctatgaggagaggggacatacccaccatagacgacacggaacatagatcaagacagaagatcaacatacaagcttacatacgccaagacaagccgccggatatcgacatcagagatatgcctggatcgaccctatccggtacctacagaggccggctatagggatctagcgctgtctttgatctcgccgggcacgaactcgagaaggaagactaccctgttatcgactacaagtcagaccttcagaccaccatgtcgacaacaattagataggctaccccaaatattgtactggtgtgattatgatgaataagagcaacgaccgtctttggctaacaggatgtaaggttattaactgacaattcaggggcccgaacctatataaaaatcctcgtctccgtctcttttacctcagtctcgcatataccctagtaccaacgatccatatactatgcaaataccggaatcgcgacatcaaacgtcgacaatacccccagggaggtacagggcatctaatcttagtataagacactcgccaccacaagcaatctgaagaacttgaagcctgctcgctgatagatctcgtcacgagtacttcttaacaaggatctcgtcagtaatctcgaaattcagttgttctcttttatactctgtagttttctctataatcccatataaactggattagagctattaccttacgagatgtctgaaccggtataatccttgcttttttgtgtgcttgatgtcgtatcatgtagatcctcgtatcaatgtaccccaatactctcagaaaacggttcatgggtatccccgtcgaaagtaatggtaggctctgttagtaatggtggcattggtagtattcgtttgttgtcgtagtagtggtggtagcggtaactgtaaaaggattttcttaagaggatttcactttataaattttaatttctaaatcttaattgcattcatttggtttggcactggcaactataatatttaaagaaacaagaaaaatcatccaaagataaaaaaaatatttaaaatttttaattttccaactttaaattcacaactttgaggttgttaccttcctcttgctcacgcgtgatacggccagccagcccaagcgcgagccacaattgatcccttgttggctttgttgcaaactgccctattatgcctacagagcaagctaatcagtatcgagatactaggtatgattgttttccgatttgtagtatcatagtatcggaatagtaccatacgatcaagatactatcagattatcgaaagtacatatttatattgtataaatcaaagcatataatattaattttgataaatataattggtctttatgtaaacttaagcatatttgttcacattattttcaatccaccttattttaaataatatttggtgggatcgtagtatcaggatactatctaagatttcgtaggattgtgtaaaaatgaatagtataataattaatcgaatattacgaaaattagaatactaggtgagaacagcggaggagaaaaaagcgttcatcaatcaattgcacaagaaaaagagggtctaggtagcaatgtacttggggaaagcgatgctcacgcaccaagacaaaaatgccctaatggtcccttccactttgccgtaagtgttacttccatactactgtttccataatacaacatcacctgtaattctctgcagcgaccactacatactatttctagtatatccgtgggaccacttggtcgtcgtgcttgatccggcacattatgccgagaagacattcacggaattccttgtgttgttgaacttgtaagtattgttatacactacgcaataactattggctcttgtactcacaattgactcaaacaaaatttttggctacatagagcacacaagtattacaaagaccaaagcggacgagtaaaggatgccagtaagagtaagcttctcgtgaagacacgatggccggtaatgaatggtatgtccgctatagtaacattttttatacttgttagattgaaatattgacgtatacagaattttcaacacagtgttgcaagcaaccaccaggcactaacttatgtggatactacatgtgcgagatgcttcaaattaatgggaggtacacaatagagtttgcagatatgagtctagaaaatatcgtgtacacattaacatattcaataatttaatttccctaactttcaatatgtatttttcttaaacagatcatgtcaattccatgggtagcaaacctgttcgacaaaaaaaaccattctcaacttgtgtgcagatatttgtcgttacatccgccacgatgtttgtaaccatttgggcgaattctacgatccggagagcgaccttgcaaagaatgacgctttcaaacgcctaagagagtgggagaaagaatttacgtgaaaaaacaatttagagacataaattgtatttggttttgaattattgtaaattccaagacaataattatatatatatgtgtgtatgtgtatatgtctattacatattttatgtgaatgtgtgcattctactttcttatttatatcataatgtgatttcttaattcgtgcgactaatgacaaccctgatatgtagaacgcgtaccatttgataatccggtattgctaccggttgagataggacgagatactcccaaacgcctaggttattgtatatagtgccgcacgggataatacatcttcccgtgcggttgggtcaatcgcatgcgaaaatttgattatcgcagaccttctcgggcgggcgtgccggccttccgcacaggaagatgcttttcggtccacacgcaaaaaccctttctatagtaggataagatcagtatcgtttctgttattttggttttgtaggatagtacgatacctcacatccatccatcaatttatgtttactggaccatgacatgtcgatcgctgctgcctccgaccttgacgcctcaacctacgcctccagcagccttctcctcgtgacgtacgagtttcgcgtcacgaggttcatcatcttcaagcgttgtgacgagctgggccgcacaggcttggctccgattcagtagcggacgcaggatttcagcgagagatgcagagttactgaagcaagaattatccaatgacaaaaatattgaagtgctagtatgtgttattagctcaaacaaaaatcattattatagaaaaattataaaacatctaagggaaaaagaatgataataatcttgaaaaagataattttgtacttacaaatgattgttttgataactaaccggctgggtacacatataccaaacatattaaatcacatttgtttgaaaaaaaattggggtaagctcctgagcccattggtgatggatgggtgtttgtcatgtgatgatgaaatgcaggacatatgagtatgactcatcccatccgcgcgtccacccaaggctcatcaaagaaaaatcccttcaatcatcccatccatccttttctctccaatcaaataaggcctatcccaacgaccttccaaccaaatacaagacaataacatctcatcatttcccactttatgttgaaatcaaacatatatatacctaggatacacatgaaccttacaaaagctcctgatgttatctgtttgttccttaactatatgtagtactatagttctcactccatgctattggcctcgtctacagtagttcactgtcattagcccatctaaagcccaatcaatccatctgtggctggtgctctctcttctgtccgtatgctagcttcgaaagaactacactaatattgtcttgttgcctaatggaatgagattgcaaattaaacttgcattatttggatggactttaagttcaaggttatcagtgtgttactataatatctacacaaataatagtggaaattgttgttgttgtactaggttgatcatgggtcctagtagtggtgtgatggtggtggtggtaggtaatggtaggttattgcagcaatggcggcattggtagtattcgtttgtcgtcatagtagtatagcagtagcggtagccataaaagtaataatattatctattagtttaaaaatataattacttctccacctattttctcatcttaactaatcccaattatatactatttaatttctcaacttactttttttcatctcactactacagacaagattttttcgtgcggtggtccggcctatttgcacccaggtgtctgtgaaaatcattattttcacgtgcgggtgggccgaccgcacaggataatcgattatcccgtgcggtcgtgttataccacccgtacggaaaaaaaaccaaaaataaaaaaaaacaagaaaatcgccgccggccgccggaccgcacccacccggccgccgccgagcccgccatcgtcgtcgctgttgagcccgcccgccgccgccatagttgtgccggccgccaccgccgccagatccgctgccttgacgatgcacgtgatgactaggaggaggacgacgagcgcacgacggaaccttgccttgccttgccggagcgcacgacgtctgttgccttgccttgccttgacgtagccgagcgcacaacgaggacgacgaccaagaggaggggaagcctggccgccgccgctactgccgcctcgctactcgccgccgcgcccggccaccgccgtcgcccaggccgccgccatcgccggcccaacagaggggaatgggaggaggggagggggaggaggaggggaagccggccaggaaggtgtgggggaggaggtgggaagccggccgggtgtgtggctgggagaggagtaaaaggaagagataaggtagagagagagagaggggagtggttgagggagaataaaagggaaaaaggaagagagagatgggaaaattttgaagtgggtgagagggaaaggacggaggattatcccgtgcggttggattaggacgtccacacgggaaaatcgattttcccgtgcgggcgacagcccagcgctggtccccctattttttcgtgtagttccacttacggaccgcatgtaaacaaaagggggggcgtccaggaaaatcaatcctgtagtagtgtcttaaaccaatcacaatcattccctatttaatttcagatactttttataaatccgtcttatattttaggataaatgacacattttattcgggaatacattacacaaattacacattacacaatattctttgctatagcatgtaggggggtcgccatagacagtgttattccaaacttttctgccatgtctacgccaccgttcttcttcactacttcaggcagtgtccactgaaactgatgaactagcgaggcaagcataacatgcagcattctatttgctaccggatatccgaggcagaaacgtcgtccggcactgaatggaataagttccatgttggtactacctgatgacaaactgatctccttttgtaggaatctctctggtataaacttgtctggttcaatccaaacctctgaattctgatgaattgcccatgtatttactatcacagtggtttctttggggattttatacccttgtatttcaactgggacggctgctttgtacattagcagtggtatggctggatgtagcctgtgtgtttccttgatgactgcttgaagatagggaagttggtcgatgtcttcttcatctatgcaagtttttgagccaatgacctttttgagctcttcttgtaattttgtcatagtttgaggattctgcagtagctcggccattgcccactctattacagctgagcttgtttcactgcccgccattagtaaatcctgaaattggttaagcaatgtaagtaatttagataaatcgaatatcttaaccaaaaagtcaatctttacagaattcaatcttaaaatatatggttatttgctactgaacaccacgtacattaatcaaaatattcattttcgattgaataggagagcaaaaatagtgcgaaaggacaaatatgccaccggccttggtcatttcgctagctagtacatttgtcctttcatactatttatctctcttttatttaataaaaatgaatattttaaccaacatgatgtccctagtagtaaataaccatactttgaaagtatctttcccaaagatcaacttttagtgtccaaaagctaaaaccacttaggagccgtacgtgatgtcctcccgtaaaatttgcctttaaataaatgtgtaaataccaccaaacttatattgaaaacacacccacgtgcaaacagaccaacccagagaaaatatttaaagcctaacaaaaacctaggcagatgattatagaaatcaccttatgcataaaatatagtttgttctaaagtgttttcgctccttcaatctttatttttcatgtacctaaatagttgtaaaaaattttggaaaataactttgttagagataactctagccgtggtcactgggcttccgtccacccattatgttttagtgactacgaagtctaattaatgaaaagtagccacaaactgtcatgccatgattattactatcttctataacaatcacgttgtttattgctcagtagcatttttttgcctctttgtaaaacatatgtgcatgcggtgagaaaagttacttttgggcgtggtttttctgttctgaaagggtgatgaattatccaactttttataatatgttaagatacaataatcgaacagattaactattataaagttgtaaagtaattggaaaaacatccttaacaaacctatactccttttttaaaatagatgatgtggctacctttttatatgatatttaaccattcgttttattaaaaataaataaatattattttattatgacatgttaattatgtattaaagaaattttagatatgatttatattttagaatatttatactaaaatttcaaaatatggcatacagtcaaaatataattaaaagtaaactgtataatctggtaaaaaactgagatatataggatacatatacttacggccataaatgctcttatcacaccccggttcatggtgaggctgctgtcgtcattctgctcctctttctccgacatgtccagcatcacatcaagcaggtccttctccttctccccgtgcgcggcgccgcagccaccggccgtttcccggccacgcatccgccgttcgacatggccgtcgatcagttggtacatccacgtgatgtgcctcgccgtccttcgccgcaggccctgcagatcggccatggccaccaccgggaagaactccgacacgttgggcgtcatcgtcagcagcgcgaactcccgcgccgcgtcgcggaaccggcacgacgtcgcggcgtcgatgcccgccgagaacagcgccccgaacagtaggctcgccatggccgcgaacgccgccctcccgacgtcgaccaccgccgcgccgcctccgccggacgccgcagccagctccgccacgtggcggaggaggccgcgcacggcgtctcggcgcagcgggcgctgctcctcgacccgccgtggcgagaacagctgctcggcgccgagccggcgcagcgcgcgccaccggtggtggcgcgtcgggaacgcgaagatggagttgccgtcgtgcccgtcggtgctccacgcgtccggcgtgccccggtcggtgatgctggcgccgtgcctgtgcaggacgtcgcgcgccgtggccggcgaggaggccacgacggcgagcatcgtgcccaggcggagcgtcaccagcgggccgtaccgctcggcgacgcacgccaacgagcggtgcgggagctcaccggcgacgtcgaggaggttgccgatgaccggaagcggcctcgggcccggtggaagacggcggcgagcgtctgagagaagctggaagacatgggagcagagcagcaagagtgcaagtgaacagatgcatccgatgaagatggccattgatgaacgctggactttggagaatgaatgaacctgtactgccgatcgatctcgatccatatggaaatataaaagcattacccgttgaagagtatgcgttttatgatttgatgtgaagtgacaccgtgacagaaattaagaggacaataatttaactgaacattttcgcttgagtcgtgtactaggctttcatctgttggcctcttttgatggagaagctagcagccattcaagaattctttagctttggttcatccgttgctttccattatgtccttgcatggtaatacatgggtttcttttcctgctagttgatactccattcgtattttaatgtatgacgccattgactttttattaacgtttgaccattcgtcttattcaaaaaatttatgtaattatcatttattttatcgtgactttatgttattatcaaatattttttaagcatgacataaatatttttatatttacataaaaattttgaataagatgaatagtcaaatgttgttcgaaaagttaacggcgtcatatattaaaatacggagggagtaataaccttcattcaacaaaaaaatccctccttgccccctcagtgtcttgcagattttggacccttcaatagtcaacacctttaccttacctcccgctccgatgatctcgttgatctccggcggcggcaacggcgtagggaagaagaagagggcacaggggaattattcctaacttctccaacgaatcaaaacaatccaattaatggctcaatattcctaaaattttagagggaattttctatcaaatgtagagtaggcagtctttttctttttcacataccttcttttcctctgccgattttgtataatgtttgtgttcatttctagctatatgcagaagccatgagttacacttcttaaaccaagacaacgccacagttggttgatgtagcaatttcaaattagatttggagatagaaggacaaacaaataacagaagaatctatagagttcatttggaacagacgaagaggaacgatatattaaaaaagagaaactttctcatgtacaccagagtttggttcaattccatctacgtccatgagtaacagaccgtcttggcctctcggtttctgtgatgaactgataatgcacgtgattacctgttagctaggactgttcatcgtttagttaattttgtacaatttgtgctaaacagaagaattaatgtgacatactattacttggtattacgagaaatgtgaataatggatggttctcattatttagctctaggactttgctccagatagtactggttcttctgcatatggttgcttaccactttaatttgcaagaagttttggaagctgcctatgccttaaaaaaattatccgtttaattgcttggagatttatgaatgttgggaaacttttttttagcaaagggcacagcttcattttcattaatagaaatgattcgatgagaaacagaatggaaaaacaaaagaaagcacaaacaaaagaaagcaccccatacatgtatgtatgtatgtgtgtgtatatatacatatattcctctgaaggggactatttctcgagatgagaatgacatctcattctctgctccactattcatgttctggcaagacaacgtagaataaaacaacttttcccaacacaaagtttatctaaattgtcagcttttttttctaggcaccttgaacctaaaaaactcaaggggcactctcaaaacaacataaaaccagctttcattccatcttctcgacacttagagtcgattgttggtagccctcatgccaacacggttgtgtcttcgatggtacttctcctaacatagctgaagacttgctgtttgcaagagaagagttgtatgaatagggtttggccgggcctaagggcattcttgtcctcatgccgaacagtaaatagtgtttgcttgtaataggttgaagttgtcttttggtctcgtgtaaggtctattgtgtgtgttgtaagggttcttatcctcttctttcttctccttaatataatgataagtagctctcctgcgtattaaaaaaacgtttttgggatctctctagctaaacttggacttgaagatcttacttgtgacttgtctgagcagtcagctcgccctagcacaatcttccttgctttccacaattcaagggaacctataattgataaaatgtacagacatgttgtatatatgtgaaattgattaaagggagatatggaacacactatacaccacaacatcaaataggaagcgttgtcatgcgcatgggttccatgcctttgaaacataccttcatggtttatcatatatatatagttatggatggaaggcatccttcgaaacctctgcaacttttctatccaagataacacagctgtggcagataaatgctactgttttgcagcgccatgtttacaccatcatcatcttgttgctgccatcagccatcatatttcacaagatatagtagggaaacagtagggtggcaccacatcaaacaaaggagcagtgcaatgaatatacaaaacgtaaataacaattaaacatgatacatatacgtactatgttgtacgaaatttgaacaattgacaacttcacgtactgatgggagaaatctacactggtggagaaaggggctttactcctggttcgtaacccccctatagtcccggttttcaaatcgggactaccaatccgggactaaagatcactatctttagtcccgggtgaaaaaaccgggagtaaaaatccatttttagtcccggttggtgttaccaaccgggactaaagatagagcctttttagtcccggttggtagagctagactagctagatccggttgctccattattattttcttttcttcattatattgatttcaccccatccccttcccaaaatcccaaataaattatccccaaatcctcaactccccaaatcgatacatcacagatacatcacaaattttacaaaattcatcatagatacatcacattcacatcacacacaaatcaaatacacagatctgaatcacaaattctaaaaagaagaagaaaaaaaaagcccgttgccactgccgcgccggccgccagccgccggccgccggagcgccgcccgccgcgaggccgcctggcccttcgccgcaccgcccgccaccgcaccgcccaacgccgcgccgcccccaaccaccgcgccacccgggccgcagcaccgatcggccaccgcgctgcccgcgaggccgcttgggccgctgcgccgcccggccaccgcgctgcccattaggccgcccgggcctccgcgccgccggccgccaggccctccgcccgccggcgctggtagaggagaaagaggaaaaggaggagagaagttaaaaggagaggaggaagaagaggaagagatatggaggaagagataaggccagggaggagatagaatatattaactgctcctcctcctcctcgatctggtctcgtactcttcgccgcccatgttgcgcatgccgatcttttattccggttggtgttaccaaccgggactaaagataaaaaaaaactctatccttttgaaccgggactaaagatatctttagtcccggtttttattgcaaccgggactattgtgtattttggccgaccgaccaaagatggtttctccaccagtgctagttatcttttctgtgcatatttttgaaggtaattaattactatacgtgttcactctatatatcaagccatatgcatgtaggaagttcaatgttggttcagtatctatatattcacagatgaaccaaaatcttttgcctccatccattaaaaacaatataatccacaagatttttttaaaaaaggagtctgcagtgaaaaaaaaaagtgaagtaatgaatggtagtggaaaaaaaatatcatgaagataactttgatatactttaaccaacatagatcatagaggctgaattggaaatcaataggaaaaataagctagatgagatgcaataaccagattttcatgcgtccaaaaatccaccttgatttcatacatgagtctcacaacagaagttacgcatgcagtcattgaacaacaaaaatcatctaagagagtacaacgagtacaaagtcattgcaacaaacatattacatgtattatttgtatcaaacaggttcaaatttaacgaagcaaaaaatcacaaggcatccaatccctaaaaactccattgcaccttcatcattaatcttcagcgacatttgttgtagcatgtcaaccctgttttgctgtttcttcactgccttctgaaaagaagtgatgagaaatagtgtgatcagtatatatgttgcactcaacaagcaatttaattaaaactatacagttatatttaattctgcagaaactttgtcaaggatgttctatcagacgacacatgttactcgagctacagcaaactttttcagtagggtaaaactcccacaaacagtaaataatggaatattcatatatattgcagtcgcaatatgctttaacaaatacggttttatatgttttcttatttgcaagggagttttatgtacattcatattcctagatcagattaactgagtcccaaaagtaccattgagctaagttttgttacatatttacagcaaataaaataactatttctgaaacagaatggccacatgtatcttatagtaatctctaaattaatgtaaaaatggctcaacggacaatgattgaagcataaccgcacagaaagctaaaaggttcagctaaataacaataattcacatgt

SEQ ID NO: 23321 - DNA, 4085 bp, Oryza sativa
aaaaagagatttgtacctgagcaataagccagcccgaccccccctctcttgtcttctgtggatgagatgagagagctgttcttagtcttcagtatccaccctgtaaatgtgtaatcgattaggttgcttcggatcgtgtcggtatctttcaggattgctatgggtcgtggataaagtgttcattggttctttttaactcgggcttgcccttgtgcaaaattagaattcaagtcaaattgtttacaactttcttcaatgctgaggtatattgactttgatttggtcacctgatctctaatcccggagcatgaaacttccagcgccaccggcgagcaagaacaagtcccaattatttattatttttcagtctaaatatgaaggaaccctcacagcgcacattggcatcaaatgttagtgtttaattgaagatcaatctaatatagggctcattagcagtgttcaaataattgaagatcaatctaatatacacactaagcaatgctagttttcgagtctcccaacaccagtacacaaatgtacaaccaccatctagcctgaatatcaatcagacgacgaaacgggctcgtggttactttacaacaatcacgactgcatccccaaaatataacaacagcagctgtgcacctcaacatccaacaaactaaccgatggttcccccaaacttcgcattggaggaagggaaactttgcaagcaacagcatcattgcgagcttggctgttgcttcccatttcgcgggacgacctggcacacaaatgctagaaacagagggtgagattttatggcttgtatatgagcaacaggggtagagattgaatctcatgtgcttaccaaactagacgagggatatctatctatctatttattcctggagagctttcacacgggaggtaagctctctgacttgattcttgagtcgctcggggttgctgaagaaatcgacgaacacttgcctctccctcccaacttcatgagcgcgattctcaaagatctaatgtgcaattgagaccatgatgcttatcgatgaatatgtaacgcacaagctttgccatgttatttggtagggactagggaaaagaagcacatgataatacctttatcttttgggtgcgagccttcgttacttcttccacagaaacttcaacttgtgcgttggcattttccatatcatcgagtgctcgcatcagaggctgtgccaagcatagatttagttcacaagcacaggtaaaaacaattcataactttcaaaaggaaaaggaaggagtgctgaaaataacacgggagatataagaaatgggataattttaaggatgaaagaatgtacccaaggtgtcaatattggttctgcagtcgtcgatgatgcaaatagaagttgttccactgtttgaattagggtgcatctgcaagagtggaaaggatgaaaaatgactgctaaatttgaatttaaggaggccaaatcagtatataaatggactataatccgtaatgctaaaaactgtaggggctagtttttagaaaatgtaatgtagaggattggtggcaccgtggaagattcaccaccaccagctaaaaggaaatttatatttgagcagtagatgagggggctgagacaacagttcatcatgtataggtgaagacgcaaagttaagccaacaagcaaaccgtaccaaccaaagatccgttgcaaacttgaaaagtatcatctgtctcaatattcaacttgattatacatgaggacctcagagtcagtgacagttgacgcactcatggttgtctcaatattcaacttgattatacatgaggacctcagagtcagtcacagttgacgcactcatggttatcaaggcatcaccatagcgtcgctatggctgtaaggcgctgccaggagtaatggcgtctggcccaccttaccatactgcctatggactgccaggagttaggatgccttaccgccttaacaacatgggacactactgttctattcactaaaccaagaatgtgggtaggtttgcttagatcagaagaaacactaaaagcaacaattcaaaaatttgattttgcgtatttcaggcaggagataaagtaaaggcaactgatatttagacatagtgtgagctatagtatcacttacagttcattgatacatcttttgcgatcggctggcagagcactttcaagttcagactgaagagaaagcaaatcagattgaagggctgatatctgctgaaccaaggcatgcgctgacatgtatgttggcattgttgcttggacatctacagaagtgacatgaaacattgaatatcgaaattaaaacgttcaaacagctatctgagtagagttgtcacttgtcagcttacttgagtgaacacataagagatcccgtacggcatggaggagagtgtcacggtcatcaattgcaccttgctcacgcacctcggtcgcagcttgaattaatgaagtacaatggccctaaagaattaaaaaaaacatttctttgttaggtcaactaagaatcatttcttggaaaactaagaagggcagattgaacaaaaactaccgagtgtagcatgaaacatgtagacacataaaaaagaagaaatgacaacataggaggttctcaacaaatgagattgcttaccaaacgggtattgacagctgataggtagctttgcaactcggattctattactctaagcagtgaataggcgctagctatgtttttcctttcaagctggcaagcaatcttcagaaactggtgtctggctagctgattagccaagtgactgatgaactgcagaatgaagacagtgcagaatcagaaggatgtgtaataaaacaatcatatgcctggcagtatgtatgaccttggcagaaaaatgtaaaacactgttccatcaaatgcaaaagtagctggcttaaggtgatctcagcatgtattggtgcaagctagcagcacatttttcactgatcacttaaatttgtcttctgagtgtatacgaaaaacaaatagggtcaacaaggtgtagaacaaccagattttctaatgaatactcccaggggccaactaaatctaaacattgaaagtttgtcacaagaatatttggccccctaggctatttggtgcaagtgtcttaccacccatagatttgaaggcagaaggaaaaataggtaataacactatctgaatagttatctcgattataaactttcataacattatagaagataccaccaataagcaaacaaaggaactgctacaataaataagtgtacatgacatatataccatgtgatgaatgtgcataccgttttttgcctgttaatgtagtattcctggcgcatgacctttaaatcgtagtcccctacatatttgaatgctagaatatcaaggaaatgatacaacagaatcatgtaagccagcgaaagtaatgtaaatatcatcaacaaaccttgcaaaatatatgtgccttgaagttgagcgagttctgagcagaggcatggtatagtctggagggggagaacgagtgaatactgggaaaaacaagcctatctcgggaaaattttaaccatatgctaaaagaagtatgtctgatgcactgcagtaagaattactattggcatattatcctctaagtgctgaaagtatcttataagtgatgagtgtttttctttttcctgagaacttatagcagaacaaagctaatatctgcataacagattataatttctagctgcccgtggtttagagatttcacaactgaaagctattttatgacagtgcttggaacactttttcttctgaaataggaatttaatctgcaatgaatcattaaatcctaccagatgcaagtatgcaattcaacccttatggtattaaatggatgtggcattacgttgatgaaaactctgtcgaaaaccatatacatttcatcaattgacacgcaaacccatatgcatccagctaaacagactcatgaagtgccaatttttgtaactagggaatataatgtaagtattttgcaagaaaaggcagtgcctctacatgggtagagcatacctcagatac

SEQ ID NO: 23322 - DNA, 3288 bp, Oryza sativa
tgcaaaaagaagtgcaataggaagaaaaataagatcacttgaatatctcaataggcaccatataacaagattgcatgaaacattagcaactatgatgtgttcaacatagaggattccccttctgtttcatggtaaaaaaaaaaactatgatatgttcaaacagaaaggtttggaactttggataagcgataaatcaagggatagttacattgaacgaagtcgttgcaattcagccacacgctggtgatgatgtgatttttcagaatctcctgcataataggaatgagtttttcataattagttcattcaaagcacatcatactaatctaggatcagagttacgctctttaaataatataatcaatctattcattgcatacaatttactataactggtatttacctcttatcaagccattggtgatgtcgtcaagactaacccaggaacatttggacttcccttcctcagcaacaagtcgaaatggcccctgacagaaagtgttaaataaataagtaagcagaataagtgttaaataaataagtaagctgagaataacatgacagccaaagagaacctaccttctcaaattgcttcgagaaccagcggttcagctcctttgtacaagccaagtctccaacaacataagggtggaagtctgaatatgctaagtatatactttcatctgcacatatgaatgatgaatgagttatagaggaatcttattggataaaacacaatgttcatataagtgttagtattaagaaatagataaatatgaaagagagctctaagaaaacatggaatgttaacagctgtttgggatgggtacttgtttttaagatttcaaatttcttagccacagtacataataagaggattccattctgattactgtagttctctatgctcttgttgtctgatgattcgtaagccatcagtggcgcattattctttcttaagttgcatgcatgtaaaggtagcattaatcctggagtcctggacccctccatatatgtagtttacgtatatgtttgtataattataccagtagaatactcccttactattttctgcaaaataagctaaaaaaacaacagaactattatctataggtaaagagcataccatctcctgaatgataatgggccaattcctgggtagtagcagtgattcttccgagaactgcattcatctgaaagttagaagataatgaatcatcttaattgaacaatttcctcatgaaagaaactctagatatcttaaatatcttattgcataaataaatatatgccactgttcggaaatgaatcatggttaacaaagcatatgattgagatagaacttccacattcaatctttttaaggagatactaataggagatcaaaattatggagattgttggaaagaaaaatataagatgcaacataatgaaatatacctctaagtttctagaagaaagttgttcatccaatgatataagttgtccactaactgcagacatggcagttacacgtgcccgtctgccttggataagagtagaagcttgccctgcaagcaaatcaaactgtgcttgttgccgcgcaagctgcttctgtaattcaaaaacctcagctctgtatgctagtttttcttctctgcagcaatagcataataaaatacatgtcaggaaaagcacatccaatgtccaattggtaacttcaactagctagcatttggcaggaaccgggctccgcacaggagttttaaagtttaaaccagactacaaaatactagtgtcttgacatagctctccacattttggaattttagtcatggacttgagtggtatggtctgcgttacctggctagtttctttttcaccaaacagctattttacttgatttattgttttttgttttgagatttcaatgttttatactagttaaattatcatttccagcacgattcaaaatctggtcctagtatgattttttgagaaattggttctcagtagtgtgctccgtttggaatataaattctgaaaggacaaagttttttcccctataaaaactgaggtataatcgcatttcagttgggttctaggatttgagcccaagaatcaatgtaaatgtagtaagtgttcaatggtgatgccaatttccactataattttataagattgaacttccaagcataccggatatcaaggattgtttcttctgatccaaatacagcctcttgattatctttcttgcttgaaaaggctgaaatactatcaaaagcagagtccaaatcctcaccctgagaaaacaatgccaatgatagcatgagttttaaggtttagcaggatcacagatataagtgttcaaaaacacaagtggacaatacagcttatgttatagaatgtaaagaacaaaaacccaattttgagtttatagtttgtaagcagagtcccagatcttggatgggaatagttccttgaggttcagcatcccatgacaaccattgaaaactggctaatatcttatattttgccagaaaatctaggaaatttttttaatatcttagttgttcacaaactggaactcctgtcctagaggcatccaacatttggaagttggaaccatgcttgcacaatctgacaggagcagctccgcaacatcctatactgttaaagataacagaaattatacgttccagaaaggtcttggtgaatatacctctagcagcctaccctcttccacaagttgctcatacctgcaatgcaaaatctattttgtcatttgagaataactcaagcaaaagaagcaggggaagctttagaagtcatctatgcaaatatgttactaattaaatatggcaaccaaacaatggtaaattgtcctggttcatccaagattacacaatacaaatgcaggtgtgagtgaaaatgtaaatttagaagcatctcatgcacgatagtgatacagtaaaaaccaagtttttcaacacaatgccgcacatgatttgatagagtttgcccaatagttccgcaggatgttgagtactgctatgtgtttaagatgacaaatcaaaatgaatttgtaaaaaatcaggaatcctacgaaaaccttagctgcaggttcaatgaggttggcaaggaatcaaaagcgtagaaactatcataaatgatctctatgtggcataggtcacttctaaagccccattgtgccaggaaaaggagatgccagtagaatttcgatgtggcattgccatatgtcacatttgtacaatccatttttttcattatcccaaatgggcacacttt

SEQ ID NO: 23323 - DNA, 3621 bp, Oryza sativa
aaacatgccaacaagcaaaaatgcagctaccaatgaacttaccgagatgccaaacactagattcaaatgtgcaactaatcaacccgatcaagatctacagcaaaatcttcaaaaaaaaagctactgtaaaagcctattctcactaatccccccatattgtttctcatagaagcacaaacccacatctagaaccctagcaaaccacctccatcagctctccgaatcccgcaaccaccaacaccaccatatgcccccattccgcgctgcaagcatccactgtggacaccaactagcagagaatcacgacattacagctggttcatcctaagcatcagcagcagcagcaacaacaacaacaacaaccgccaaatcgagaccccaactcactgcgcgaggtgggagggggagaggacgttggaggggcggaggcaggagcagatccaggcgaggaggggccgcgcctcctcgtactggaacggccactcgagcgcgtccgcgtccagcgggtcctccccgtcgaaccccagctccgtcagcgccgcgcacagcgccgcgccgctcatctcctcccgattccaaacccagcagcagctcgctcgctcgcctgcctctcgcccggcaacctccgccgcccgcgtctcccggcggccgcagccgcagccgcggcggcgcgtgggtgggtgggtgggtggggtggtggttgggggcggcgcggccggcggcgaagcggaggcgagtggtggtgtgctttttcgcgtcgcgttcgttcgaaacaaagagaatttcggggatccggcgtgaaattggaaaagaaaaaaagcggtgtggtcgagtagtctgcgtgggcgggaatgagggcccaatggttggattttgcggcccatgtataagggtatggaggcccaataaagcgaatgcgagtagatcactcgtttggccctatgctccgtttttttttactagtttacatgtccgtcaggttaatataactagatgaatttcccgccatgttgctgcggaaaattaagttatattattatatgtacaaataagatgtaatatgattatcaaaactaaaacaaattgatagtacaattttgagactaaaaataattgagattgcatggttttatgacagaataaagaagagacaatttgaatcatatatctatcatccaaaggctaaaaataattagggtgatgtggattaatgagagaagagagaaatttcattaactacatttagtgggaatgaactatataagtatataggattagtgatagacaggaaatccgtatattgatgggagaagtccatgtgataaggatggacagtgattacttttaggtatacggacgtgctgcgcacgttgagacttgagaggaggggatgaaaagaggacgaatttttaagatagtagagataccatgacattgtgtagcaatggaattataattggttcagttttttaatatatattttttatttttgcatgaaaataatattttctttggtttagtatttttagggagttgttttcttacacgaggaaactacgatggtggggggaggactactccaatataaaatagcagaaaaaaaatatttttgagttgttatttactttttttttcaagtagtactacttgcatattcatccgccttcctctcctcccaccacccagaaaatcggtcgcatatcaatcctcctcctatccgcgaggagctgaatttcaattcatacttttgatattgccgggccggtcaagataggccaacctgatttacttaagactgaggaatataaacaaatatataaagttttgacttcaacaataaactgtcgaagtaaatagaagttgtcacaagagcaacctcccaaaagaaaacagattacactaagggattgctctcctatatttctaaaaaccacaacttcctttcaaatcgccacttcctctttaattgaaccaaacaggaaacctgccgagcgctgctgattctaaaatacacacgcgtatttctttccttccaaaccatccaacaaacaagcagtataaggctgtcaatggcgtccttgtagctgttctgaaaattttgccacattgctaaccaccattctcctaggtctaagcatgactcagatggcagcaggaagccaaccccaatctagctcttgatcattctccacatcctggtcatgtagatgcaagacacaaataggtgctcacaatcttcatcacccacccagcaaagttggcaaacatgttagtgcgactaaccacgcttacttagattatccgccgtgaggcagcgtcctttttcggccaaccacataaataatttcacctttgatggcgcttttgtttgccaaatcagagtaccacatcgtgccaccatgtattcatactcttaatatatcctcattcctaagttatagaacgcgttcaggtacaatccattctaattattatatggatctattgtattgtattgtaagcgtatgagtatgttactaattttaaaactaattaactcgtgcatcctcttctcacaatagagatttttgaacgccaaactgcagcaatatggagttgccaaagttcaaatattacaggctcaaatgtggaaatatgtccttgctctatcaatacaaaaaaagacaaagcttttgcctttgctagtttgtttttaaaaaaaaaaacattgtggaaaacatgcgaaacgaatgtgatttcaactacaacccagcgtccatgctggtttttttttttttttttttttttttttttttttttttttttttgcggggagcgtccatgctgttgattggattgaatttcagcaacatactgttagaagctggaatttcgtgagagagccgtgtactcctacgcttgctataatctgttttttcttctatacgaaacagcactacgatgcagagagcttaccagatcgaatcccttgttaacacagatacaggttgcttccaagtctactgtaccgataaaacctaacttaatctttaagaacgaattaccagtccggactacggacagataatcagggcaccaaagaaagtcgcattcttcttggacactaattataaatattaaacatggagtattaataaaacccatccatagtcttggactaattctcgagacgaatctattgagcctaattaatccatgattagcctatgtgatgctacagtaaacagtctctaattatggattaattaggcttaaaaaatttgtctcgcaaattagctttcatttatgtaattagttttgtaagtagtcaatatttaatactttaaattagtgtctaaatacatggtctaaagttaagttcctggatccaaacaccaccttctgattagctcagtacggtcactctctgttgcagctttgcttcgagggtggacctgcaggaataccgctaaaaaaaaagctactccctccgttataaaatacaacaatttttagccctcggtatttatcccaaaatataacaactttttcaccaacattatcttcccaaccaatcataatcctccaccattcacttttctcacctacctccattgctcatcaaatcgcaaaccttcacca

SEQ ID NO: 23324 - DNA, 7910 bp, Oryza sativa
gagtcccccacagcacccacgctggatccacccctggttgccatcataataactagtaagagtagcaaaactatgctatgcggttgcagctctgtggctgcgttcggcagaaaaaagagagagagtaactattgtcgacgtttgatggcgcgattccggtatttgcaaagtatggggatcgttggtactagggtatatgcgagactgaggtaaaagagatggagacgaggatttttatacaggttcgggcccttgaattgtcaggtaataaccctacatcctgttggccaaagccggtattgctcttattcaccataatcacaccaatacaatatttggggtagcctatctaactgttgtcgacatggcggtctgaaggtttgactcgtagtcgacaacagggcagtcttcctcctcgagttcgtgtccggcgagatcagagacaacgctagatccctacgaccagcctctgtaggtaccggatagggtcgatccaggcgtatctctgatgtcgatatccgatggcttgtcttggcgtttgttggcttgtattggcttgtggctttgtggcgtctatgttgtctgtgtcccctctcctcctagggggccttgtatttatacccataggtgtcctcttgtccaagtagaattagggaaactaatatggatacattccgagtagtccttgtcgtttccatgtagaactctagtcatccttccttatgcgaaacttctcctatatccgaaggttgtatccgtataagacatggtatgtggtgggtcctgtcgagatttagtcaactactattaggtatgtggtatccataaccctgacagtagcccccgacttcgatgcaaatgaacgaattcatattctcaaccgcgcgcagaccttggagtaactgttatcgtgctcacgtgaccgttctcggtgagttcagagataacgttagaattcctttatcagcctcgtgcgggcacctaaagggtttgtctgagtcaatctccgacgtcaaccaagaaagtacatagcatacgactaagtctcccgtcttgctgtaatcgagaatttggattgaagtcaagaaattttatctcgacgggtacaccatttcttcattttgtattccttgtcgagatccaccaaccgttcttgagcgatcgagaaggtgtagaatctgcgacgaagccttgtcaacatttgtcatactcgtcttagtcgatcttggtgtagaaccatagagacatggagccttcgtcaatgtcgaatagaattttcctgaaatcaatactcaggaaagaatattagatagaaatagcccccgagcgaatgctcaaagggtgaccaatgttataatatgtatggaaaactagaaatgagttaaatttacagaccaatgttttgtatatgagcgtcttctctcttaccgacttcgataagtcagtttgttgagtcatacactctccctaacccccagccttgtcttttttatacacgtgttacccaaaaatttatagaaaagctactcaaaaaatcatcttcatcatttttaaagtttgaaatagttaatactgaattaatcgtgcgctaataagtaatgactcatctagttttgcgtatcttgttatttttcgtcatctcaaacacgcctaggggcttattcggttcataagattttcaaattataggaatagaaaaaaaaaacagaatgacactactctaatccatatgaatttttctaagagatctcacttcatgctaagaatcctaccattattcttgtgaatttggaaggatctatgaatgatgcatatagaaaaaattgtaaggtttcaattcatacaataatgattatttggatattatttaaatcgaatgagcctccaagggagtaaattggaattgacgtatttggttcgatgctagcgtggtgcacgtgagatgaataggtagatattatcaatttttttttgttttggtggtatcgagtaaagttgaattgatgtacttggttcgatgctaacgtggtgaatgtgaaatggataggtaaatatcatccaaaaaaaaaaatcttggagggtagagtttctaaaggggtgctctaaagtaatttttctggttaggtagaaattcaattggcacggatttttttccttaaagaaatgtccttttcaattcttccaccactaaatctatgggtacactctcaacaaaatttagtgatattagtgatttaaatcctatctgagaaatttcttagtaattgcaaatctatactaatacagaaaaaaatcttagtaattacaaatctatactaatacagaaggtagcattagtaccaccaccactactcatgtacctagcggtaaccccaattacctaccgggacaaatactcaatccatcccaaaatatatattgcctataatacaaacttatagctagtaatacaaacttaaaaatatatattgcctataatacaaacttatagctagtaattactctagtactccctccgtcccataatataagagattttgagtttttacttatagtgtttgaccactcgtcttattaaaaaaaattatgcaaatataaaaaacgaaaagttatgcttaaagtactttggataataaagtaagtaaaaaaaataaataataattctaaaattttttgaataagacgagtggttaaacagtgtaagcaaaaactcaaaatcccttatattatgagacggagggagtattaaactgcttcaataaattaaaaaatgaagtagagtttagaatatgagaaacttttttttatatttttatcatcctcttagaatctttagttctcgacgtagtattaatttcgtccatttaaacatgtgttgagcgtttgtgtatttagtggtctgtgtgagtattttctatgaaagaaaaagatccataaagatatgaattcacataatatccctgttgtcttcgcttttctttttctagatttttgcgacggatatttgtgtcattttcgtgaaaatacgattctcaagaacatttcttccagtggtttgtttagaccacttgatattacgttaaatcaagtaaacaatctgtcgtgtaaaaaaaataataaaaaactgtttcaagccgggccaatatctgctcaaacctgaattcacattatatctgaatatctgctaaaatctgaattcattttatctatggctgtcagtttgtttgacgtgtcccaccttcgatcctactcactcagtccttaaaaaaataaatccattcttagcatcccaaggcaaaattagtgaaaagtaagaatgacaaaaatatcctcaatcattaaaaaaagtagtaagagtgatagataggtactccctccgtttcaggttgtaagactttctagctttgcccatattcatatagatgttaatgaatttatgtacacatatatggctagattcattactatatatatgaatatggataatgttataaaatcttataatatgaaacggatgaagtaaaatgtattgaagtgataaaacatcttagggtgtgtttggttcacggacatgcatggatgggatatggccatccatattttgttggatatggcaatccaattttttgtttgatttgtatggataaggcaatccaatttcttgtttggttgcagggatatagcatggatggaaaaagccataagttagtgggacccatttgtcatatatatttttttatcaaaatataatcatccgagatcttgtttttaatatttaattataacaaatataatggtgtaatcaaatcataaattagatagacggtttaggagaaaaaaatcatttggagcttgcttaacagaaaatcaaactaaccacacctaatcagaataagacacatcacccagaccaaaactgaatggcttcatccagccaaatcggccggatgcactcatccagcatatcgagagaatattccctattccgggccgccccatccaccttgccctccaaccaaacaccacagaaaatccggcggccatctcccatccagactcatccacccaaccaaacacacccttattttatatgctaagggtagataggatgatagaggttgtattttttttggataaaatttaaattttagaagttaagtttttttttttacaaagcgagtagaattgaaaaatgaaaaaaagaattgccaagtcgcacgtccccatcgccgatgatgccccaagattcctccttttcttcccgcgaaaaaaaaattcctcttttgcttccgccggcgagcgaccaaaaacacacacacagccgtaccacccacccaccaatcatttcgccatcgcaggtgaggtgagcccaccactccagtactccacgagagaccacgaggggaataacttattaagtaggcaaaatttggtataggacacccgaaaatcgtgtaattggcggtgagacatcgtaaaatcttggttttgccaacggacactacgaaatttgtgaaattggctgtgaaacaccggaggcaatattttatagtttccgagacaaagaggtcaaataattttttaaaagatcaatctacccctgcgcccagctgtccatctccctccccaacccgatttcccagtctcaaaccctaaccctaggcgatggtggggctggcgacggtggcggtgccagcgacggtgttgaggacggcgacgacggcggccactggagctgtgatgatgacgcagtaaatcgatccttgtggcaaacccgacgagtcctggcggcaagtgcgcggcgcggcggtttcaagccgatagcggtggacggcggagcttagtttctaaatggaggacacgttctctgcacagctgtcagttaattaactaattaagttgtcctttggtgacaaatatttcctggtgccatagaccaattagcttctgagtggattataaaaggagttgcatcatcgccgtgcaggattgaggtggaagaagcagccaaaaacagtaatggcgcaggcggagaagacgagcgagagattttctttgtatgcggaatctcctgctagcttgatgtcaggaacgcgccaggaacgggcctattcgcgtctgtgcgcggcgcgacgcggcgcgcacacgccatgccggcatgccgtggcataccagttgcgcaggggtggattggtcttttagaaaattatctgacctcttttatctcggaaattataaaatattgcctccggtgtctcacagccaatttcacaacattcataatgtccgtgggcaaagccaatattttgcagtgtctcacagccaattacacgattttcgggtgtcctgtagcaattttgcctattaagtactgtattaatttttaaaaatatgctacttaaaattttatttttaaaatctagattcgtagttaggattgtattttttatagaatgaaagggacactttctttgatctagtattagaatatatctcataaaaccaaactctattatattgtctccgtcataaaataagtttatttttcactcatcctactcatccatacttgatcaaattccgatacaattatttccaactttcacagactttgatatgatataactttaaaagcaaacttattttgggacgaactaaaaatgagcttatcatgggatggagcgagtagtttaaaaatatttatttttaaaatttaaaattaaaaaaatactatatccgttttatattataaaactttctagcattgcccacattcttttatatatatatatatatatatatatatatagatttattgacatctatatgaatatagacattgataaaagtcttataacctgaaacggtgtaagtagtaatcaaataaaatttcgaggggaatagtagctcattataacaagctactactactactactggtacccccattggtagcacgcaagccactttctccgagatcgccgcgatgacgacgacgacgacgacgagcgccatcggctccctcctcgtgctcctgcttgtggtggtggtgggaggggtgtgctccgcctccgtgggcggcggcggcggcggaggggaggcgtggcgggcggagcaggagcgggaccgggtggcgcgggtgcccgggcaggacttcgacgtcgggttcgcgcagtacgccgggtacgtcgccgtcagcgaggagcgcggcgcctcgctcttctactggttcttcgaggccgccgacgacccggcgtccaagcccctcgtgctctggctcaacggaggtgagcgcccgccgccgccaccgccccgcctctccgatttggtctcttgttgacttgtactgctgctgctgctgctgctgttttctcatccgagtccgagacgcacgacgaatagctgttgcgttcgtggttgggggaaagtcgctaccttccgttgattccttatctgatgagcagctttcttctgcaggattcggatgcacaatttggggttttggggggtggggattatgctaagactagtacatggagattagtcgatttgatatctcgagggttttagttattactgatgtggtagaaatgcacaagtaactgtaattcgttcgaggggggaagtatccgcagacggaggaggattgagatcctcagacatagtggctgacatgtgggcccgagagtgatgggtccacatgtcagtcacggtgaacagtaacgtcagtggatcttcttccgatgaggaggggctgttgtctctacacaatttccggatcaaactcattttcatttcttactaaaaaaacttatttttattttggagatacgaaagggcaaatattttttgtatggtactcgggttcttaaaattggtatagtttttcttattattgattcatatcatatttcacatttgggcaccacaattagcacttatctagaactcttatagtttaattttgtgatttttcccttttgttttcacatgtactaggctttactgaactaacctccaagcttccagcaatacctatcaaaattttccactacacagcattcatatacatcctctaaagccagcttattataattttttatagttaaaatatgagagaatttattctatgccactgagtttaccttaatttcaacgatttgccattgactttgtctccctctataatatgccactgactttatcatttttttcctacaacatgccattggggtggatacttttcaataaatgcctaaaatacccttcaggtcatacaagagaagacaattatttgacccactagaagttctaaaaacatgaaagtttttgtgtacttagccttcttacaaaatattaaagtttgtgtgtatattttaagattttctttcatgttttttttctaaaaaactattttatatagcatatgaaagaggaatcacatacacgaaagatagttgcataaaaaaaattatataacatgtgaatgatgatgtacaaaaagaacattaacacaaagtattctattagcatataaaacataaattatatatttttaaagataatacatgcaaaatgaaaatcttgatatatacacacagttctatattatgcaaggagtttacgcaaatttttttatatttttgtaggtcaatcaattgtaacctcttgtaagtcttgaaaggcattttaggcagttttgaaaaatatacactccaatggtgtattgtataaaaaattgaaaaagtcagtggcatattgtagatggagtcgatggcaaatcgttgaactagagtaaactcagtggcataaaatggtttctctcttaaaatatttcaagatgaccaggccaacttttctattcttacatgaggcaagatgttgtcggtgaatctgatttttttttcttg

SEQ ID NO: 23325 - DNA, 2408 bp, Oryza sativa
ttgcagtgctacgatccttgagttctgagagcacactactgattttactgcatttaatcttccagggccaggttgctcatcaattgcatatggcgttgcggaagaagtgggaccttttcatgttaatgcagatggacagggtgtacatctgaatccctattcgtggaaccaaggtaatattcaacagaagcaaaattgcctttactaacttaaatcctttatatggtatcgtcttctcttatttttatcattttgatacaccctactactagttgtcaggatgaacttggatacttttcttcataaaaaggaagaagcttggccctccttcgcattctctctctctctctcttaattctagtcaccctggagtgcatatgttatatcagtcttataacttattggactactagattggttgttggtatgatatacttgttaacaattcctgaaattttgcagtggcaaatatcttgttccttgattcaccagttggtgttggttattcgtactcaaacgcctctgatgatatattaaataatggggatgccaggactggtactttcactttgcttttcatgtggttgaaatgaaagttatgtcccccagatgtaacaatattatagtttgctcactgatattcttcttgtttcacagccaatgattctttgacgttcttaacaaagtggattgaacgatttcctcagtataaggggcgtgagttctacgtgacaggagagagttatgctggtcagcgactattttatgagcttctatttctatatcatccattatttcttgtatttactattaaaaaaattaagcccaactaaatcttaattggttaggccactatgttcctcaattagcacaagctataaagaggcaccatgaagccactggagacaaatcgatcaatctaaagggctatatggtatggctttggtgcttttgcttctagttctctaattttgttatgcaatttgattgcttagttcaaaagtagcaaatcatatgttttgattaaggcaccaattacatagctgccatcattttgaaattatgatggaagtgatttcctttgtgtttgtcttcccttaagatgtgtctctttttacaataattttgaacatattagctgataaaatgcaatgcacctcgtaatacatatattctcatttcgaacatgccattttcccaggaactgtattatttaatttattttctttgtatgtaatgacatgtttttgcaggcaggaaatgctctgttcgatgatttccacgatcaccttggcatatttcaattcatgtggaccaatggcttgatttctgatcaaacatacaggctactgaatgttttctgtgactacgagtcctttgtgcatacatcttcacagtgtaataagattcttgacattgctagtgacgaagctgggaatatcgattcgtatagcatcttcacacctacttgccatgcatcttttgcctcctcaaggaacaaagtcatgaaaaggttacatgtaagtattgaagctcctgcaactcaagttgagttttaatattttacatttacatgatactccctccgtttcaggttataagacgttttgactttagttaaagtcgaactgctttaaatttgatcaagtttgtagaaaaaaatagtaacatttttaacccaatacaaatttattttgaaaatatattcaattattgatttgatgaaactaatctagtattataaatattactatatttgtccataaacttagtcaaacttgaaacagtttgactttgattaaagtcaaaacgtcttataacctgaaacggagggagtattattaaaataaatttaatggtcttaatacttagccatgcatgcattgagttggttgctaagtaactctagtggaatcaagaaaatcgtaatgcttttctccagaaaaaaaaagaaaaacagtatagtgaaaagcaccatattttatctacttaaaaaagacgtccaaaagagttctgggcttgggcacaaaaactgattgtatacaagcaggtgaaactttcttgatctgaccatatgcatttgtattgcgtgcaattggtcgcacactgctcataaactcctctatgtatatgtttgtttttatctgattcacagtgatggtttgtatttatctgattcacagtgatggtttctttttatagtctgttgggaaaatgggagagcggtatgatccaggcactgaaaagcattcaactgtatacttcaatctggctaggtgcaaaaggcacttcatgttagtccgatcatcaacaaatctaaatgggaaacctgcaggtaaatcttatgttttttggaaactcggttgatattactgttgctgtggcacgcttgagtactaatgatgatt

SEQ ID NO: 23326 - DNA, 5875 bp, Oryza sativa
ctaaaaaacaccatgaatgttcaaaagcttgatagtttctggtttgttttgtgcacaatacgtctggtcctagacaactcatagttttattgtgggtatgtggtttagtggcacatatgtcctaaactcctaatggtctagtcacctaactttaagttgaaattatctggcattagagttgcagggagccaggaaatcactggcagagcccttgctcccaggagaaaaatctcacaagtcatatggctcattagctgtttcaggctacaacattctttgtgtttatcatttgtttgttactagatcaattattaatgttgtttggggaatctatcctccagttgtagcttctgaatctgtttgtgttcaatcaggttggtggctggactcaagggtacaagggactcaacttcgtgactgtgaggggcgcaggtcatgaggttcctctgcataggcccaaacaggctctaattctcatcaaatcattcttggctgggagcccaatgcccagtgttcaagatttttacagtgatgtgtaacatattttggctacaattatatattaccaagatcacaaaaggtaactcagacggggttgctagtatcacatggaactcgtaccatatattggtaacaattcttccctaaataaaatagggaacaaaatcatgaaatagttttcgtgccacgaatcgacactgtctgttgatattgatatgaacctaagacaaaagtattaatcaagggtgaacgttcacattgttgtcgtacaggatgtgtataacattgttgtgtataacaaaactattaatcaagggtgaatgttcacattgttgtcgacaggatgtgtgtacagcatacatttttatttccttttccgtaagatgtggctgaatgctaatgttatgtccagttttatttttcatcttcctttaatccgtatgaacaaatctttatgctcctgctacctgtctatacttgttcaatatagttctctatgagtacaaatgattgctatagtgttattctgtcatatgtcatctgtattcatagttacaaatcatactagttattgccatctttaaaatctgtgtccttactaatactttgcagatgaacacctctatatttttgcagccatttccagaaaacctgtaggagatagtccatcacacaaggtttgcataccttatccttctatatgtgcttgttcatgtcatttttttttcaggttttagtgttaccacttaatgaaacatgcatcatcctccactaaaaaagaaagccaagccacattcttgcccttttatctttcaggaagcctccttttttgttcttttacttgtcgtctgctattagttgcgccttttggaaaggctttttcgattggtgatgtctttccaaccaagattttcactttgaaggatggagttattgtagcacgaagcattagttttgtgcactatgtttgatatccaccctgatgaacctatgttaagccatgaaattttattttagcttgatcagcagtatactttagaatggctaggttgtacatttgatacttttcccttttcatgtctgatagtgttatgataatatgaatatgtgcaagctgaaatgtactgtcaataacatgaccgaagcatgcaaccagcaacctaagtaattttgttttctatagaagttttataattaaactttgataggatcataggacacatgcttgaaccacatttagctatgtcgattgtccattaaggccataatcactatgccgtaattaacttatgcttgcctttttctgctgtcttagatatttccaatgcctgttgctatcaagtatttggcatgcatgtttgacctttagatctccatgaccaattcaccttccactcaaataacctttttacttctggcttatgtaaaaatgtaaataacatttcaagttgtccagtcaatgcccaatccttaactttcatcaagtgtgggtgcgtgggcacacctatgttgtttagtactactcgatctgttttgacatcctgtaaaactttaggctttgaaaaattcagtgtggacacacaacacatcgcctagtcaatgccctcgcatgaactttcatcggtgtggatgtggggcacaacctacagtacatactacctccgtttttaatacacgacaccccgttagctttctgacaaacgtttgaccattcgtcttattcaaaacttttatgcaaatatatataaaaaattatgcttaaagaacatttaatgataaatcaagtcacaataaaataataaacgataaatgataattacataattttttttgaatatgatgaataatcaaacgtatcttaaaaaaccaacaatgtcatacattaaaaacagagaatgtcataaaatactcttacatgttttgacattccaaaaaaacttaactttgggtgtgtttagttccttaaaaaaattagaagtttgaaaaaagttggaagtttgaaaaaaatgttgtgtataggaaagtttttttttatgtgatggaaagttagaaatagggaaaaactaaacacggcctttgtgcggattttatttaatatagacacaaccatattacacaagggtgttagttgggcaagtagagttctgtttggcttaactccaacattgacaactactcgattggcgagacggttgacacgtgtgccgaaacctcttctcacacgtgacgtgacacagctagctttgtcaccctttgccgatttgtcgcaagtagcctttctttggagagatcacgtcacaccacttactaccatcacagctgctgcttctcccactgtatgtgacctgtaactctttcggcttctatgatatgatattgttaagtaatcaatcaagcaatcaagcaccttctccgcttgtccctctcgttactcgcatgtcactatcaccgagcacaagaacatcaatcgacaagcctccccaaccccaccatcacacccgttgcgatccttcgcaacgggtcgccacatcacaccgcacacgcgcacacacgcagcaatacagtaggagaggtggggattctccgtgtacgaacagagtacaacttgggtagcgtttaggaattgttgttttataattgttgggtcactaattaaacgcatgcgtgttatataggggcttaaatctccctggcctgctgcctaaacgatgtgatcacgaggactccactggtcaatgatcacgcgtgcgtgcagagttttacttagtagaacagcgtgtgcctttggtgatatatatatatccttaggtcgacatctggtttgcgaaatactgtatgatgtttccgattgcaaaagtagaaatgatatctcactaattagagagagatcaggacactatccttatctctctagatgctcctttttcttacatgccatctaaatagttatgtcttttaaaaaaagatagattaatatatattgtatcatttcaccaatgcaaattcaaatttaacttctataagtttaaaaaacaaatatgaccaccactatagtttaatttgttaagtcgttctttttgttgcaactcgaagagaagtcaagtagtgatgtttgaatgttagatgacgctacagatgctagaaaatgggggcaatgtgtggtgtctcatttgagaagatgcttttactttgttgaatagtgtgtgcttactgttaggtcgattgctggtttgtgaaactactgtacgatgtttcacattgcaaaggtaaaaataaatatatctagggggattaaccattggtctcgtagttagatagtgtcagagaataagggtgacggtggtggtggctgatttcatagaaggtgctgttgaagtgagatggcatagaggttgtgcattggtggtggtggttgtttttttttttttttgggcgggggaggaggggatataaggcccgtttagttggcaaaaaaaaattgttttggggtgtcatatcgaatatacggacacacatttgaagtattaaacgttgtctaataacaaaataaattatagattctgtctgaaaactacgagatgaatttattaggcctaattaatctgttattagcaaatgtttattgtagcaccacattgtcaaatcatgacgcaattagacttgaaatatttgtctcgcaatttacatgcaatctgtgtaattggttttttttgtctacatttaatactccattccatctatgtgtccaaacatttgatgtgatagggtggaaatttttgttttgagaactacacagagcctgaataggagaatgtaatccgacaactacatggatctcaaaataattacaatcatctcaagataactaagagttaacccaaaaaagaataattagcacataaaaaatcttttatttgagaaatcatgtcagtccaaaggtaggaacacatgtaccaaagaaattaacaataacagtttgatataaataagttcacggaattcctatatttcttttaacagattgtcttaagaaaatctgtcagattttggatcctgattggatctaagatttgtgcatgaggtggaaaaaaaaaagcacacatgactacgggagtcaaatcctattccctagaccgaggtcccgtcacgctaccaccgtaaggcatattttttattagttacacaccatttatatgcaagtaatattgtaacttacaatacattacacaataattatacatttgctgtatttgacatattttaaggggattttctgtcaaatgttatatagacagttccgtacgtttacatgtttttcatttccctcaaacaagcaacataaaaaaaaaaaactccagcgaagtaagctcaatacaatttggaccataattccatgataaacaaaactagcccaggtttgacacctaaatggcagctgcatatgagatcaatcaccaacccatgtacatgtacacatgtccaacactacaaccccttatccagattgcaaagtcaaacatttggcgccaaattgaaaatccctttctacagcagttaggcctcccgcctttttttcttgcttcctcctctccagcttctacctcccctctccttcttcttcctctataaaaaccatggcattgtagcacacgttgctatcaaatgatcacctcacccacctccacgccaccgccctttcggcctcaatggccaacttgctcctcatcccaatcatcatctgctacctcgtgccgatcgctgtcgccgtcgacgcaccaccaccagtaatggcggccgccgctgtcgccgacgactggtctgcgctgctcgctttcttgtccaatgtgtcggccgattccggtggtgtcgctctcgccgactggggacgctcgccggagttctgcaactggacgggcgtggtgtgcggcggcggcgagcggcggcgggtcacgcagctggtgctcgccgggcgtgggctccgcggcgtggtgtcgccggcgctggggcggctggagttcgtcacggttcttgatctctcgaacaatggtttctccggcgagataccggcggagctcgcgtcgctgtcgaggctgacgcagctgagcctgacgggcaaccgcctcgagggcgccatccccgccggcatcgggctgctccggcggctctacttcctcgacctcagcggcaaccgcctctccggcggcatcccggcgacgctgttctgcaactgcaccgcgctgcagtacgtcgacctcgccaacaactccctcgccggcgacatcccgtactccggcgagtgccgcctccccagcctccgctacctcctcctctggtcgaacgacctctccggcctgatcccgccggcgctgtcgaa

SEQ ID NO: 23327 - DNA, 5306 bp, Oryza sativa
ttgccgcggctccagtatctctacctctcgtacaacaacctgtccagccatggcggcaacaccgacctcgcccccttcttccgctccttgacgaattgcacgcgcttgcaggagctcgagctcgccggcaacgacctcggcggcgagctcccggcgttcgtcggcgagctctcgcgcgagttccggcaaatccacctcgaggacaacgccatcacgggcgcgatcccgcccagcatcgccggcctcgtcaacctcacctacctcaacctctccaataacatgctcaatggctcgatcccgccggagatgtcgcggctgcggcggctcgagcggctttacctctccaacaacctcctcgccggcgagatcccgcgatccatcggcgagatgccgcacctcggcctcgtcgacctctccggcaaccggctcgccggcaccatcccggacacgttctccaacctgacgcagctgaggcggctaatgctgcaccacaaccacctctccggcgatgttccagcgagcctcggcgactgcctgaaccttgagatcttggacctctcctacaatggcttgcaggggcggatccctccgcgcgtcgccgccatgagcggcctcaagctgtacctgaacctgtcgaacaaccacctcgaggggcctctccccctcgagctcggcaagatggacatggtcctggcgctcgacctgtcggagaacgcgctcgccggcgcggtcccggcgcagctcggcggttgcgtcgcgctcgagtacctcaacctgtcgggcaacgcgctgcgcggcgcgctcccggcgcccgtcgcggcgctcccgttcctgcaggtgctcgacgtgtcgcgcaaccggctctccggcgagctgcctgtgtcctccctgcaggcgtcgacgtcgctacgggacgcgaacttctcctgcaacaacttctccggcgcggtgccgcgcggcgccggcgtgctcgcgaacctctcggcggcggcgttccgaggcaaccccggcctatgcgggtacgtccccggcattgccgcgtgcggggcggcgacggcgagacgcacgcgccaccgccgcgcggtgctccccgccgtcgtcggcatcgtcgccgccgtgtgcgccatgctgtgcgcggtggtgtgccggtcgatggcggcggcgagagcgaagcggcagtcggtccggctcgtcgacgtcgaggactaccaggcggcggcggagagggagcacccgaggatatcgtaccgggagctcgccgaggccaccggcggcttcgtccagtcgagcctgatcggcgccgggcggttcgggcgcgtctacgaggggacgctccgcggcggcgcgcgcgtcgccgtgaaggtgctcgacccgaagggcggcggcgaggtctccggcagcttcaagcgggagtgcgaggtgctccggcgaacccggcacaagaacctcgtcagggtgatcaccacctgcagcacggccaccttccacgcgctcgtcctcccgctcatgccgcacggcagcctcgagggccacctctacccgccggagcgcggcgccggcggcggcgccggcggcggcgacgggctggacttcgggcggctgatgagcgtcgtgagcgacgtcgcggaggggctcgcgtacctgcaccactacgcgccggtgagggtggtgcactgcgacctcaagcccagcaacgtcctcctcgacgacgacatgcgcgccgtgatctccgacttcggcatcgccaagctcatctccggcgccgccgccgccgtcggagacggcggcgccagcagcacgagcgacgagtccgcaccgtgcaactccatcaccggactcttgcaaggctcggtcggatacatcgcgcctggtacgtgcacgtcgcatgcatccatgcatccattcacacaacttttttgcaattaacttgcacttatctcaccatcttattactaatcggaattgtgcatgtattctgagaaaaaaaaaactttcgaacgttactatagtgtatactatagctgtagtaattataatatgattatactatagttatattataactatattataactataatatagttatattatagtgtaattgtactataactatattgtaatatctatataagttacatataaaattatatatacaaattatattatagttgtagtgaaattatatcacagatacatatatatttagatttgaaagtttttcagttttttaagatagtcccttactaattacgtgtttgattttgtgattagaatatggattaggagggcatccatctcgacagggtgacgtgtacagcttcggcgtgatgatactcgagctgatcaccgggaagaggccgaccgacgtcatcttccacgagggcctcacgctgcacgactgggtcaggcgacactacccgcacgacgtcgccgccgtcgtcgcgcacgcgccgtggcgccgggaggcgccgtcgccgatgtcgacggcggcgtcgccggcggcggccgacgtggccgccgtcgagctcatcgagctcgggctcgtgtgcacgcagcactcgccggcgctgcggccgagcatggtggacgtctgccacgagatcacgttgctcaacgaggctatcaggaggcacgccgccgccgccgccgccatcgccgccgccaccgacgaggacgaggacgacgacgacggcaggtcgttgtcgacgaccaaggacgactcgctgttctccaattaattaacacctaattagccacgagaaacttctcgtcacaatcctcatttcgccattgttaatattattgagacctttgagaaggatcggagaaatcactagtgcttccttctcgtagcgcatttgagttagctctcatgatctctaatcatctctgccttggtagggaatgtgattagtatattggtttattggatggttaggggatcgcctactaactagtgctaaattctttctgttattaattcatcaatggaagctgcactcgattaatctgttcatgttgcaaacatgtcggactccattagcaaccggccatgcatatacttgaataagaacaacgtacagctgaaggaggaagagaaatggatcttgatcagttaggtcattattcaggtgctaatgatcaaacataaacaaatccaaatgctgcaaaagtcgtcactgttcgatgcatctgatgatatcatgctgtcttccaattcaccacccagcaatgtagtttaattttgttcttgatttgacaagaacttccatgctactgccagatttttttaggcttttcaattagcacgcttgctggcttttagtcaggttcaggattagcagaaagcgactgacacacaatatactggttttactcatgaattaaagattgtttttgagagatatgaattgaagattgttacctgaagcattttaggttttaaattgctagtgtttgtggggttttgacctgaatatataaaacctagtggcgactttgcaaagtgttctgcatccatgagcttttggacttttatgttctagtagtcagacttttatatcaggatattgtaagatgtgtaagaaagggtaaggcaatgtagttcaaagtgtgatcttgtgtttatatgttcatacttactctgactagtgaccttacatcatttcattaacttaaactgaaagaacaaagtactgaagatatgtagtcaatggcaggaaatacaagatgatctctgcaaggtaaagagccttaaagaactgaacaatattgtgggcatgcacacatgacagatcatgcataataataagatagtataaattacaattgttgttgcagtcttgcaggcagatcagcaataagcaaagattgatgtgatggtaactaagatctagctagataaaggtgtgagtgacttctcattcatgttgcaattgcgtaccaaactggcagtatgacgcattttggttgatttgtttgctcctctttatcatacaaaagatgctgttccactggcttttctttgcaaaagaaaactgcagacaaaaacaaaacaaaagaaaaggttacaggtcttccatttcagagtgtgatccatctaatgatctgaatcagatgatggtagctttagtgctttccttgcatgtcttatcatgttaccttccaatttggaattacctatatatagttcttcaaggtttaatccttactcttaattattcacaacaacaaaaccttcctagaagtaccaaatattatcactaaagtagtactagctaggacacatgcactcgatgtcgggtgtgttcggaacacctggtttccaacacgaagtacccacacagaaaacggagcggtctattagcgcgtgattaattaagtattagctatttttttaaaatggattaatttgattttttaagaaactttcgtataaaaactttttaaaaaaaacacaccgtttagcagtttgaaaagcgttcacgcggaaaacgagagaaataggttggtaagaaggggcgccgaacacataaactagttttctacaagagatgttttataatggtctttgctggtagtataattaatctaaattatttatgctttctaatccaatgatcatatttttatactattatcttaactactaatagtagaataatttttgaactggtagtaaagctcatacatcaatagttgagttcacttctactagtgataattttgacattagaatattattagttctttaagatttaatgtctactcttaattattcacaacaacaaaagctttagaaccaccaaatttatcactaaagaagtgaatacataggatacatcactcaagagcttaaactagtttcccatgaatactacccaataattagctttcctgttcagtttaagatcgacaaactggtccgaagaatattgacgaagataatccactaaattaaaactaatatcctaaatcgaaatgctaatttaatcatatactaactacgttaaaataatcaactatgtttatgtttcgtaccagttatattagctttgtctatgagaagcattaatggactgtgatttattactataacttcttaaaacgatagtaatcagttttttttaacgaatcaacgagcgccaatttcattgaatagagaaggagaactttacaaagcgaaaggaaaaaagaaaggagctaggacctttggtccgagctaactaaaagaaagccagctattaagacttatcgctcctgctaagacccaagttttggcctcttccttaatcttggctaaa

SEQ ID NO: 23328 - DNA, 27066 bp, Oryza sativa
ttggaggctacgtatacaagcggcgcaacatccttcaatctcctcccctgcgtccaggccgattctcagaagcttattttggcaccaatagtaatcagttaggcaggagtatcaactaaacttaaaattcagttgttttgttgacattaccaagcatctacacaatgtaggctacacaagcatattcagagagcaggtttgacctacctctgtaaaatgtgtatttcttgattgcaacaacctgtaatcctaactaaaattgctgcctttgtggaggtagaatctgtgccacttcactagaaaaatgtgccactttgaactctgtttcttaattggaaaaacaatgttaaagtaaaaataagaatttcttttaccaacaaagtaaaattaagatttaaccctagatccccaaagacctatagttaattaattaatagacctattgctttgtgagtaatgccagccggtccacaccataaacacgaacacgcatctcagccgaaagccagttaattaatcaacatatagcggcatacagctaagtactagtaattagtctggcctcagttttggggatttagcaactgcagagctattcaaagaatctctaactcgctaaacacttcaaactcattattattttttgaaagttaatagtatataaaatatagaaattagtagacaataaaaaaaaaccatgggtttttcatattctcatccgctgcttctcataatctcttgctttaaaacattactctaccttagattttactactagataactaagtagtactaatatatttcgatcaaatcgcgattaacataggactgtttcgctgtgtacgcgtgcaccgtacctttttgtacgcacgcatacatgatcacacgcagctagcactttaatcaccctgtctaacccactgtcaattatttatttaaccatttccatccctaatccattccgacggtcaaaccaaacatgtatatccacaccaatgggccccaactttcagtgagacaccggagacgctgagcccattcacgttgcgccacgtgtcctattcgcacgatgtcaaatacttggcgccaaggtgtaacggctgcggctagagcttatagcccaaacggtagttaggcagccatgtctcccccccttcctttccctcctttaaaatccccagcggtgtagcaaacgtagctatcaagagcatttgcattttgcacccaatgtcttaagaggttagaaccacatgctctcttcctcctccctcccatggcgcccgtgcccatctccgtcttcgtcttcgtcttcatcttcattttcttcctcctcgacggctcgataccgactctcgggtcaaatgaccattccgcgcttatgtccttcaagtctggtgtgtctaatgatcctaatggagcactcgccaactggggatccctcaatgtgtgcaattggaccggtgtctcttgcgacgcgtcgagacggcgtgtcgtgaagctgatgctacgagaccagaagctctccggtgaggtctctcccgcgctcggcaatctatcccaccttaatatactcaatctctcggggaacctcttcgccgggagagttccgccggagcttgggaatctcttccgactcaccttgcttgacatttcgtcgaacacctttgtcgggagagtcccggctgagcttgggaacctctctagcctaaatacacttgatctctcccgaaacctcttcaccggcgaagtgccgccggagctcggcgacctctctaagcttcagcagctcagccttggtaacaatctcctggagggtaaaattccggtggagctcacgcgcatgtcgaacctgagctacctcaacctcggcgagaacaacctctccggccgcatcccgccggccatcttctgcaacttctcctccttgcagtacattgatctctcctccaactcgctcgacggcgagatccccatagattgcccgctccccaacctgatgttcctcgtcttgtgggcgaacaacctcgtcggcgagatccctcgctcgctgtcgaactcgacgaatctcaaatggcttctgctggagtcgaattacctctccggcgagctccccgccgacatgttcggcggcatgaggaagttagagctcttgtacctatcgttcaactacctcaggagcccagagaacaacaccaaccttgagcctttctttgcctcgctgaccaactgcaccagcctcaaggagctcggcgtcgccggcaacgagctcgccggcgtgatcccgccgatcgccggccgcctcggcccgggcctcacgcagctccacctcgagtacaacagcatcttcggcgcgatccctgcgaacctctccaacctcaccaacctcacggcgctcaacctgtcgcacaacctcatcaatggctccatcccgccggcggccgtcgccggcatgcggcggctagagcggctgtacctctccgacaacatgctctccggcgagatcccgccgtcgctcggggaggtcccgcggctcgggctcgtcgacctctcgcgcaaccggctcgccggcggcatcccggccgccgcgctctccaacctcacccagctccggtggctcgtcctgcatcacaaccacctcgccggagtcatccctcccggcatcgcgcaatgcgtgaacctccagaatcttgatctctctcacaacatgttgagaggcaagatccctgatgatttgtcggagctgagtgggctgctttatttgaatctttcgagtaatttgttggaagggatgatcccggcgaccatcggcaggatggcgatgctgcaggtgctcaacctgtcgtcgaaccggctctccggcgacatcccgacgcagatcggcggctgcgtcgcgctcgagtacgtcaacgtctccggcaacgcgctggagggcggcctccccgacgccgtcgccgcgctgccgttcttgcaggttcttgacgtgtcctacaatggcctctcgggcgctctgcctccgtcgttgggggcggcggcgtcgctgcggcgggtgaatttctcctacaatgggttctccggcgaggtgccgggtgatggcgccttcgcgagcttccccgacgacgcgttcctcggcgacgatgggctgtgcggggtgaggcctggcatggctcggtgcggcggccgccgcggcgagaagcgccgcgtgctccatgaccggcgcgtgttgctgccgattgttgtcacggtggttggcttcacgctggcgattctcggcgtcgtcgcgtgccgtgcggcggcgagggcggaggtggtgaggcgagacgcgcgccggtcgatgctgctcgccggcggcgcaggcgacgagccgggcgagagggaccacccgaggatctcgcaccgggagctcgccgaggcgacgggcggcttcgatcaggcgagcctgatcggcgccgggcggttcgggcgcgtctacgaggggacgctccgcgacggcacgcgcgtcgccgtgaaggtgctcgacccgaagagcggcggcgaggtgtcccggagcttcaagcgggagtgcgaggtgctccggcggacgcgccaccggaacctggtgcgcgtggtcaccacctgcagccagccggacttccacgcgctcgtgctcccgctgatgcgcaacgggagcctcgagggccgcctctacccgcgagacggccgcgccgggcgcggcctcggcctcgcccagctcgtcgccgtcgccgccgacgtcgccgaggggctcgcctacctgcaccactacgcgccggtgagggtggtgcactgcgacctcaagcccagcaacgtcctcctcgacgacgacatgaccgccgtcgtcgccgactttggcatcgccaagctggtcaagaacgccgacggcgacgtcaccaccaactccggcagcatcgccgccgcctcatctgatccttgcaactccatcaccggattgttacaaggctcagtcggctacattgcaccaggtatacttaactaatcaacttagctattataatcatcacaaaatttgtactaatcttaattatcatcttctaatcttgaactaattacgtgtttgattttgtgattagaatatggattaggagggcatccatctacacagggtgacgtgtacagcttcggcgtgatgatactcgagctgatcaccgggaagaggccaactgacgtcatcttccacgagggcctcacgctgcacgactgggtcaggcgacactacccgcacgacgtcgccgccgtggtggcgcggtcgtggctgacggacgccgccgtgggctacgacgtcgtggcggagctgatcaacgtcgggctcgcgtgcacgcagcactcgccgccggcgcggccgaccatggtggaggtgtgccacgagatggcgctcctcaaggaggacctcgccaagcacgggcacggcggcagcggcggcgacgtggtcgccgccgcgacggtgatggccgcggcggcgccgccgtcggtggcgatgacggcgagcgagcggtcgtgctccacctcggactcgtctttgagttactagcgttatggcccaaaaagattaattcgtggtgtagtgtagtgtaatacaaacttcatgcactgcacattttgatgcttaaatttaactcgtattttaggacattttgatgtgccatttagtgttagcacaatgctttttttgaaatttctctcttgattaatcgagtggaagaagatgcaacgaagtatcaatgtatacatatatatgttttttttttcaaaagccatgtatagttaaagagaatgtctgtaaaaagaagtatgaactactgggttggtgaaagtcagtgctaatttagtttgttcaaattatttttgagttctttggcctctaatggggatttcacttttcgattaaaactatagatgtctaaagaacaaatcaacactgaccgttgaccaaagggctgcgatctcgagttcagacaattactcgtgacatgttttactatatagtatttcacttgacaataacatgtctcacaatcgtgctgaaacactaacatttcaacgcgaaacgtcaccccatattgtggagtgtttcaccctgagaatttatccataggatagtcaactaatatccactagaacaatgtttgttttacacatagatacaatctcactctcacctgttatttacacaagactcaaataattataaaagaaataaaaaaatgataacatcaatgatataaatctacagataaacatgcaaggtaagttcaatttacaataagagaaaataaacaaaaataataaaattagacaacaaatagtacgtatagcgcaaatatttttttcttcatgtgtagagtgaatagtgggtgaatagtacctgtatttttgtaagtcggacatgacattaccaatatgagtttctttttttttttgaaagagaaactgtgtgcaagtacaatgtcataagcacctcaaccttgaattgaaaaaagagaagaaactacatgatatcaccaatatctacgtggaaattaggcatttccttttgacaaaccttgaatcaaactgaagcaatggtgcagaagcacactagggaaactctttttatttcctggtaggcgtccactcgtttattaaatgtcacttaaatgattaaagtttttttaaaaaattaaaaaaaaagattaatatgtaatatatcacctcataaaacaagcaattttaaatttaacttcttccagttataacgaaagtaacaattttgacatgaatacgatttacagtagccgtgtgtttatagagtggtatattacatattaatctatattataatttattttaaattattttaaccgtgtagttgatatgtaaaatacgagtggacgcccatgggataattagaatccctctccaagcacactattgtctcttggatccgagcgtatgcagtggtcgttgtcatcctcgcagcaacacttcctccaagcaccgtccttgaggcgagcgatctcctgcgccacgtcatccatggtgggcctcatcgccggcacgatccgagagcacgcgacgccgagctcaagcagctccaccacgacatgcgtctcatgtcgcggcgacgtcgccgccgagagctcgacggcggcgaccacatcgtcgtccgacgacaagcgcctcttgacccactcgtgcaggctgtgcccctcctcggcgatcacctccgtcggccgcttcccggtgatcatctccattagcagcaccccgaagctgtacacgtcgccttgcgtcgacgggttgcaccccaatccatactctgcatcaatggatcaaaaaatcttaaaactcggcttggaacgcgggaatttttcttgattcctactcccttcgcactaaaataaaccaacctcgtattggacgtgatacattataatacgatgaatctgaacacctaaaccaacctcgtaccaaatatgatacatctagtatgataaatttagacatcagcgtgagattgacttattttagaatggatggagcacatgaattgggttgtttcatatgaaatgatacgacacatcctaatacgatgaatctggacagcagtacaaggttagttaattttagcatggacggagtacatgaattgtactgtttaatatgaaattatgcgtagtaagttttgatatgaattggactatttcttgtgaagatacgggattgatcgattaccgggagcgatgtagccgacggagccttggagcaatcgagtgatggagctgcgtggataaggagtggatgatgcgtcgtcgtcgtcgtcgtcaatggcgtctggatctttggcatcctcctgctgcgccaccagcttcgacacgccgaagtcggagacgatggccgtcatgtcgtcgtcgaggaggacgttgctgggcttgaggtcgcagtggacgaccccgaacggcgcgtggtggtgcaggtacgccatcccgtcggcgacgttgcctgcgatgctcagcagcagctccaggtccagccgccggtgggccttggccgccggcttgccgccgggaggcggcggcggcggcgggtggatgaggccgtcgaggctgccgttcgccatgaacgggagcacgaccgccttgaactccggcgagctgcacgccgtgatcacgcggatgaggttccggtgccggatgctccgcaacacccggcactccctctcgaagctgccggcgacgacgacatcatcgccggcgcgaagcaccttcacggcgaccaccgtgccgccgtggagaacgcccctgtagacatggccgtacccccctttcccgatcaggttcgcctccgaaaagccgccggtcgcgtcgacgagctcgcggtgtgagatcctcggatgctcgctgtttctctcatccatgacgccgccgctgcttagatgtggactgactgaggttgtcgtcaacttcttcaaccatgtcaacgccatggcagaaacaccggcaacgacagcgacggcgacggcgactatgcagaggaggcgccggtggacatgcctcctccggtcgcatcgagccattccggcgatagacccgcataggccggggttaccgacgaaggagtcatcggtgaggttcgcgaaggcgccttcaccggacacctcgccggagaacttgttgtaggagaagttggcgtaccggagcgccggcgacgcttgcagagacggtggaagaacgccggtgaggccattggaggagacatcaaggacatggaggtttggtagcttgccaatggaggttggcaagctaccctgaagcgaatttcccgacagattgatgtactccagcgcgacgcagccggcgatcgtcgccgggatcgcgccggagaggttgttcatggagagatcaagagcttcggtcatttccatgttgccaatttgcagtggcacatggccatccaagagattgttagagaggttgagatacacatggaagtttcctagcactgtaatttctgaaggaatctggcctgtcagcttattgtaagaaagatccaatatcaggctgcaattgaggccaggtggtatggttcctgacagcatgttgtggtgaagaacaaggtgatccaattgagttaggttggataatgactctggtagtgtgccttggagcttattctgagacaggttaatggtctctaaacgctggctttcgccgacggatctcggtatttcgccgacgatctgattgttcgacaggtctagtagcgcgagccgcggcggccggagtatctccggcgggatcggcccttccagcatgttgccaaacaagcacaattctgtcaggttgacaaggtttccgatggccggaggaattttaccgacgaactcgttgccactcaggaaaagcgaggagaggttggccgacgacacgttgccgatgatcgccgggatctctccgccgacgccggccgacgcgacgccgagctccagcaagccggtgcagttcaccagggaggagaagaacggcacgaggttggtgttgccatcgctgctggagaaatggttgtgcgagaggtagaggaagacgaggctcggcatgctgccgaacatctccggcggaagctcgccggagagggagttgtcctggaggagcagccaccggagatccgtgcagttggacagcgccggcgggatcacgccggagagcgcgttgccgaagaggctgagctgcctcagcgccgggaggccgcggcaccgcggccggagggggatgtcgccggtgagggagttgccgctcatgccgatgaaggtcaggccggagcagttgcagaagacggcctccgggatgccgccggcgaggccgttgccgtcgagggtgaggtaggtgacgctcgtcaggcggccgagcgcctccgggatctggccgccgaggaggttgtagtggaggctcagctccctcagccgcggcagcgcgccgagctccggcgggacgccgccggcgaggtggttcccgtcgagatacagcctctcgagcatggagaggttggcgatcgccggagagatgacgccggcgaggttggagttcgacaggagcagcccggtcacgcgcccggagcgattgtcacatctgacgcccgtccagttgcacatggcagcagccggggagccccagtcggagaggttgccatggacgccggagctgaaggagaggagcgccgcgcggtcggtggcggcggtggaagcagcgggtggagcatggccggagatagcaaccacggcgatggcggagaggatggcgaggaacctaggcattgtcaacggggttacgaggatgtgcatgcatgcatggatcaaatcaagatagtaggttatattagtgcctaattaacctgtgctactaattgctttggagtgtagaatgagtgaatgacagctctagcttagatatggggaccagctaaccttccagttctgaagagaggctatggctaatgacagatatttatagatggtatattggtatatgagcagtgtttgcaatttcggaatgaaattttggaaattttttaaatatcggtaatttcactccccacatgcaagcacatatctcgctcgaaattttcggtttttttctaaagttttgtgaatttgtttaaagtttattcaaattcgtcaaattttcaaaaaaaaaaatcggccaaaaaataccaaaatttacaaaatttcggtgatttcagttcattcggcccccaccagtaaaaacccctgtttcaaaattgcgaaattgcaaaccctgtataggagaaatttcattccggcttcggttagcccagagctgattataagctctaatagtttatcaaaataatttatagatagaattttatggatgtatccttaacgacttaatagttaatgctgaaaaaggaagtacgttaaaacaccctaaaattaactccaaattaagttttaaaatttcaattttgatagcgttttattttcaaatgatggacccctaggtacagtaagtgcaagctgaagagcaatgttggatgaatggtgagatggagggaaagctttattgggtcggtcaactgggtcctaccagccgttgaattgaagggtcaatgctttcttgccatcaaattttcactcaacgattaggctggatagtggatagtggataatggcaaatctgtgattgattaattaatgggatgatcatgtcaggtgattggacaaaattgaaccgcatgcgaatggcgatgcttttttctttttctttttcttttttgtctgtgagcaagaaaagcatcgtccaacgcattacacatttttgttggtgtactttactcccttaccaagttaccatttaaaattttaacaccatcccatggtacacaccagaatgaacaagtgtgggaacaattcaattttctatgaatttggaaatgttcccatattccaaacaatcatataaataaataaacctatacaaagaatcaaaagtgccaaatataacgatgcaatgtccaatgctgtggtgctgccagagagttctatgtaggacagtacgagtatcaatgattccatgtacagcccaaaacctgagtaccaatttactcactttgtctcgaaataaaccaaccttaaaatagaatcagatataaagtatgtccagatttgttgtcacatcctaatacgagggttaatttattttgacacagagggagtatgatagagcaaaaatgatgacatagtgatgatatatatggttggatgtagaggccaggtaaaaaaatgcccttatctaaaaaaagtgatgatatatgcgcctcaaagtagattctgacgacacccacaacaacggatacttccttcgtacctccgtaccagaaaaaaaactaacttctaatgctgcaacagaagtgctttttttaagcacggagggagtattaaggaacaaatgcattggaatgtaacttcacgaaaatatatggaacaaaaaggatgctgcaacagagacggttacaggggccagataagcttacagatttgatatcctataagtctcatgttacaactatatacgtgcacatatatataaccggtgagtaattttacacaagaaaaaaatgatatataatcaagtaaaactctaattatgaggcaaggcatatgtacagaagagcttagctgaagtgtgacctctagtacttatgccgcaaggagtttctggatgtccttctgcaagagatgtatataaagaagactgtgagcaacggggaatggcacaatgcattaaacagaataatgcggcacaagtgatttggaatattataaccaaaagagggttcagggatgtgcatctcaaccaaatgcataaacttttatatggaaagcacttgaaataattcaaaggtaattagtacatttagcaaagctatcttcatgacactaaaatatagcatgaaaattggccgaaagtaaaatagtgaatcgattcaataataagaaaaattgacttgtgactgatggactctggctttccactctgtgatgataacacaacgcaattacatgtgacaatgcacctagtactgcaaattggtatatttttataccaaagcaagcaccatgagtctaaagctccatatttgatgaaatggctacagtttagggatatatcctttaacggttagtaccatctgaagttctgaaccacattatctatttgcagcttgcattccaactgagcaactctcaactgagttctgggactatattaaagcaaatagccaatagagcccatgcaaactccataggcagcctcaggccatctgggctctggtgcaaataggtatatctaagggctccccaacactattgtaagaccgtcagatcagtgctctagtgttcatttttgttagacctggaaaggtcaataattaggtggacgccaacaacacaccaagggactgtatccattaattcttaatataataatgaggtaatgactttttagtaatgtcaactcttactaaagaggaaaaaaaattctagattgaatctttacagctggggaaaattggcatagaaatatatattacgacaatggcatggttcaaagagatttgcacaatatcttgcaaccactattagggctgcctcaccatcagtacctaggtacacaaaaaaatatgcaaaacatgcttgcttctttccaaaagtatgcatacatggtaggctcacaaaggctagtccattaatcttcttacaaatgcagtgtaacatatgttgggaatcttagtagagacagataactgaagttagtaaggttacaatacatattgatagatatgaattatttcattgatcttcaaagttgtacagaaaaaaatatatttcgagaactcaatctggcaaaccaagcgaatacaataaagcaagggtgttatgataaaggcagaaacaaaattcacctcaatctggaatggtgaagttgtaggtgggtatctctcaacaacttttccagttttgtccaccaagaacttctcaaaattccatttcacaagatcacccaaaaatcctccagcactcgacttaagaaacttataaataggggctgtgttaggcccgttgacatcaacctgccattgcacgtacaagcacagaaatgcatcatgcattcatatactattaattggcaggaaatattgagccaatcgcttcttacaatggagttaacataccttgtcaaaaataggaaattcagctttaaaccttgtacaagcaaactgcttaatctgcgggtttgacccaggttcttgtgcaccaaactgattgcaaggaaatgcaagaatctcaaatcctgcaaaatcagatgaagtattggactaaggtgatatcgcatacagtatatgaatccatgttcattccatgcctacagaagctttgaaaaaagaaaataaaagagccaagtgttgtctagtttcttatgcaatagctgaacaattcaatgcaccaaaacctaaaccagtgattatattaccttgagtcttgtacttctcataaagatgagatagttccgtgtaatttgctgttgtcagcccactggaatttaatttaaagaacagcgtgaagtttaatgccaggtaatgctgtataacttactatattagtatacagtatatcagaggagcaatgtattaagaaaaaataccactgagatgcaacattaacaattagcagcgcccttcccttgaacttgctaagcgcaacatcttttccatcaatgtcctgcacaaaacagagcaattttgttcaggcatgcatctcaacctataattctggcacaatgtgcccttgatagctggagctgtgacatgtcaatttgcagtacaaaccaacaaagcttctgactgcattaatctgatttggctaaatttcaatcacgttcaacgacacatctttcggtgatcaatctatggttacagttatgtgcacttataagcctatgactcagacaaacctcaaaaatacctagttactgaaattcagcacatcatttctacctaagtaccaacaattctgatacaggacgcccctgataggcgatagctgatttgctaatgttataatgtcataacatgagaggttggaagtgttctcaggataattgtatcgccttgatgtaattgttgagttcaatcaaagcttccattatctaaaaaaataatgtcaaaacaggagattttgtaaatacaacagcattcaccttaatccgtttccattatctaaaaaacaaaacagcattcacctgacccagccaattgcaaacacgttcaacaacagaacaaaatttaaacgataatctatcgatatatacgtgcttccaaggtgtacctacctcaacaacactaccagccacatcaaccacacacaccgcaacatccaaattctcaaaacctaacgcgcctcatgccctcacccatatcccatcgtcacatcacacgcaacgaatccaaactaaagcgcgggggcggtaccagtaccagtaccacgaggggcaaaagggatcgaaatcacgagggctcgaaatgccacaaccttgacggtgaagtcgtggacgctcttcccggtggcggcggtggcgtaggcgacccctggcgcccacctccgcgacggcgccgcgacgacgggcaccgccgcgctcccgtgcgtcgtcgccgccccccactgccgcgccgggaggaggaagcggcccgcggaggcggaggcggaggcggggcgcgtggccggcgcgaggcaggtgaagcgggccgcggccgccgccgtggtggtggtggtggacgccatgtggctcgcgctggcgtgcgccgcgtgtggctgtgtcgaggggagaggagaggaagtggaagcgaggcggcaggggtggttactggttagcgtagtggttgcggcgccggattggctcgcggcgattctggttaaggagcgggggaatttttgtggatacggccctgaggaagaacagatttctggaatagtatttgtgctgcattagatttgctccttttgtttttttttttgagaaaatgatataggagtacgagatttttggattgaatgctacgttaagatatactaaaaatccaagagatactccctaagatcattaatatttaatttttataacatgatttagttaatttttatgatcaaatatttatgaccaaaagactgaacaacagtttctcctgggttgtttgtcgatatgatggatgcatgaagctgtggaccaaagactatctgtgtttaagaggttaaccttgtgagctccataccattattcgagaaatttaacattgaggggttatttggttgaaaaccacaatatatcataatttgccacatattaagtgaggcaggttcgattatattagttatgtgtttagttcataaccacacttcacatattttttttatccattaaattagtcattagtcaatgactaaaaaaagtgtggcaaggttatctcttgctaactagttttgctaggctccagctccagctccacccctcatagagctggagctgtgacaaacatatcctaaagtgtggctttaaggggctgcttggttactaacaaaaatttgcctcaatttaccacaagtatggcaagtagaattgactaagttagtatagtgtttggttctagccacaagttagtcatgccaaatttgttggccagatcttaggtaagttagcttaaactctatgacaactctaagtacaaccccttaatttgccatccgcattcgaaattgtgcgcatagtctttccttccaaaagtttggaccatatccaaattgtaggaaccccaagggtgttacgtggaaaagaggcgggtgttgtttagctggtgctgtgggctggtggggaagcggacacgtgaaatgctgcgggacctcgcgcgcgttgcagcgttgggcgggtgttggtcattttcagtgggagagcctccgcgcatgggtagaacgtagaacaaattgtcaccaggcaattgtcaccatctttttaggtggtgtttggatccagggtctttaactttagtctctatatttagatactaatttagagtattaaatatagactacttgcaaaactaattacataaataaaagctaatttgtgagacaatttttttaagcctaattaatcaataattagtgaatatttactgtagcatcacataggctaattatggattaattaggctcaatagattcgtctcgcgaattagtccaagattatggatgagttttattaatagtctacgtttaatatttataattagagtccaaacatctgatgtgatagggacttgaaaagttttagtcccacgccttatccgcttcgttgcaacgtccagagtcttgcatttattaaggcccctggagctgtagtactactgttttctttttcccttttattttttgcccattttttgtggtggcacatggttcgtttgccgtcgctctggactgcttaatcctttggaatgtgatagtttggagggtaccccataaaccattttgtaggaggtttataagaaggtcaacatctttttttaagacgcatgcgagctttcacttaacgtgtgcttgttggtttatcagctagagacactaataattttttgaaacttagttttaaaggattttatgatttttattaacatagtctatttttcagcgttagtttctgaaaagcaaattgtttttttagtggctttgttcgtacttatccaaatggtatccattctactagggtccaaatagcagtacgagctactttttcatttttcgttttcaaaccgtttaacagtgtattttttaaaaaacaaatctattttttaaatttgtatatctaatactcccctttccactttatattataactttataagtcgtttgacttttttttccagttgacctaatttatagaaaaatatagtactccatgctatcaaaacaaacatatttcaatgttaaaatttaacagaactaatttaatattttagaagttgctaaatatttttaaatttgtttaaacttaacaatttttttttaaaaaacacttcaatatgaaactgagggatcgagggagtaacttgattaatccgtacgtctatcaactcagcccgaaacgctggatcgaacccctctacaagtccacattcatcttgaccatccatctccgatcggacggtcgatcatccatgttacactgaagtttgaacctgacgagaccacccatcgtctccctccctcaccgccgcgcgtgtcgatgcctcctccgcgccgccgcccgccctccgccgccgacgccgccgccctccgccgcccctacctccgcctcgtcgcgctctcctccacgctccgccacctcgaccagatcctcgccgtctccctcgcctccggccactacccgctcgaccccgccccggccacctccctcctcctccgctacgcctcgctccgcgcccccaccggccacctcctccgcctcttccgcggcttcccccgccccgaccggttcctccgcaacgcgctcctccgctccctcccgtcgctccgcccccgcctcctcttcccctgccccgactccttctccttcgcgttcgccgccacctcgctcgccgccttgtgctcccgtggaggcggcgccgcgtcgtcttccgcggcgcgcgcgctgcacgcgctcgctgtggctgcgggctacgcggcggacacgttcgtggcgtccgcattggccaagctgtacttcgtgctgtccagggtcgaccatgcacgcaaggtgttcgacacggtgccttcgccggataccgtcctgtggaacacgctgctggctgggctttccggttcggaggccgtggagtcattcgcgcggatggtgtgtgatgggtcggtgcggcctgacgcgaccacgctggcttccgtcctgccagccgcggcggaggtggcagatgtaacaatgggaaggtgcgtgcattcgttcgcagagaaatgcgggttggcagagcatgagcatgttcttaccgggctcatctcgctgtactccaagtgcggggatgtggaatcagcacggtgtctctttgacatgatggagaagccagatttagttgcctacaatgctttaatctctggttattctgtgaatggcatggttggttcatcagttaatctctttactgagttgatgaccctggggttgtggccaaactcgagcacactggtggcactgattccagtgcacagtccatttgggcatgatctgcttgctcaatgtttacatggatttgtcctcaagtctgggtttactgccaattctccagtgtcaacagcaattacaactttgcactgtaggttaaatgatatggagtctgcaagaaaggcctttgatacgatgccagagaagaccatggaatcatggaatgcaatgatatcagggtatgctcagaatggcttgacagagatggcagtggcactctttgagcaaatggtgaagcttaatgtgcgaccgaatccaatcacaatctcaagcactctttccgcatgtgcacagcttggagctttgtccctggggaagtggctgcacaggattatcactgaggaggacttggagcccaatgtctatgtcatgacagcgctcatcgacatgtatgcaaaatgtggaagcatttctgaagctcggagaatcttcaacactatggataacaagaatgtggtctcgtggaatgcaatgatagctggatatggccttcatggccaaggtgctgaagctttgaagctctacaaggacatgctggatgcacatcttcttccaacaagtgctaccttcctgtcagtactctatgcatgcagccatggagggttggttgaggaagggtggaaagttttccggtcaatgaccgatgattatgcgatcaatccaggtattgagcactgcacatgcatggtggacctccttggcagagctggccagctcaaggaggcttttgagctcatctctgaattccccaagagcgctgtcggacctggcgtatggggggcattgcttggcgcttgcatggttcataaggatagtgatcttgcaaaattggcctcccagaagttattcgaacttgatccagaaaacagcggctactatgttctgctctctaatctgcacacatccaagaagcaatactctgaagcagctgtggtaaggcaggaggcaaagagcaggaagctggtaaaaacaccagggtatactctaatcgagataggcaataagccacatgttttcatggccggtgaccgtgcccacccacagtctgaggccatctattcgtatttggagaagctaactgcaaagatgattgaggctggataccgaccagagacagaggcagcattgtatgatgtcgaggaggaagagaaggagcacatggtgaaagtgcatagcgaaaagttggcaattgcctttggattactcagtactgaaccggggacggaaatcaggatcataaagaatcttagggtgtgcctagactgccacaacgccaccaagttcatatccaaggtgacacagaggctgattgtggttagggatgcttcacggtttcatcatttcagagatggggtttgctcctgtggagattactggtgattcaattcagctgaatgaagtgcctctggtcccgagcatatgattgacttattctggtgatgaaagaaacgatcgtctcttactctttggaagagtatctgagccactgggatcaagaattgcaaccatagaaagccaattttcattggaccaggagaatttcagaactgaccgataaactaacatagcaggttacagattcaatttcgtagtgttggaacaagcacatttgtaatgcatcacaaagtgaatcttttgccaattggccattggcgttggatttaaatggcataacttgacttaggaagaggaaaacagtatgtcagtctatgcctctataagtgtttctctcgccagtagaatgatgagagaagtcatctcacgaactacgagggaaacacaagctttgtaacagtctgcaagtgcccaataggatggtgaaagaagtcacaaaaaaattactccaggtcaaatgcgatctatatcagttgcttgcttttcctttaacaaatctacacctatacattttatgcctaacatgctgaaaggactgcagtatctcagcatcgattgtgctccgtttgcttttggggtttcgttgtcttgatcatttgaaaattcttcagcagatgggcgataagtgcatctccagttctctatatgcatgttcacttgtgtcaactatcggcttctatgcccattccaactgcttcaaggttcacatgcatcctgatgaatagaagatgggcaggttgcttcaatgctttgaactttgaagctttgtatcaatcttgagacaaatttgatggttgtgatagtgcatgtacataatcaaacttgtacatgtgggaaaacagttcttgcagatgggtgtcatctttccaactagaagccttcctgttgcaattggacacagttatattagcgtctttcaagcaatattactatatttgtgaaatatagtcaatttatattattgtgcagtagtagcaggagccaaatatttatctttgaactgtaagtatgaagaaatgattgtttaagtagcttggttgatcaaaagattaagagtaatgtatgagaaatgtcgatgactgttaggcttcctgagagaggagataacttccaaactaaatgagaagcaagactacttgttcctacctagtccatcggtgcttggctgcttgtagttagactctgtagaccattcaatttgtgaaagtgacatttttggagctcaatggggataataatggatcttcaattcttcatgagctggtacacataacttccatgcattcacaaggaattgtgcactccatacagagagtattactgccttattctcgttctgcttctttggtaatccttcaccagtataatatttttgcacatctaaaaacttcttgctttcatgttaccactgccatatgtcctcaacagtgcatatagatgttaccaaacaccaaatgatacagctccatggtcttttctattttgcaagcacctctgtgtcgtcatcatccattttcatgccccacggagctgcatccaggcagtttcacgagtccctgttcctgcatccatctcctgatggtttgagatttatcccaccttccatacgaggtgtacaagttggacatcagcacataaaaatctggtgtttcaggatgaagtgctgccatcttcttgatggcttcttctccaaactctaacctggaatgtagcttgcacccatggagaaaggatccccagacactaattcctgctttgattggcatattctgtatgaactccaatgcttcctccagatttccggcacgggccatcacatcaaccatacatgcatagtgcttcatggaaggggtgatgttaaaatgtcgtgccatgctatcaaaatactcctttcctgcagtaaccattccagtatggctgcaagcggaaagtatgcttgtgaacactacttcattcgggtggatattttctttcagcatttcattgaaaagatcgatagaaccagctgaatcaccctgcatgccataaccgccaatcattgcagaccaagtgacagaattacggtcagtcatatcattgaaaaccctctgagcagatgggagatcagcacacttgctgtacaggttcagcagagcagtattgacatagatattggacataaatgcatattttatcgcataagtatgaaaacctttaccaatatgcagatctgccaagcatacgcaagctgacaaggcattcaccacagagatggcatcaggtgatataccctgcatcctcatccggttgaatagtaccagtgattcattggccatcccattctcagagtagcctgccatcattgaattccatgcgacaacatccttgatcaaaatccttccaaatatgctgttagcttctggcaaagcttgacattttgcatacatatcgacaagtgcattcctgaccacatcagattccatcgttcccaacttaacccctatagcatgaacagatcttcccaggggtaagtggcgtaactgagcagaagcggaaataacagtggctatggtaactgaattgggaacaatgctcacgaatttcttgtgaagaaaaagctgtagtgcatcaagaggcctcttattctgtgtgtacccaacaatcatcgccgtccacaaaacaatgtcaacaaactcgagctcatcaaacacacgtcgagcatcctctactttctcgcacttggcatacatatctagcagagaggcactgatgaaagagttagtagataacccgtatttgataactgatccatggatccacctcccttggtgcaaaccaccgagcatggcgcaagccgcaagaacactcaccatagtgtattcgctcggatgcacattgtcttgtctcatctcattaaacagaaccaatccttcttcagctataccattctggatggaaccgctcagcatcgacgtccacgacaccacattccgttcaggaactctatcgaacaccttccgggcgttctccaggtctccagctttcgcatacatgtcgaccaagctgttcatcacgaatccatccgcgccgccggctttgacgacgtcgcagtgcagcctcctcccgtaccggaagtccgccgacctgacgcaggccttgagcgcgagggacagcacgacgtcggcctgcgccgccgcggggcaccgccgcctcatgtcccggtggagcgcgacggcgtcggcgtggctccccgcgtcgacgagccacccgagcatgaccctgtaggcgtacgcgtccgggcggggcgtcccgtcgagcaccccgcgcgcggaggcgaggtcgccgagcgccgcgtagcagctgagcagcttggtgcgggcgcggatgccgcggaggaggccgctcgtgaggaggaggaggcgcccgtggagcgcgcgcagggagcggagggtcccgcatgccgggaggaggaggacgagagcggaggcgtcgcggggagcggaggcgcgcgccaggtgctcgacggaatgcgcggccggcgggtgcattggagtctcggactctgggtttcctcgttgcacgagcgcatccaatttgggacttcgaatgtggaatccaatggattagccgtgcgacgggctaggcccaatggtgatctaaggcccattaatcattgatcagtggttgggaatttcattttggaaaggaataagttcactttgactcccttaaatgtgacccgaatctaattcataactctaaaccgcaaaaccagatatctttacccctaaactgttaaaaccggtgcaatttgactccctcagcggttttgctgacgtggcgcctacgtggcgatattgaccgagtcttcattccacatggcgatgacgtggcacttacgtggcattagaattaaaaaaatgcgtggacccattagtcattcatacaaaaagaaatattcacacaaaaaaatgcgtgatgatgctgccgccgagctctatggcggcctgacccccgccgagatgagtggtgtagacgtggccgcttgggcgggcgtgaccctctaggatgagcacgcggatgccgaagcggagcagctggcgggcggtgcggcgaggctggcgccgacgacgagcacggatgcggcgaggcgctgcagcgcattgggggagagagagagagagagaagggagaggcaggaggaagaaggaaggagacagggaggtcccacatgtcagtgggctcaattttttattgtgtgaatgactaatgggtcccacgcatttttttaattctaatgccacgtaattgccacatcaacaccacgtggaacaaagactcggtcaatattgctacgtaggcgccacgtcagcaaaaccgccctccaaaaccgctgagggagtcaaattgcaccggttttaacagtttaggggtcaagatatctggttttgccgttcagggttatgaattagattcgggtcacatttaagggagtcaaagtgaacttattccttttgaaaaacaaaattcttctgctttactagttacatcatgtactcatatgttgtaacgggccaagcttatataattttttaaaaaagagcccatatattttaacagatcatacccatataattaaagaggggttgggagcgagactaagaatagaatactaggtctggtggttacttttcgcgtagtacgtgctgcgcgagtcgagttgggaggaggtgatgaaaggaggacgactccgcttgtaatttagttttcatatcacccagaattctaatatcatatatatatatatatatatatatatatatatatatatatatatatatatatattttctctcgaataccaaaagagtgcaacttaaatctcttatcatctttgcttgggctatggcttattattacctaagaataatatacggagcaaccaaaaaatgattttggagtaagatttttatacatctactttagcaacccaaagattaaggctgaaaaacagacaataaaaaactatctaaaataattttaaaattcaaatttggctctatcttaagtttagaaaggaaatttaactacgctaaaagttgagaagtttaaaccagcatttttttaatttatttatgcgctggtaaaagtttacctcatcccttcttgtccacctcaattgcgtggggaaatagagtaatcaattattgtaacaaacaattagttttcaataatgaaaagatgatgtgaggccatgactttataggttgatatgactattaatattgagggtatagaccaattagcacgatttttgtcccattgctggttttaagatcatgtaaagatgatgacacaagctttatggcttcaacgttacaaatgtactgtattactgtgttgttgtgatgtgaggatgatttaagatgatgtcacaaactttaggggttaagtggactatctaatagcttgggtagtaaaatgaagtattgtccttctgttgatctatatgatgcgaaaaaaaatatataaaccacaatacagttcatgccttgctgaaatgtgttgatgtataaagacaacaacacagttgtaattcaatagtagatggacaatgtgcatatatacaagacaacaagcaggtatatatataaagatcttttatattgatggtgcatgtacctatctcatggacttctttgatgaatcatgatttggtggaagatgttgcagcatcactgtttttttctagacgacatggtaaattaatgccacagtttcatgatgcatgtcctatagctaattctgcattttgttagcagtatttgcctccgtggctccatgcatgtctccgtgtacagcactaacaaacagaagaggacaaatcaagggtgtttctatatgcatttgtacagatcatccgtcatgttcactcacatgcaaaaaaaaaactactaattgtgtcttaagtcttcattttatacgcatatataatcataaatggaaccatcctgtgtacgtatgctatcataaatggaaccatcctgtgcatgctcttaattaatccctattacctttcaagcaatatatatatctagcaatataaaaacacattagtttcttggattgatcatggagcgcatgaatgtcgatagagcaaagattgctcctgtataggacgaagggttagatgcatgagaaaatggacaaccattgaaatttgtagcatgcatgcatatataaatgagttatatacttttatatgtattgtccttgtgttgatttaaggattttttttaagaaacatagtacaaccattgaaattgtagcatgcatatgaattagtatatacgtttatatgtattgtccttgtgttgatttaagattgttttttttaagaaacatagtacaaacactgaaagtaagtacaatgaccttgaaacacatccaatcaccttaaaacatctacaagaactgaaggaggcagataagtccacttgatcaaatgactgctctatttgtagaatttatggtagtaatattagtaaatgtcttgagccgtggtcctttatagtcaaagttatttgcttcattagttgggtttccaactttccatcaactgctggctctgtggaatttactctttaaaatatgcctgactgttccttgtggtcctacaattcttttcctcccttgttgcacaagaatatcttttattttggtggcaaatcattcaatcaatctacacatttttgactgcataggaaaggtatgtgaacagatgggacataaataatgaaggttgtttagaaaagcaagaaaattgtgcttacactttgactccaaaatccagcataccctatcattagatcgacatacattgaagtacatatgagaaagcatcttcagtctaatgggtagctagagtaatccgcgagtgactctacctactattgttcaaaacatagtagtcacatttacctgcagatgtgtaagtttttggtagaagttcgtaggtgttgagtgtgtcctcgtgtgggttctccatataatacagaaatataaataatgcctccttttttaagtgtatgttattcttaacttttgaatataacgtttaactatttatcttactaaaaacacgtgtgcatcatttaactatgtaaagtagtaggtaattattttatcatcaaaagcagttaatttaagcatatggtttacatatatggattacatatttaatttgtactaaattttttaggaatatagttaaactcattttttatataaaaaacaaataacatcacatttaaaaacggtgagagtatttgcctatagtgaacacatatgtgattgaaaatggagcaatattagtcaacaaaagtcaccggcgttggtggcgccactccaccagacgcccaactttgctgcacggatttaggtaggtacgagaaaactactgacagaaacaagcactgccccattttattttattattattgagaggaccaagagtcaacttagtttgacgtgatgccacaatatttgatcaagctggacactgtgacatacgatggctggccaataattattttgccatctagcttgaagtggcagagttactaattaaacttactccgtacttataaaagaagtcgtttaggacaatgtttaagtaaaaaatttagaatataaatcatgaatatctctcaagttgttgagtttaaaaatgtaaaaattatatgaatagatttgtcttgaaaaatactttcataaaagtatacatatatcacttttcaataaatattttttatggaaacatgaagtcaaagttgtgttttggagac

SEQ ID NO: 23329 - DNA, 2286 bp, Oryza sativa
taagatcgtctcattcaaattagttaagatgtcttattgtttcaactatattaagataatagtctctaagtgatgtgtaactaattaagagctcatcactagctttgtacatacactaatgaactcattttcagtatctatacttctttcaaaataaggcagtgattatgacagtgaagttgccacctccaccaactattgacaggctatacccgtctacggtatttgtatagtataagaatcgttggtactagggtatacatgatattgaggtaaaagcgataggagacagagattttatataggttcgttcgaaccccctaactaacaggtaatagtcatactcctatttatcgaagccggtattgcctttatatatatatatatatatatatatatatatatatatatatatatatcaatcacacaagtacaatatatggtatgagctaatctagtttccatcagcctaacagcatagagtactcacatgtggtcggcgactagcgtagtcagctttcttaaatatattgggtagctctagattcatcatgtcggtctctattgcaccatattgggtttatctaggtatatattgtcttgtcttgtcttccatgttagtctctctcttaacctcctatggatgtcttgtatttatacccttaagtaccctcctatccaagtaaaactagggaaacaggtatgtaaaaactatccaagtagtcctaggactatgtttctccttctttatctggaacaccttctatatataagctgacttgattctgtataagacttgatatatagtgggcctcaccgagcctaacacaaaagtatttggtataatttatctgtaatactaacaaatattgtatagagtattattacttatttatattttttttacctactcttcctttgcatatttacatataaaagtcattttacgtatgattctacattattttatcttaaaatataaaatataagtttattatgcaaaggcatatacatgcaaagggacaaaattgtcaaaaagaactttcaattaatttgttccaagcaatattagcatacattcaatttaatcaggggaaactattctaaactataaggtgacgtcccatcgatatttgcatgccacttaaatagttatgaaaaaaatttaacttttacattttgcaacgaaaaaaattgactgtgaatacacgtaaactagttgtattttaatttgttttttcgttgtgacttgtagaagttgaattttaatttgcatgtttgtgaagtgatatatcacatgttaataatttttttcaaatttttttaatttattttatgacgtacgaataaccaggggacgtcccctccatagtttaaattaaattcactctcttaatcattagccgggtacttaaatagttagtcgatcgaaaaaatagaactcatcaattcttcagtgccaaaaactcatttggaattggaaactgtcagctccaccaaccacgaacttcgcctctatttaagcgaacgaaacacacgcagaaacctgcactaccatctcaccactgatcagtagctagctcgtgaagaagccatggcgacggtggacgtgctgacgtcggaggtggtcgtccccgccggcgagacgccggcgggcgccgtctggctgtccaacctcgacctcgccgcgcgccgcggctacacgccgacggtgttcttctaccgccacaacggcgagccggggttcttcgcggccgacgccatgagggacagcctcgccagggcgctcgtggcgttctacccggtcgccggccgcctcgggctcgacggcgacggccgcgtccaggtcgactgcaccggcgagggcgtggtgttcgccacggcgaggtccgggcactacgcgctcgacgacctgatgggcgagttcgtgccgtgcgacgagatgcgcgacctgttcgtgcccgcggcgccggcggcggcgagctgctgcccgcgcggcggcgcgctgctgctggtgcaggtcacgtacctgcggtgcggcggcgtcgtgctcggcatggcgctgcaccactccatcgccgacgggcggagcgcggcgcacttcgtggagacgtgggcgagcatcgcgcgcggcgcgcccgccgcggacgcgcccgtgccgccatgcttcgaccacaggctgctcgccgcgcggccggcgcgcgcggtgctgtacgccacccggagtacaagcccgagccggcgccgccggcgcgcgccgccacggcgtccacgtacgcgagcgcc

SEQ ID NO: 23330 - DNA, 21911 bp, Oryza sativa
ccgctgccgccggggtacttcggcaacgcggtgatccgcacgtcgacggcggcgacggccggggaggtggtgtcgagccccgtggggcacgcggcgcggcgggcgcgcgcggcgacgagccagggcgaggactacgcgcggtcggtggtggactacctggagggcgtggacgccatgaacctgccgaggagcggcgtctcgcgggcggacctccgcgccatcagctggctgggcatgtcgctcgccgacgccgacttcgggtggggctcgccggcgttcatgggtccggcgatcatgtactacagcgggttcgtgtacgtgatgaacgcgccggggaaggacggcgccgtcgcgctggcgctgtcgctggagccggagagcatgccggagttcaggaaggtgttcgccgacgaggtggcgcgattggcatgacacgagtacacgacgctccctgcggttgcatgcatggtgtccacgtaaacgttacgtacgttggcatttcgtatacgtatacgatcgagcttgatgtaagtctgtaatgtgtatgcatgtacgtactgtacgtatatatgtacgtacatgtagaatgttaccgtgcgtatacatataagatatacataaatctggagtttccggattcacgtatgaaagtgaagggtgtagtgtatattcaagcaggcatggcataattaatcacaatatttgaattgaacttgctaagctagctagtgctgatgcgatctccacgtgcttatttgtaggggtgcttttttaataatgtttagtatgagtgctagccctaccaaaagttttgtgatagtgactcatcttcctagtatgttgcaatatggaccttataatcccccttctacttttaccgtttttagtaagagattaaggatgaaaaaaagactaaaatacccttgaggtatgattatggatagaaaggtggtctagggctataatgggaataaatttgaattcgagttaattaatgagacaagtaccgcaccaaaaccccttaaaattttaggccaaaactagaatggataaattccttacgttatgagatagaggtcatattttaccaggagtacttcaattctttctctcccacaaactctctcatgtggatgtcttatggcaaaagtctactttacattccttcactatttgttgagatggtccttcctctcttatctcgctgcccctatcaccgttcctatggtttcatccattccccctaccccgcaccttcctctcctcctctactgatgtgccttcctccttgcccgtcttctcatgcctcaccaccaccggcctccctgcttccttcctctccatctattggttacccctcgccatagctttctaggcttcatgatcggtggcctcctagagctcgagcttaagtggcggtggcaatcggtgcagagctcgagtggcggtgtagagcctcccaatatgcttcgaggagggccagcgtgaggtgcaacccccatatccaccataatcaccacctgggtttcgtgatagtccgtggggaggacaaggacaaaaggagttcaatagcaatggtaggggagctaggcggtgcgatctgttttcaccaccacctccaggtcatccttcccgctttcacatccaccttctcctcgtcgatctatcccccttcgccattatcatgcggtcggccaccaggctgccacctacttggagccatgctgttggtgtagtccacaggaatgagagggaaaagaggagcaagagaaggtggaggaagaagacccgttgtcgtgcaggttaattccatttgtatttttactgaatgtaatgccacatatacatcacatcggatgtaactatcgtcaaaaccacctagagaggtaaaataaaccgatattaataattaagagaggtcatatacttggtttggttttattgtttaagttttattgtttaaggaggaaaatcacgaactgacccgtagttaagagacgtaatctggatactttttctatgttttgcatactcctagaaatggaccaaatactcggccagtccatggtcaggagcctaggaacttaggaagcctggttgaagtgggcaaaatgtcttctcaaaaaaaaaaaagtgggcaaaatgtcaccagacaccggctagcaaaatattcggtccaaaaatagactaaggtggtctggtgttgacccatttcttggttcgcccctaagtacttcctctgtcgggtttaaatttgaatgcttgctcgtttgattaaaaagattgttaggatagaatatgcaagtgtttaagtatgcacttgcagttgcagatatgtacgcaagtctatgcatggcactcctagtaggcttttttttttcaaaaaacaatccggcggttgaccactcatagtgaatacagtcaaccataaaagtcttaaatcatggggcttgaggctaggttatacaatttctttctcaacttctgcttatttatttttcgcgtccacgcttttttttaaaaaaataaagaaaattgttcctaaaaaatcagaataatttatttattttaaaagtttttagctaatactccctattgtattttaatgtataacgccgttgactttttatatacttttgatcattcgtcttatttaaaaaatgagtaaatttcacaaaactacaggtattttgcataatttatcacaaaaatatagatttaagagcttgtttcacaaaactacagacttagtatgtccgtttatcacaaaactacaggtactttgtacaacctatcacaaaactatatatttaagaacttgtttcacaaaactatagatttagtgtattcgtttatcacagaactacacatttagtgtcttcatttatcataaaactacaaatttaattagtatctccattatcacgaaactacaggttttaacaatgctgaaacatgtagtttgtgataatgaagacactaaaacctgtagttttgtgataaatgaagatattaaatctatagttttgtgaaacaatatcttaaatctgtaggtttgtgatatattgtgcaaagtacctgtagttttatgataaacgaagacattgaatctgtagttttgtgaaataagttcttaaatatgtaattttgtgatagatcgtgcaaagtatacgtagttttatgaaatttactcttaaaatttatgtaattataatttattttattatgacttgatttaattatcatcaaacatttttttaaggatgacataaatatttttaaataaaacaaatggtcaaatgttgataaaaagtcaacggtgtcatacattaaaatactgtgggaataattaattaatcatcattagctgatgaggtgtatcgtttttttctaccgaacgaattagttacgaactcagaggcgttcaacacatccttagagactgcttttccggttgaaaaagcatacccatgattacttgacgggtggaaattggacacagattttgcgtcgtgcaacttttgactgaagttagtgaagcatacacacgtagcaactagcatgcatgacggatggtgatgcgcacacgtacagtcgttggaaaatattgttagctttgtgcttcggtcgtgcaataatacccagaaaaagtacgaactatcctctaaactatcagactgtatgaattatttctctgaaccacaaaaccagacatttttcacccctacctatttaaaccgaacaaataacctctctctcccggcttaatccacaattattttggtcctacgtggtagtccagtcaacaaacattttttacaaaaatcggaagacccaaccagtcagtttctcaccctctctatatctctctctattctatctctttccccaattcgtccctccgctctctctctctctctccctcttctccctcccctcacctccatcactcaccggcagcagtgagttgagaacggcggaggcgggggcgaagccggccagctgggggtggtagaggggggccgaggacggcgacgggctggagtgcagacagcgcggatccagaaaaatgatgcggcggttggcccggacggtgtgctctacctcctcctccaccgccgatcgcccgagctcgccgcctccaccactggccacccgagatcgctctgcctctgctgctagccacccgagctcgctccgcgtctgcctctgacgccgaccgcccaagtttgctccacctccgcctccaccatcggcaccagaggtcgctccacctccgccgttgggtaaattacactttttccataatatattttaaaatttagagtaaattctagtttgggttagtatttttttttaccaaactttcattttggactacccctaacctaaagttttcacataaagctgagatacgtttacctcttttgcactttggatcaccctctccatctctttctttgccacgtccagctctcaccaatcaccacctggagcttgattgatgaggcaccggtgagcctctcttctcccacaccagtgagctccttccctatctctttctccctcggataccctagtgtctcaaccaccgatgccgctggatcaaaaagtaggggcagcaaggtggcaacaagcttcgccgccaggttagaatgacgcaagggcagtccatcggtttaagacgacagagagatgtaggtggtggtgggagctagaggtggagaagagagagctgaagaaagagtggcccacaatgtaaaaggggtaaacatacctagctttatgtgaaaattttgaattgggggtagtccaaaagtgaaactttggtaaaaagaacctactctaaactacaatttactctaaaattaacagtttctacaattaaattgaagctatgatactctcattggttataaatacagtatttgacagttaagactacatctaataaaaaaagttgaattttgaccaccaataaaacttctcaaatgcttagtattttataaaagaaaagttatatgcatagattagccttaaaagttatcatgatcttattagagtttattaacttgtcctgatacctaaaattaatggctaaagtttcataactttgatcgactaccgaatattgtgactgtaaagacagatgcaatagagacatttgaagagtgacatttggtaagggaggcaaatagttagattcagagcatgattcaagttttatgtacggatttttaataagtacatgatttcattatttgttaaaacacgcgagtgtaaggccccctttgatttggaggaaaaatataggaattttgtaagattatgatcctataggattttttttcctatatgaccctttgaaacaaatgattgaaaactattgaatcctatgaaatttctaaggaaagtctcaatccacaaagttttagaggatttttaacatgaggtccaacttcatgagtttctattgagtctatctctctcatctcattcctatatttttcttgcggtttaattaaacgattattcctgtatttttttctacgttttacagtcctctattttgtaataaaatttctatcaaaatcctatattttacttattccttcattttctcactccttttattcagaggagcccttgtgtgcactacatgtcagtgcttcgtgtgttgtggtggccgcaataagtctggaaaaaaagggcagtttgaccactcatcatgaacgaataccatcaaccgtggaggtctaaattgtgggggtttgtggagtactttagccaattctgctagattgcctatccggtggaacctactttaaattcactactagcaaatttaattggacagagatttgcatcgtgcaacttttgactgaagtaaattaaacacgcatacctcataagttattttaactttttcacaaatcatacttatttagctttgtccaaatttataagaaaatatagtaatatttcaacataaaaaatattaaaatatatttaatattggatttaagaaaattaatttaatgctataaatattattatatttttctatatatttgttaattttttaagaagatattttaaaaaagtcaaagtaaattataatatatgaaacgaaggtaggacgtagcacgcccgatggtgaattggtgatgtacagcagtacattactaagaaaaatattcttacctccctgttttggtcatacagtttacatctttttagtattaaaaataaaatttgtagttacagtgaaactatagttacagcgagactcctatcaaaaatgagatacatgtgaactatggtaatttgttcaaggggcaattacatccatgcccttactttgaaagccaattacggttttacccccactttttagggtttgcatttttatcctcaccttttaaatttgaatcagccgtgtaccatcacttctaacagttagttttaacagtgttagttgtagagaaaaggacatttatacccttggtggttattgtattttggcctctatttttttcagccttgtgtgattttgcccctattttgtgatttcagctggtgtgattgttataaataattcaaatatgagcatttcttgtgatgtttttgtactttaaaaaaaatcacaaatactaggcaattacaaaatttgaccaaaatttgaataaaattttgacaacatttcgacagaattttgacacaactagcacaagtcacatatatagcaagcattacaaagtgtcctatacaaataagtcacgatacgtataagtcatctgttggaattaatgaatgggccttagcccactcgaagattaattctttggaaaatcacaaaagcccacctcatgggatggcatgcatgtggagtttagtaccaccttacttattctaggagagggggacctccttaaaagggaggatgccctcctagccacttgaagcatgtgtggtggagagaagaggggaaacacacgcgcgcgctcgctcgcctcgcctggcagggcaggcggcgcgcgtgcacgacgtacgcgtcgaatggtccaaaaaattggctcctcacccttgcgcaaatgcagcctccttttgcagttttgttttgctgcaaattcggattcgtttttgttttggaaacgttccgaaaaatccggtgcgtgcaaacggcgtggagtccggataagttacgcgcgacttatccggttcggttacgcgcagtagagatcgtgcgggcgccctgatcaagcgacccttctctatataaaccgacccgccgtcttcacgcaatatatgcgaaaatcaatctagggtttgcctcctactctgtactgcgccgtcgctcgtagactactccatcccgctcgccggcgtgcaccagcgatcgggagagcaggtctccggaacctctgcctttgacgtcctgcaccgggagaaggcgtcaataaggtttttgggaagcgcttcgcgcgactgctccctgttcgttcgcgacggctcgccttcctcttcgctcgcgtgtttcgtgccttcgtagacacctgcgaaaagtttcgaccaagcagccggtcttttcgtcacctcggtacgtgttcaatatgttacgcatatttgatatgttcatgttattctgcgtagtttacatgtgtagatctaatgatgcgttcatgctagttttcatctgtaatgtcataatttatttatggaataaattaaatcattatatgcccataatctcaacaatccaaaaaaccttattataggcactgtgattttactatggctggttttgccggtgcactgaggccggataaattcaccggtgtgcattttaagagatggcagatcagggtcactctgtggctgacagctatgaaatgcttctgggtgagtacgggcaaacctgaaggagttcttactgctgaacagcagaagcaattcgaggaagccactactctctttgtgggatgcattcttagcgttcttggcgatcgtctggtcgaggtgtatatgcatatgaccgacgctaaggagttgtgggatgcactgaatactaaattcggtgctactgatgctagcaatgatctgtatatcatggagcagtttcatgactacaaaatggctgacaaccgttctgtagtcgaacaggctcatgagatacaaaccatggctaaggaactcgaactccttaagtgtgtcttacccgacaaatttgtggccgggtgcattattgcaaaactacctccatcttggaggagtttcggtactgcactcaaacacaagagacaggaatactccgttgaggggttgattgcgtctcttgatgttgaggagaaagctcgggaaaaagatgccgcgtctaagggcgatggtgggcagtccagtgccaatgttgtgcacaaggcccagaacaagagcaaggggaaatacaaagctcagcagaccaccaacttcaagaagcagaagaagaacaacaacaatcctaatcaggatgagaggacttgctttgtgtgtggccaagttggtcatctggctaggaagtgtccacagcgcaaggggatgaaggcacctgcagggcagacttctaagtctgctaatgtgaccattggcaacactggagatggaagcgggtatggtaatttacctactgttttttcagttaatcaatctactaattggtgggttgatactggggccaatgtacatgtttgtgctgacatctcattgttttcttcttatcaggtcgcacggggttccaccgtcctaatggggaatgggtcacatgcttctgttcatggtgttggcacggtagatctaaagtttacttcgggaaagatcgtgcagctgaagaacgtgcagcatgtcccttctatcgacaagaatcttgttagtggctcccgtctgactagagacggatttaagttggtttttgagtctaataaagtagtcgtgtctaaacatggatattttattggtaaaggttatgagtgcggaggcctgttccgcttttccttttctgatttctgcaataagtctgtgaaccatatttgtggcagtgtggatgatgaggctaatgtttggcattcacgtttatgtcatattaattttggcttgatgtctcggctttccagcatgtgtttaattcctaagttttccattgtcaaaggttctaagtgccatagttgtgtgcaatcgaagcaacctcgcaagcctcacaaggctgccgaggagagaaacttggcaccactagaactcctacattcagatctttgtgaaatgaatggggtgttgacgaagggtggaaaacgatatttcatgacattgattgatgatgctactagattttgctatgtgtacttgttgaaaacgaaagacgaggctctagactattttaaaatttataaggcagaagttgaaaatcaacttgacagaaagataaaaaggcttaggtctgatcgtggtggagagtttttctcgaacgagtttgacttattctgtgaggaacatggcatcatacatgagaggacgcctccctattctcccgagtctaatgggattgctgaaaggaagaaccgcacactgactgacttggtgaatgccatgttggacaccgcgggactgcctaaggcatggtggggggaggcattgttgacctcaaatcatgtgttaaacagagttcctaacagaaataaggacaaaacaccatatgagatatggattggtagaaaaccatcactttcttatttgcgcacatgggggtgcttggcgaaagtcaatgtaccaataacgaagaagcgcaaacttggacctaagactgtagactgtgtttttctgggatatgctcatcatagcattgcctatagatttttaatagttaaatccgaggtaccggacatgcatgttggtacaattatggagtctcgtgatgctaccttctttgagagctttttcccaatgaaggatacacatagtggttcgaaccaaccctctgaaataattcccagttcaatcacaccaccagaacaaactgaacatacacatgaacttgtctctgaggaggatgtcagtgaagctcctcgaaggagtaagagacaaaggacggctaagtcttttggtgatgatttcactgtgtacctcgtggatgacactcctaagtcaatttcagaagcatatgcatctcctgatgcagactactggaaggaggctgtccgtagtgaaatggattccattatcgctaacgggacttgggaggtgacagagcaaccctatgggtgtaaacctgtggggtgcaagtgggtgttcaagaagaagcttaggcctgacggtactattgaaaagtacaaggctcggcttgttgctaagggctatactcagaaagaaggcgaagatttctttgacacttactcacctgttgctagattgaccacaattcgtgtgctactttccctagcagcctcacatggtcttctcgttcatcaaatggacgttaagacagcttttcttaatggagagctggatgaggagatctatatggatcaacctgatggtttgtagttgaaggtcaagaaggcaaagtgtgcaaattgttgaagtctttgtatggtctgaaacaagctcctaagcaatggcatgagaaatttgacaaaacattgacatctgcaggctttgcagtcaatgaggcagataaatgtatgtactatcgccatggtgggggtgagggagttattttgtgcttgtatgttgacgacatactgatatttgggacaaaccttgaggtgataaatgaggttaaatcattcttgtctcaaaattttgatatgaaagatttgggagtagctgatgttatcttaaacattaagctaattagaggtgagaatgggattacactcttgcagtcccattatgtggagaagatcttgaatcgctttggctacattgatagtaagccttctccaacaccttatgatcctagcttgttgcttcgcaagaacaagagaattgctaggaatcaactggaatactcccaaatcattggctcgttgatgtacctggctagtgcaactaggcctgatatctcctttgctgtgagcaagttgagccgatttacttctaatccgggagatgatcactggcgtgcgcttgagcgagtaatgcgctatctgaaaggtactgtggaattggggcttcactatactgggtatcctgtggtactggagggttatagtgattctaactggatctctgatgtggatgagatcaaagccactagtggatatgttttcacactggttggtggtgctgtttcatggaggtcttgcaaacagacaattttgacgaggtcaaccatggaagcagagctaacggcactggatactgctactgttgaggcagaatggctgcgtgatctattaatggatctgcctgttgttgaaaaaccggtgccggctatccttatgaactgtgacaatcaaacggtaattgtcaaagtgaatagttctaaggataatatgaaatcgtctagacatgtgaaaagacgattgaagtctatcaggaaattaagaaactccggagttataacgttggattacatccaaacagcgagaaacctggcagatcccttcacgaagggactatcacgaaatgtgatagacaatgcatcgaaggagatgggtttgagacccatgtgagttatactatggttgtaacccagtctatgtgatcggagatcccgtgaattagatcctgggaagaacaaaccattaataaactagaggagagtaccaatatatataccctatccaagtgaagatgcatatactctcgtgagctgcaaggcaggttggctatgccttaatgagttctgttggctttaattagcaaagatgttgtcctgcagagcattcttgaaggaactcacctttgtgagcttgactgttggtcacagtctatgaagattttgggtgaatcttctaggaagcttactaaagacctaggagtatgacttatacgctccacccgaggggtagtctacagacggtctagtaccagataagactttgagtgaaacttgcttgcacaagacttgcaattcaaggcgtagtccattgttcaagttgtgagtaagtgtagcttggagttctaggtggatgttcaaccttaattggtctccatcgaaccgctggtatataaacagtacattggaaaaggcaaatctcagtgggattttgagatttggtgggggattgttggaattaatgaatgggccttagcccactcgaagattaattctttggaaaatcacaaaagcccacctcatgggatggcatgcatgtggagtttagtaccaccttgcttattctaggagagggggacctccttaaaagggaggatgccctcctagccacttgaagcatgtgtggtggagagaagaggggaaacacacgcgcgcgctcgctcgcctcgcctggcagggcagggcaggcggcgcgcgtgcacgacgtacgcgtcgaatggtccgaaaaattggctcctcacccttgcgcagatgcagcctccttttgcagttttgttttgctgcaaattcggattcgtttttgttttggaaacgttccgaaaaatccggtgcgtgcaaacggcgtggagtccggataagttacgcgcgacttatccggttcggttacgcgcagtagagatcgtgcgggcgccctgatcaagcgacccttctctatataaaccgacccgccgtcttcacgcaatatatgcgaaaatcaatctagggtttgcctcctactctgtactgcgccgtcgctcgtagactactccatcccgctcgccggcgtgcaccagcgatcgggagagcaggtctccggaacctctgcctttgacgtcctgcaccgggagaaggcgtcaataaggtttttgggaagcgcttcgcgcgactgctccctgttcgttcgcgacggctcgccttcctcttcgctcgcgtgtttcgtgccttcgtagacacctgcgaaaagtttcgaccaagcagccggtcttttcgtcacctcggtacgtgttcaatatgttgcgcatatttgatctgttcatgttattctgcgtagtttacatgtgtagatctaatgatgcgttcatgctagttttcatctttaatgtcatgatttatttatggaataaattaaatcattatatgcccataatctcaacatcatcgagcacaaatattacttagtgtccacagatcaaaccttaacagagacagatctcactgaggtgaagttaatcgaggggtggaaggggaggaactcgtcgatggtgtagatgtacttcttcttggagataaacttcttcatcgaagcagtcacccggatcgttttcttggggtcgccgtccaggacgatgatgaggtggtacggctggaagaagggccttgcacaaccacacagagccacagaaaagacatcttcttttgaatcagaatgccaccttgcactttgaacgataagcccaagagcaaacctaccaccttgctcgtgcttcctcccaaatcctcttcccaaatgaagccacacacgcttaactttgaccaggacgaacccatgatagataccaattcaaaaaagaaaaagaaaaagaggcaaattcaaaatcttcacacacgacgcacctcgatgctcttcaccgccggcttgttgagccccttcaggtgccggtgcggtgcgccctcccctccggagacctcgccgccgcgcacaacaggcagaccaccgccaccagcagcagccaccaccgccgcgcgtggtggccatgtgcggctcgcctcctcacgcctccaccgctccctcctcaaatcgcacttcacttcacccccactttctcttcaccgacgaactcacctcactgccgccgccgccgcctccgcgcgctccctccctcgccgcagcctccgcgccgcgggcacgccgtcgggaacaagatccagctcgttctaagtcagaagcacatggtactctgacagggggattttcagccgtccgatccacaacgaacagatcgatacagtaccgtgaatagtattttccaaacagcaactctaaaccatatttttcactgtttcgcactgttgctacagtgttacgtcagaggaactgtagcacgtgacgcagattactgtacacctctgacttagaacgagctaagtcaaggagccggttccacgccgtcggcgctagcgtttctccctctatcagtcaggccctatccactccctaggggtacaaaggtaattgcatatttatccataccctaaaaccttttctttattttcttttgtatttctttaacataaaacgtgggacctaccaaacggctgtcacaagtgagggtagacggctggttcagattcaaaaaataggggtaaaactgcaaaccctaaaaagtgggggtaaaacagcaattggctttcaaagtaggggcatagatgcaattatccctttgttgaatattaagttgtatgtcgacccaatcttcggagatgtacttatagagaaggaataggtttgccttgtccggcggcagcgaacgcgcgcggcacgcgcactgccacaccagcgccaccaccgcgcggaacgtggacgcccccgcgcacgccgccttcagcgcgcccacctgctgcttcgtcagcgtgatgatggcgctcgcgtacgtggacgccgtggcggcgtgcgccggcgccggcgccggctcgggcttgtactccgggtggtcgtacagcaccgcgcgggccggccgcgcggcgagcagcttgtggtcgaagcacggcggcacgggcgcgtccccggcgggcgcgccgcgcacgatgctcgcccacgtctccgcgaagtgcgccgcgctcctcgcgtccaccaccgagtggtgcagcgccatgccgagcacgacgccgccgcaccgcaggtgcgtgacctgcaccagcagcagcgcgcacggcgggttcggcggcggcgtcgggggcacgaacaggtcgcgcatctcgtcgcacggcacgaactcgttcatcaggtcgtccagcgcgtagtgcccggacctcgccgtgacgaacaccgcgccctcgccggtgcagtcgatctggacgcgcccgtcttcgccgccgccggcgagcccgagccggccggcgagcgggtagaacggcaccagagccctggcgaggccgtccctcacggcgtccgccgcgaagaacgccgcctcgtcgtcgccgttccgccggtagaagtacaccgtcggcgtgtacccgcgccgcgcggcgaggtcgaggttggacagccacacggcgcccgccggcgtctcctccgccggggcgaccacctccgacgtcaacacctccaccgtggccatcacagttagtacaaatttttggtcgccggcggcgaggtctcggtctcgttcacgttcacgttgatccgtgtgccgcgcgctacgtttttttggtggtttttcgtggccattttgggttggtttatatagagagagcgaggcatgtgtgcatgcagtggtgtgggttggtgagttgggttgggtgtatgaaatggttggcacgatgggtgtgcagcaaaggcagtgaagtctctgcagtcaaattgcagaaaaaagatcaataagactactgtcacgtagaacgagtccatttgtttttgaccggagatgcaagtcacactaggccagccatacttaatagtggtactagtagatgcgtagtaggtgtataaggggtttaagaataacgaggtatctcttctatcagtgtcactttgatacttaggatcagaattattaattaagtattaattattttaaatttaaaaatggattaatataaattttagaacaactttcctgtagaatttttttacaaatatatacaccgtttaacggttcagaaacatgcacgcggtgaatgaaagaaatctcctttctttttgtccatggctcaaaagtagtataatttgtaagaagaaacaacaaattgtaggggttacaaactaatattttttttctgtatatatgtacttgtatgttgaatatgtacttaacatcatgtggaaatggataatatatgagaataaacaacaaattgtaggggttacaaactgatattttttttctgtatatatgtacttgtaagaagaaacaacaaattgtaggggttacaaactgatttttttttctgtatgtatgtacttgtatgttgaatctgtactaaacatcatgtgaaaatgggcaaatggttcgtccttaaattactgtattgagttgagactgtcgaggttttcccattgagattcgagagtattcggaaaacgtgcgaatctcgcatcatatgattctcgtagaagtttcactgcagttaatcatacgtacagtagagtaactgtttgtgttatgctcattgctcccctttgcgtgtttctgctctgcatgttaattctactttttcatagcatctatagttttgtagctaggtttgaatcaagtaaagattagtgctgagaaaaactaagttgttttcactcggttttggacgtttggtggactagctaatataatcaggttgaactgagcgcacacgttttctttagaatctccacaaacttcgtcaccacgtagctaatggtgagctaagagcaaaaattaccaacatcgtgtctaacgttcaagctgaatgttttcaataaagtggatgtgaaaactagtaaagagtcgctagtgggacctgaaaaggaaaataaagtagttttgttagttatccttgtaaggctgtctttagttggatccaaagtttgaattttggttgaaatttgagatgatgtgactgaaaagttgtgtgtgtatgacaggttgatatgatggaaaaggactgagtttgaatccaaactttggatctaaacacagcctaagtaacttactactaattaatgttagctctttactgactgaagtgtagatgcatttccaatgcagaaattacccaggccctgtttgaagagcttttggtgacagtaatttttctctagaatcttcacgtttctaaacagtccagattcttatatattcatattaagataatatgtagttatagaatttagaaaataaattaaaagccaaaaacttaaaaacctatttttctatatatattctcaccggcgctatctctgaatcatattactggaaagaagatttttgcaggcggctgaaattgctttatgcagacagccacacacgtcgcatctaagtaaatgcctgcgaaaatgtatatcttcgcaggcggacggtctacccgcctaggaaaaactttttttttaaataggaaaaactttttatatgaaaggcttatctcattcttataagtagaagtgaaaacctaacaactacggccgctcgatagaatagagccactggtgctttctttttatgtggaatcatatgaagtcgagatgctgattgtaattaactagttagtgtgtgtttgccgcttggacgtttggtggaatagctagctaagcagtttgaactgatcgtgcacgtttttagaatctccataacctcgtcatcatctagctaatgatgagctaagagcgcaaaacagtgacgtcaagctgcataaacctcttcaacatcaatataccgtggtatttgaaaagtggtaaagaatataattgcaggggagaacctgaaaaaggaaaatgaatggttttatagagtattataatcatccttgttattattagcactagtattttcatatagtatcagagtattaatcatccttgttattggcagtagtattttcatagtattatctccgtctacatatacagggatttttgactatatatgcgtacatgtaggcggaggcggaaatatatatgtattattctccgtaaataattattttgtcagttgtacatatatgatctcaaatcgattttcatggttttttttctttgtttgtgtggaaccatagtaaaccaaatactgacgataactaaccaagtgtgtgcttggaatggtatttttctggctgggttagttccacgctaaaattgaaagtttaaagaaattggaacgatgtgatggagaagttggaagtttgtgtgtgtagaaaaattcgatgtgacgaaaaagttaaatgtttaaagaaaaaaggttggaatctaaatagggcctaagactcgtgactgatcttagatcagacaggtggaagagatgacagatttgagagagggataaggacgaatgggatgaaaggaggaggagggtcaatttagtaagaaaaaactatatagatgcattgaagtggtaagttgtagtatatatttgatttctgtcaaactgtaaaaccatgtatccaaatatatgaataatatgatatttataaggtagtgtttagatttaggaactaaatcacatcggatattttgacactaattaaaagtattaaacatagactaataataaaactaattgcataaacgagagctaattcgcaagacaatttttttaagtctaattaattcataattagcacatgtttactgtagcatcacatacgctaaacatggattaattaggctcaatagattctctcactgattagtccagggttatgaaatggtttttatcattagtctacatttaatacttttaattagtgtcaaatatgtagtatgatagggactaaaaattttttttccgtgatccaaacagcccctatcaaagaaaaaatgtaatggtacgaatttaattgagccactaatttagctatggtcgcacacgaaaaaaatgcactaattaccgtcggcatctggtctggtccggtctggtcccatattactgtgcatttgtacgattgtactcgagctgtggaaaaaaaaaaacctcagcttgtgtgtttagtttacattaaaattagaagtttggttgaaattggaacgatatgatggaaaagttagaagcttgtgtgtaggaaaattttaatgtgacaaaaaagttaaaagtttaaagaaaaactttagatctaaagagggcctaatgcagctccagtggagaactggagaatcaatggcgatgatgcacatggcaattaatgagccgagacgacgttgactatgaaggacaagaggttcagtctccggtggccaacgaggcatggagctgcgccgcctaaaatcgacgggaatctgatggacgtggtgtagcctacaccgtgtactctaggtcgcatcgctcgcaggggttggtggcctggacccgtgtacagatgattacggaggcaattaggcatgggttggtcgcttcctccgctgaaaccaagcaaaattttcagctccctgtcgctggtcctgtcatttcagtattgttgtgatgcgtctcgcgttacttatcaacgccctcattggatggcaaatgctttggctgataagccatttaagcaaaataagctaaccaatttgtattgaagtttggctgaattggaggtagctttggctgatcagccaaagtatttggccaaccgatgaggccgcaaggtggcagcaccaaccaccaacgatcgtagactttgtggtacaagttctttctagctaattgattcggggtacttaaaaaaacaccatatcccgtgttagattaacgtattttggaacatagatactatgaatcacattcgacataattttagaagaatttgcacatatttttaagcttaggatttgtatcatgattgatgctctgactccgatgatccagctctagtgacccccttctcctctaactccaaatatcccagcgaatggaagtggagtttgggtttagggccttggattgggaggggtgagagaaagcggaagaagggagagatcgctaggtttaaagtgatagctatggaaggtgacggctaggggtggacatggaagggtggcgaggtgttggcaccagcgcgagagccatgggaataaagtagggaggtggattggcattaaagttgagagcaaagcgagcttgtgattaggaggcgacggccaatgataatgatagtggatccgacaacagggagtcattggagacgggaaaaacagcgagacaagggaacctttccgtcaccggcttagagaacgaggagaggaggaggaggccggtcagaaagggcctggccgatcaagccatcgacacctttcagatttccagccaaccgacgaggccaactggtggcgaaggacgccaggtcaatgagataggggcctagttcgcgtcctgtggcagctaggagggaagacacaaaatgaggaaggggttagggtttagggaattcacaccaaatttagagcagcatgattgaatgggagttttgaatcaaatagaccttttttttcaataggagggttacagacttacagtttatagagtcatcgatagaaagatatcaaaactgaaatgtggctagttactagaccagcctcaaatacacacgcagggaactatttattaaggactacccattggacgattcaagcaataccctctttcatatatgaaactcatttttaatgttaccaaacaactgcattgttgtgtgaggccgctgattaaacactcctgcgttcctttctttctaaatctgccatcacatcgatagtacaagcgtatcaaacgactttccatagctgttccgaaaaagaaactggggcttttttcagccaccaatctcctagctccatgtccatcttgctcagcccttggacaactgttaggccagtttggccggcatagctaaaaggtgtgtggttgtgatcgtttagtttagtttagtttaatcgatggacaaatccaattacgtaattaattaatcggttaatcgaagagacaaggttaataaaataataataattagttgtgctgtcataaagtgttagtttgttaaatactcctctgattaagggctaaatcaaggagggacctacagtgtaaacactggtgtcaggtaacaccgataattttcagcaaaacttatggctaaactgtttgtctgtatatattataacactatgatcaaaaatataattagcatactatgactctgatcaacaaatcaattttctggatccatcgctagctaaatggaaactcaattcatgttttgtgctaacaaattaacacatgtctcactgccgttaacagtttctcgcatctcggtaataagcaactgctttctaacgacgcattttcaaaccgatgacgaattgtaatttagctggatcgaagacgaagacaccgtgatatttatactttcaagaagattctcctagatgatcaccataaggaatctccttcactaatcacaggacttgcgtcttcatcacgccagtattgccttcgtcacgctagcatcaccattcatcagcaactggagataatggttttgctaaacctgtggcaacatattttagggttgattaagagcaattaagcgtggcacctgatcaagctccaacgcctccacttattagcaatttgcaggctagagaaattaataataaatttatttttcttctcacacttttttagaaaacagagcattgtaattccagtgtaagtttttaatgtacagtgtaattactttgaaagtttatggtgtaattgtaatgtatgagtgtaggtaattggcagtgtaaaaacgatggctactttaagatgaaaaaagttatgctataaatatatctacttccatatgagatatataactcaacaaacatgtaaggccaaatttaactttacaagttataaaaaaataaaaaaataaaatgaaactacttaacatacacattcaaagtatatttgttattttt

SEQ ID NO: 23331 - DNA, 4068 bp, Oryza sativa
tcatagaagttaagtaaaagtcgatggtatattatagaacgtgacaaagtcagtggcaaatcgtagagctatgacaaactcagtggcatataatggattgtctctttttttaattattgagatgatatataagaaacgagaggatatcaatgtcatctccagtgatgaaaacactttccaaaaaaattgaaggcaaaccaatcttcttcttcttttttaattgcaagcgctagacgatggcttgaaaactccaagcccctaacccaatttcataggcccagttgaagcccgaagacatgattaggtaggaatgatgaacttattccatccaactatccaagcaaatgatggccgacgactcgacaacaaactgctcttcaacaaacgggctgaaatcagttctattgaagtggacttctgtttcgtggtagaaagaattgaacacaaactacttaaaatcagagttatatgtatgccccaagatcacattgcagtcttgcagacacatttacaaattgcctctcatgattcggcaatttgcattactgaagaacaatcttaaactgtcgattctaggacaagattgagagagtttgttgtgacacccagaataccaataagcgaagcggcatatttgcaaactaaaaataatttatgaataaaaccttttatatacgtgttcttagcgatctgaaagtaaaggctgaaaaataaacttcgatggaaaaaaaccataaaattaactccaaatttaagattgaaaattcaaatttttactgataagtataagtataaggaaaagatgaggctcgtaatctcgtactgttttgatgtactttagctgagagaattattaattgatgtacatgcagagtgattttatcgatccccttaagaattattacttgctgtaccagattttgtagtatagaatttagtgactctaatttcaaaataaaaaaaggaatcatatctcttcaaagacaataaaattcctcaagcatataatacgtgacaccaagtaactgaggatgttgcaacaccgtagcatatactgcacgggtgcatcctctttatatgctaaaacactgtatgcatgtgacaacatgtcttattttttcttcgggcaaggcgaagagacgccagccaaatttattagtatcttttaaaaatttcacaaagctacatatattttagtcaaattatcacaaaactacatatttaaggtgtaatattgtaaaactatagattttataacgaagttatcacgaaactatatattttagagtttaaatccttagcactagtgttatatttgagttataaacgtttaagttttgtgattggagactgcacgctatgatcggcaaaaatgcctgcctctagccaaacttttcattctgcggcaatgacccgtatcactttttttttttaaacacatcaactttattaagcaagaacagagttaggggataaaccccattacatatccaagcaaaagagccatccctaagaaaggagggttaactgaactacgaaagcaaccttcctgaaataacctaacatcagaaaaatgacccgtatcactttgtgcgacggttgccatactgccttagaagattccgtcgttcctctccatccacagcatccaaaccactacatatcgtcatcgaaagaacggcggtcagctttgcacatcattttacagcacgtacgagctccaccaaatctaaaagtccaaggcaccggttaggtcaaagatgatacttcctccgtttcacaatataagtcattctagtatttcccatatttatattaatgttaagatagataacatcaatatgaatgtgggaaatgctagaataacatcaatatgaatgtgggaaatgatagaatgacttacattgtgaaacggagacagtactaaatatccttccctttttatatgaagttggctagattaaaattgaactaaccaacgtcatatttggataggagattaggagtagatctccggtaatgacataataacaacatatatatatatatatatatatatatagtaaatttgtttggtgctccatggtgcccgggcaccattgttgaaattgagtatatacccaattcaaatgagtatgaaactttttcaattacctaggtattaacattaactactttactaactagtttaaagcaagtttgaactgaatttgaacttgtttttgttagattttgattctaggtatatagcatccatacatataattagttaggtatgtaatcatgtattgtgaaataaagttaaatttgagttgttttgttgataagtataggtatgaatcaaattattataactaggtatatactcacaatttgaaaattttaaaaaatttgagtgattttgtgcattagataccatggtgccccatatgagtggcctatatatatatatatatatatatcatcgtcatcattattatgggcatcatatcatcatcatcattgttatcctcatcatcttattatgcaatcttgctatactgtttcagcagttaatttcataatttgctgtgctgctgaaacattattttaatttgtggtgattaaacaaattaggttttagatgtagccgccattgacacgaatgacttggccgttgatccacccggcggcgtcggtgcagaggaagcccaccaccggcgccacgtccatcggctcgccgatccgccccatcgggcactcgccggcgacggcagcgacgcgctcctcgctcttgccggcgtagaacatcggcgtcgcgaccggccccggcgccacgctgttcgccgtgatccccgtcccggcgagctccttggccagcaccttcgtcatcgcctccaccgccgccttcgtcgccacgtacgcgccgtacccgggccggagggaccccacgttggacgacgagaaggtgacgacgcgcccgccgccgccgcgcgccagccgccgcgccgcctcgcggcagcacaggaacgtgccgcgcgcgttcacggcgaacgcgcggtcccactgctccggcgacgtgtccgcgatgcgcgggtacgcgccgtcctgcacgccggcggcggccaccaggacgtgcaggtccgggccgaacgcctcccgcgccgcgtcgaacaggcgcgacacctgcgcgtggtccgacacgtccgcggccaccgcgacggcgcgcggcgccgtcgcggagtcgttgagcgacgcgacgagctgctcggcgggggctgggtcgccgacgtagccgaccacgacgcgggctccgagggacacgaggtgcgcggtgaccgcggcgccaatgccgccggcgccgcccgtgacgatagctacccggcggtgaagcggccgatggccgggaaaattgggggaggagccattgacgccggtgaacggtggtggcacctgtgggtttctcaccagagagttccaatcacttcccatggctttcacatgcactaataatcactacaaacaatcgattagcctctatcacttgttatatatatacttcttccgtttcacaatataaatacatacagtatataaaagaacaaaaactactgtcgatagaaaatagtgagaaaatttccgatttttcagtcatcggatgccctttgagattcatgctcgtgcagattctttttccaagttgttgaatgtactttgagatccattgctagcacaaagagagaaaaggagcattaaactcgtgtgtttttttaaaaaaaaatacagtacatgcagatgcagatttttttttgaagttattgaatgtactttgagattcattctagcacgaagacaggaaataagcatcaaactatagtacatgctcgtgagattttttttttcagatgttgaatgtactttgagattcatgctagcacgacgacaagaaaggagcatcaaactcgtgacgagtttttttaaaaaatatatatatagcacatgctcgtgcagattttttttcagatgttgaatgtactttgagattcatgctagcatgacgacaggaaaggagcaccaaactcgtgacga

SEQ ID NO: 23332 - DNA, 14449 bp, Oryza sativa
taaaattttgacagatataattatagtgcaattatagtgtaattacactgtaacttatatgtaattacactgtaacttgcatgtaactacagtgtaacttatatgtaagtttcacataattttgaatcgttagatctattacaagatttgttttagtgaggaagaaaacaaatcatagcacacacatatgtgaaagaatttgttcccacgacctccaatttaccgaaataacatgttacggagagatttttgaaagttacatacaagttacattatagttacagtgtaattacatgcaagttacagtgtaattacactatgattgtactgtaattacatctatcaaatttttgggggaaaatttgtcgacaaatatatagaaaaatcgttggttggtgggatggggaggaatgcttggcagaaatccaaggggtccagggaccacccggagcacctcttgaagtcgtccctgattactcgaaaagatgtcttcttatttttcatgttctttataaagtcactaaaaaaatttagaaatatatatgtatatgatatgttactgtacaaaattcaacttatataagtataaaaaacattaaatttaacgtgtaattcgcggtcaaaattattgtttttgtttttaattgtacaggtcgaatgcgaacttgcctattaattgagagaataacatatcacatattgatttatcttactaaatatttttaaatgttttaatgaatttttagataatatggacaaaaggagaggggacatcctctagaagggggtaagaaataaaatccatctcactcttcttcctcgaacgtgctgtccgacacggcgccaccgttaccagaacatgcatgcatgcatgcatgcgaaaggacgaccctcaacaacattggactgtgatgactgatgtaatagcagtcatggaggttgggacgtatgaggaacaccatcgttgattggtaagatccaaacaagcacttggccagtgcttgataggagcaatccaactatccaagagatgaggtggtggtactgtattatgcatgaaacagccaagtgacacctcaacaacaagataccttatccattatcttatctaaaaaaaatctcgcttgtcggtttgttaaccagcgacgaacgaattgtgagaaaaagtagtgctacacgtgcgtgcatgcttgtttttcttcttagacatgcatgtctttttcttccttcttataaagttttctctcaaattaattacttatccgatatacaattcgattctaccaatgtgttcgttacaattaaatcttcacaacaagatcttacatgattatattacaataaaaaatatttatatttgtaaattacttttattatatacgtaagttacttttatcatatatatatatatatatatatatatatatatatatatatatatatatatatgttacttttagatttaactaagttacttcttatacatgtaaaagtaaatttaataaagtctaaaaggtatttacatgtattataaaagtatcttaaaacaaaacggaagtaactttgtcatgacattagaagtaaattcattaaagttactttctttttgttataattaagttacttctataatatatgtaaattaattttaagctttattgaatttacttttatatgtcgaagaaataatttagtgaaatctaaaagtaatttagatttattataaaagtaatttataatttttcatcaaaatatcatgtgagatcttgttataaagatttaattgttacaaacacaacgatgtaatcggatcatagaccggatgagtaatttaagagaactttatttgaaatataggtggatagagtctcttataggtggagtggtagctggtttagacaaactagctaccactagctgtgtagtcacgtcctatataagtgttgggcatatttcatgttttggttttccaacagacacaattatatacgtgtagtcttttttgctgcttagggacgtgtagtgaacagtcgttgttagccttatcaacgtgaatcgatctactgctagatccagcaaatttgatgaggaggcacgcaagtgataaaagtctcctactacttgaagagaagtaggggaggtcggcgaattttttctagaaataatacgattttaatggaaaatcgcaaaatataggtcggttaggtgaaatcgtaagtttagcactctgtcgaacaactatggttcgacagggtagttggtccactaaaaaaaataaaaaaagtacatgaacagtgttgcgcagtggtaatgttcgatatgtccgcatgaacagtgctattctcttttttttaaatttttttatcaccctgtcgagctgcgattgttcgatagggtggtaaacttgcgattttgcctaaccgacctatatttttacgattttccattaaaattgtattgtttctaaaaaaatttcaaaggtcggcgagggaaaagggggtggaatcagggggagagagaaagagtatgtatgtatgtacacatttttcaagaattttagttaaatttattagtttccaagcacaacatgcattggaaaattgtatgcataggagacagtctcataaatttcaagtacacactatatatacatgaaaattatgataaaaattaattgcaagaaggctagccaacgggatcttgtccagatgggatataagtggataatcttatccgttcccccttgcttccatctctctctctctctccccgtccatctcttcatcccctgccgctcctctcttctatcgccctccgtctgaaggtggattctaaacactcgaatggatgtccgctcattaagtgcatgccaactaaataatcatgaaaaaatttcaaaaacatttacaagatagattgatatatatatatatatatatatatatatatatatatatatatatatatatatatatatatatatatatatatatatatatataactaaaaattcaacttttataagttgtaacaaaaataacaaatttagctgcaaatatacatatactaatcagagtttgatttattatttttgttacaactttgtagaagtcgaatttgaacttgcatgtttgtgggggtgatatgttacatatgaatctatcttgtcaaattttttgaattttttcatacctatttagttgacatgcaataaatggatgggtgtccacctaggtgattaaaagtgtttcccccctcggcctccactcttctctccctctctaacgcattgcttcattcctagcagggttggagtgagagcatgccccatggcgaggtggctctgaaggctcgagtcattcctctctatggtggagttgtccgcaagagccctcacggtaaggccgggtggtgtccgcgctcgttcgcgctgtcggtggtgaccatagggctctcacgtgctagaggcttgggaagagctgcgggacttgtttgggggagtttaagattctgagaagcagctgctaagaagctcgctggtgagaatctggagaagctgggaaacccagcttctgacttctagttcatttctagattttacaactacagagtctcagaatctgggtaagaagctagactgtttgggggagcttctggcaactgtagattctaggagaagccacagctgctagaagctcctccaaacagagccgtgaagagttcaagctgggaggtgagttgaggtgttcgtcttgccgccgcacacgatgtccccaaccatcatgctcacatgtgtgtcgaggatgacatcaaggaggaatggcgtccctccatctcccatgaagtggtagccatcttatctccattcttgctttgcctcctttcccttctcatagctctagtcgtcgtgaaggtctggtacccaagaatcatgcctgatacccacatatacctgacgtctaaatatcaagtctctaatacttgggtatcaagtaattgatacctcgattgttcaggccaatacccacaagtaccacacatgatacttgggtattgggtatgcatgcaaatacctaggtattaggtgaagtgggtgtgttgtgtctctcacgaggtatgtctcttagagcacccgcaatggtaaagtaaggtgctatctataaaacatgtacatctcagcaatagactagattaatagtaaaccacctcaatagtatgtctacatgggtatctatagctctctcatatattgcctcgtttttctctatagactatatctaagttagtagatagctttgctctctcttaatttaatatcttccatgtaggaaaatatgctgacatggatctcttgtaaagagcatatagacaaccattgtgggtgcccttacgaggagacgtgcactggcgcgtggaccacatggagctaagtgatcgtaatgagtggttctcttgtcctaaggacaggaacatgtacggtagtcgtcatcaaacaattctctactattataaaaattaaagatgtttttgccgatattttggtacgtcatccgtatttgagtcgggttttaagttcattcgtttttgaaaataggatccgtgtttgagttagattttaagcttgttttcttctggaagtataggagtcgtataagaaatctttgaaaaaaaaactcgcatgttaacttgagatgaaataaagactcctaattacagttcatgattttctaaaaagaatatccaagcaaatttccacagtgaatttaaccctagctaaaccatataacaataataaaattaaaatagtatttatccgtcgcaacgcacgggtattttttttctagtaattacctatgtgaaaaaaggagactggagagaaacatacttacgtacgtttacaataaacaatagagattaacaatctcaccaggaaaaaaaattaaaagagtgacagaaatcaatatttttttttcgggaaaaatcaatatatttttaacaaaatcgttataaattcggcttaattaaaaaaaaagttggtgttgagctcgaatggagctaacacttgagctcctcatagaacacatccttgaacttggcaaggctctcggggtccatggccacgacgacgtcgagccggccgtcgccgtcgtctcggcctggcacgaggtagacgaggccgctgaactggaggcacgcacgccccatgaacgccggccgcccccagccgaagtcggcgtcgtagagcggcagcccctgccagctgatcacccacaggtcactctccggcatcacccactcccccttgcggagccccgccgcgccgccgctcgccgccgccgccgtctgctccaggtggtccagcagcgaccggacgtagccgtcgtcgagccgcgcggtggcggcggacaccttctccgcgacggcgccgagcggcccggcggcgacgatgtcgctcaccttggacaccgccgacgcgcggaagatggcgttgccgaggtagccgcgcgggagcggcgggtgcaggcgggtgcgcgcgtcggcggtcatgtacagcctcgtcgccgcctccgttccggcgacggcgagcccgcgcgccttgcacgcgcaccgccacacgtgcgcgaccaccgccgtaaaagtggacagcctcttgccggcgccggcgccggcgcccttgagcgcgttgagctggttcttggacatggggaggatggccgagtcgaacggcagctttgaaccgccgccgcggcgacgggagtactcggcgtggtcgaagcgcacggcgggaggggagcgcgcgcggaggagcgtgcggtcgagccacggccgctgcaccgccgccgccgccgcctcgccgtcgccggcgacgtccctcgcaatggcggcccacgtgttgacgaagtccagcgccgcgaggccgtccgccgccgtgtgatggatcgccgcgcccaggcacacccctccacacctaaagaacgtcacctggaacatggccaagatgctggcagcggcgacatcggccgccgggacaagcatccgccggagctcgtccgacggggcgaggtcgcccaggtcgtcaatggtggcgccactccgcgccgtgacgaagagcacgccctcgccggtgcagctgatctccggcctgccggcgctgtcctgagcgaggcggccggcgagggggtagaaggggacgagcaccttggacagggcggccttgaggacgtccggcgagaaaaacgccgcgtcggagtcggggccagttcgccggtagacgtagacggtgggggtgtggctcctggccaccagcaggtcgaggttggagagccatatcctgtgctccggcgtcgcctcgccggccgtcaccatggaggacttgacgatctccactgccatggatgcgagaagatgcttttctctactactccactctacttgtcacgtgttttgcaaaatgcaaaatgcgagaagatgcagtaatatactccctcggtctcaaaattactccttccgtttcatattacataagtcgttcgatttttttttctaatcatactttgttaaatttgattaaatttataaaaaaaagttagcaatatctaaaatatcaaatcaattacattaaatctaacattaaatatatttcgataatatgcttgttttgtgtcgatgatactgctatatctttttataaatttgatcaaatgacttataatatgataaatcggaggaagtaagagaatttgatggatcgtatacatcatacacaagtacacatccaattaaaatcgaaagtcctaacgggcgatcgatcgctgggcacgatcagtccccctccccacatcgatcacccccttcttcatgtgattttcttttttggcaccgtattactttcctattttaataaatttatacacctaaagtttgtgcacctcaagtttacacatctcaagtttaacagagaccccaaatttataagtcaaaagtttatatatccgattcaaatttgaatctgaattcaaatattttttatatatagtatttctatacatctaaatattatacacctaaagtttatagacccaaagtttatatatccgatttaaatttgaatttcaatttgaatttaaatattttttaatatataattttttctaacgtttgttttttttatttgtttaaaaatttatggtgtagtaggaagagaagtaggggaggaggaaggggagaggagtgtgtttagggggatggggggtgacacccgcgcattagtactacccaattaaaatccctttatgttatgaatccaattaaaggaggctgcaggtaacaggttacgtagagtgggccagcaacaaatattgggcctggcccagtggcagctcagctccaaatccacaagcgcctagccggagcagcccgaccgccatggcactcctcgccgccgccgccgccgcccgccgcttctctcgcagcctccgccgcttcagctcctatgccgcgtctggaggagaagaagcaggaggagtgcccgcgggcgtggtggagcccgagtcccccgtccgcgcgccgccggacgagcagttcgctgcgtgggtcgcgcggctccggccgggcttcacggcgggggacctggccgaggcgatctcctccgagcgcgacccggacctcgcgctcgcgctcttccggtgggcggcgctccgcccggggttccgccacgcgcccgcgtcctacctcgcggcgctgaccgcggcctcctccggccgccgccccgccgccgcggagaacctcgtctacgacgtcctcgccggggcgtgcggccccgacctccggctcttcaacgcctgcctccgcttctgctgcgcccgccgccgcctcttcccgctcgccttcgacatgttcaacaagatgcggtcgctcccggcatccgccgcctgccgcccggacgtcgagacctacacgctcctcctcacctccgtcgtgcgccgcgtccgccgcccgccggcgtccatggtctacctccacgccgtccggtccctctcccgccagatgaaggcctccggcgtggtcccggacaccttcctcctcaacctaatcatcaaggcctatgcccggtgccttgaggtagacgatgcactcaaggtgttccgtgaaatgccgctatacggctgtgaggccaatgagttcacctatggctacattgtcaaggccatgttccagaagggcaggactgacaaaggaatggtgtactttcgggaggcgagggagaagggatttgtgccgactggtggcgtgtacatgacggccgtgtcagcgctagcgttggagtggagatttgaggaatcaagaaatgttcttatagatatgctggattgcaagaggaagccagatatgatcacctacaggacactgatggaggagatgtgcagggctgggcgcgcagaggatgcgttcgagctgctggaggagctgaaggagaggaagcgagggccgttagaccagaggatgtactcagaattgcttgatgggttgcactggatttctcaaccacatcaggatagggtttctccctgtgacaagcgttctgatgactgaaatgctttgatcaatggattgatttgcattgtatgatggtgatcataggcataaaaagatcgaattgatggctgcctgagaagactgcatacctctgcttgaatattcaagatgaattgatgcagaggagctactctgggattaactgattgactccaatttgcacaagcaaatgtgggtatggctgattcaaagccaaggggttggagaaatctgcaaatgtcttgcaggtgggatcaaaattccgtgcgagcgtatggcaactattgttgattggtgtctagtgatagctgataaacacggctaaaagggcaatttctagagtaaatcatgcagagaaagttgtttcaggtatcatatatgatatgagcagctacgcaacaaatttttagcaagtcagtacatttttagttgttttttctcacaatgttcaatacctaagtgatgaatattttatgccaaagagcaattgttcattatacagatataaattgatattacatatatatctacaacaatcatgtgcccttttcatgtttcagaatgctcccgtgtatagtacaactcttatgtgaggatacaactaaaagttcagtttctccttcatatcaggattttgagtgtccaaaccctaacattgactctgcaactgcaagtaggaaactaccccctggacaagcaaattgtgggctggatatatactaaggatcattcatgctaaactatacttacagatagactatgtgatggaagcaacttcacagtccgacattagcaaaacgactttttttttttaactgtatcaagattaatgattttgtttttaaacagcaatagaagcagcaaactaatcagtgagtgaagccaggttatatcctctcttatctatggattaatacatataacatatttcttcagagatagtaccagttgtgacagaggtgccagttgcagtaccaacctaacttttgtctgaaaacaattgttgcccttggtctacgatacttgaggcgccaatctgttgttaatcagctgtgtcagtatgttatcatcctaatcgaagtgaatcagcataaaatccaatatattgctgagcatgtgccatcacagtatcccaccgagtttttacgtatgcccgttgtttgtaaatttgtatggcaatgaatctaacctgcgttacatggacacaatggatcatgtgtgcatctgaaagaaagaaaattaaacctccatttctcccacatgccaatcggcagagcctgcaatgaagctgcaatttctattttacaatccattaactcgaatggttcacattcgattgaaaaaaaaaattgtaccttccagttgcttgtgcgcagtgtacaccattttgattgaacgctagatcctgacccctagaggtaagatggttttcgctaatttttggtcaaacctactgtttcaaatttgaatatctgaaaatatatgaaatttcacttgaaatttgcttaatttccgtgtcgaaacctcaaaattttacagttttcgatcggctctcgtcgttcctgttgcacgttgttccgctctctctctctctccccccaattttgcagctttctttgaagctggcaaaccaagaaaccttcgacgctaagcagacgtcgtggcaagctgcgtcccgtcgatccgtcaacggccaatctaatatttttatttccgcgtggtgtgatcaaaactagtacccacccacgaaggaagatagcggtaggattttttttttttcgtttatttgttttccgcgaaacgcacggcgtcacgagtccagcaaacagcaagagaagagaagagaagagaagagaacgcgtcccgcttccgactccggcgagagcgagaccgagagcgcgcggcggcggcggcggccggaggaggagaagacgatgggttgctgctgccggtgcctggagatcctctgcgccatcctcctcccaccgctcggcgtctgcctccgccatggctgctgcaccgtccgtaccctaatccgatcccctcctctcctctcctctgccctagctgattaattatttattaattcctctgatgatttctttcttttctcttggcgttgttgggagggagcagatggagttctggattagcgtgctgctcaccatcctcgggtacctccccggcgtcctctacgccgtctacgtcatcgtctccgtcgaccccgaccgcgaacgccgccgccgcgtcgaccccgacgaatacatctacgtcgcctgaccatctgtggagtacttagtaggtgattaatttagctcctggaaagcatatccttgttcctagtcctattacctatatctgctcctgttccacccttcaatttgtaaactggtactagcacatctgcagcctttggacaagtcgaatcgggtcggaatttgttaccgtagttcaactgtgttactgtgaccgtttgattgctggatcaattgctctcaagtctcaacttgtgttgttcttcagttgctgaatttattgacagcctgaaatgaggatttggcatgctaagagaattgagtgtaactagtactcctatctgataacctgcctttttttagccctagagttcttcgacagagataagaatcttccctttcagtgatcaatcaattttgcaatcatccggatcgaacattagcccaaatttaatttttcaagggaaagaaacattttcttcaatctctttttcaatgactaatgataagctagatgatcagagtttatgttccctaccagctatcgatgtaaaattgcagctgatctaacgtgtctagtacatctgctcaaggggagttagcagaaaaactagaccatcagagtatgttaacctagaatcacatgttagatgccttggcaaatcgtgagaatcttgagaatttgtcatccacaagaacctctgggtttccttcttcaacctaaatttggagaaaaaatgagttagataatgtcatgttaaggagcatttcaagaaagcacaatcatgctgcagaggaatgatatttgccgtgatggtaactactccatccaggcaatatttgaggctgatgccgctaatcgcagcagtgctgggcgtcaaatatttccgattggaggtagttggaagtgcatatttttgaaccatatttttgaacctcccttctcgtttatattatcgcttggttcttgtagtgaagagttattatggcatctatgttaatataatgttatgaacttatgactcctgtgttagcctctcccctaagaaattaaaaatctccttgatcatttaatggtggcacttaccaattttccttgatcaagaactagaatactgtccatcttcatcactgttgaaattcgatgtgctatcgtcagaactgtcatgcctttgcattcagcagaaatagtattttgcaacaaggaggctgtctgattgtcaacattagctgtgcattcatcaaggcagagtatctgtaaaatagtgacaactttaacttcattgagcaaaagtgacacattcatcaacacgaaacttaaaatctgatacaagttttgctgctcataaaaactgataaaacatccaaaataacatggtaatacaagcaatgttcaaattgtaaagtagtataccttggatgatttaaggatagcacgggcaagacacaggagttgtctctgacctactgaaaaagacgcaccactttctttcacatggatgtcaagtccacctatagattcaatctctgtcttcatatgacacttatcaagagcttcccatatcctgagatctgttgttctattaaaagggtctagattttccctatcatgaacatttgtcattagaaaagttaaagagttttgagtataggtgtgtctatgtttcgctcagtctttccaggcatgaaaattgactgaggcatgagaagctggtaataagggagactagtagttacctcaaagacccatcgaacaaaaacgggctctgtgggactactgcaaaatgtccacgaagatctcggacagcaagtttggccacatcaaagtcatctactaagatgcggccattacagattggagctaaacgaagaagtgcattcagtatactggatttgcctgctccagtcctccctattattccaacctaattcataaaccagggagtaaatatattcagtatagtggatttgcctgctcaattgcccagttagtccaaactgataagccagggggcagatttattgatgactccataaaaaagattcaacaagaatgcattggtaccgtcatacctgcatgcctgatgaaataaagaacgaaacatcattcaaagccgggggtaaatcctccttgtaccttagagtaacacgctcaaactcaatgttcccctctgttggccagccactgtgaggggattccgatccatgaagttcttcttgaggtatgccaacatactgctaacaacactgaattattagagcaaaagatgataacacactgaaagtaagttcaggttctacttttacctcaacaactctctcaacagaaatcatttccttttctgtctctgtaaaggtggttaagaagccattcaacaatggtacaacgggtgcggcatatgacagcgccaggccgacctgcagtatatatttatacttattctctagatacttggaacatatctagatagcgataatcatgaaatcagtgtgtgtataaacctaccagtccaggtgtaccaaaattaataacagatttactattgaagccaacaatggccataatggcgatgaacagaattataaaacctgccaacaactgaagtagtttgctggtcagtgcagtgtttgtgatatatgcttaactgatgtagaaaaattcttgattccatggtagacgatggatgttagtcatctgacaagagtgatacctggagtctcaatgagagccacagaccagcaaccagttcacaataggatgttttctggtatagtgtcacatgttggatgaatctttctaagaagaatccctatatgttatactaccacggtcagtatcccaaacaaaccatgccagcgattgccactagcgaacaatgttctaacagtcaattttgtatgtaaatgttcgggtaaatttagtatcatttcagaaaaagtctagatgcagttgacatacttctttttgaaatgctcttattgttgatgaaccatcaagtgtctctgtaaaagatgaatatattggtgaacgagcaacactgtcaagtcgtcgtacttcacgtgatgtagacctataatagaactgcactgatcattagtttgttactccaaaagtagaacgtaaaaacgtatatagtgtgataaatcattatcagcagacatcaaagaggaatgctagagtctttgatcaaaagagcaaaacagcagagcacctagtggcagacatcaaagaggaagtagcagtttggagagctgcgggggtatttgaaagttgtgaggagtagccctagcattaccgcagtttttctttctttgcttcccctccccactcctgtttccaggggtcttaacctctggaccgacagtataatgtcgtgtaaaatatgtacttattccccctttcaatcttaatgaaatttggtcggctccttcgccgacccggcaaaaaaaaaataataaatcattatcaactatagtcaaaataagaatcagacactgcactgtaaatgaattctggttcagaagatcaagatacaacactcgtgcagcactgcacattagcttcctgcaatatcttattagttaatgttatgcaacagaacttgttatcgtcagagctg

SEQ ID NO: 23333 - DNA, 1535 bp, Oryza sativa
taagtaaccaaagatcattgccattacgagatgcttgcattaagaacacacttagacatatcagaaaagcaattgaccatcccgcgaatgctgcatactttctgcaaagcataaacaccattttggattgcatgtagtactaagactatgtaacttctattattcaacctcagttaaaataacttctattattcaatgcaataaataaccagttacacaaaatcactcacttgtacacactaagctctaccatgccttctttcctggcctctacagaattctgctctctttgttcctcgtgatcaactactgagtcattgtcaatcaggccattagtctcggattcatgggcgacgctcactcctttgtttttctcagaaaatgttgatgagataacccttgaactctctggcttagacagtgtcgagtatggagttgctaagaaagagtccaacgtcccaaaccacttaacaagcccattagccatgaccactatcatatctgctgcggaaattgcctgaagaacaagggaatggtgttgttcttttgatggacctaactttgtttgggcgtgattaaataaatattacctgaagattgtgggtgcttaatattcgtgtttttctcttcattttgggccccataatggctttttccaagatatacgaagcaacttgtgagtcaactgaactaagtacatcgtcaaacaagtaaacatcagagtcatgatacaaagccctgcaagggtaaagatcatagcgttagaacatacttttggactttcccatgtcaattgcacaacattgttaacatataaccttgctaattcctttaaaaaaaaaatctgaccttgctaaggctaaacgggctctttgtccaccagataagttaagacctttctctccaatatgtgacatatctcccccaaccattgctgagatatcaacatcaagggtacaagcatgtatcacttcttcgtacctgtatgaacattgacacgcaatactgattaaaaatgcaaaacaataaacaccggtcgacggtcgtttcaggttttggaaaacataaccttaacaaaacaaagtgatcaaaacgagtaaaggtacctccttggatcaaattcttctccaagcaaaatattatctcgcaatgaaccagacagtatccaaggcacctgcacaacatccgcgacatgctttaccaagttgaactacaaaactgaagaaatttctaaatcaagaagtacaacctgtggtacatatgcaattgaaccataggaggtaatggaaccactggtaacatgaatttctccgatgatagagttcagcaaagatgatttgccacaaccaacctgcaagtgggcataatgtaattcctcaattaactgagaactgcagtggccactgacaagtatttacaaaagagagtttatttctatcccttatgcaaaactaaggtgcctaaaactcgaggttgtaaatgtttcgcgacattgatgaagttaagctcatggaatggtattagaagaatagtaa

SEQ ID NO: 23334 - DNA, 2469 bp, Oryza sativa
ttgttaccctgattgcatgtgtccaaacatatcatcaggatattgttttaccgtggcagcatccagcgagtggcccattatagcaaatatggaaaaggtgaaaagagagaacaatgttggtgtggttgcccagaaatagacacaccaagcgtccagatatttgcgagtcttattaggaaagaggagacacttgtgagtttcacatataaatgtaactaattaaaggaaaattgataatgagaagttgcacaccgcaagatgcttcacttctaattctcttctttccaccaaacgttgagtgaataatctctcccagctgtacatcttcactgttctaatatgtgctaacagttctcctgcacaacttatcctgttcatggaaaaatatcgattgtgcctaattagtcagtattgcataaatccatcaaatttcgtgattctattcttatttttcattttcttacaataatttgtgagtatatatatctcatcgtgatatgccaatagaaagaagagaacactgcaacataacagataagctccccaaaaacaaacttagacggatttttggtctcacctctcatctttatgtttcatcatcttttctgtcgcgtgagctattcttgtagagatccatttgttcactgtgcatgtacagcattggttacaagaaaaggacaagaaatacggatatgttaggaacttagaataatattctgaataaaaaatgagcataatcttgaactattgattatatcaaggagtaccataattcgtgtactaaaaagtaaccagagtagctttaatattcatacatacatgtatttcatttagcataggatcatgtacccctaatgtattgcaaacaaaagagatgaatgaagcaagggaccaaagaatgatatgtgcataaagttgcaatgcatgacctggcaaacctcttgaaatatacagaagaaccatggaaaatcaagcagtacctggcattagtatgactgttattgccaatccagataaaaatgcatagttcacttgagtatacaatagatagagagcaactcctatctgcaatggcaagctaagaagatgccaaaccacacaactcatcaaataatgtggcacgagtcaattccttaataggcaaacattagataaagaaaaaggatacctccaagcatcatgaaggctgttacataagtttattgtgcggtcagaatcaacagacatgaaggtctgaatctctcttcagaaaacctacaacgctcagatagactgagacataggcactgttttttaaggtccatacataataagtaacgcaaaaattatgcttgaagtttagtatggaaggtgttaaaaaattcgagcctccagcgttgaactggcagaacaagaggacatatacaggaatcataaaagatatgctaccgcagttatacactataaaataacgatgcataactgcatatgcattatttttaggagtgcaattagatactacattgtggtattatcaaagaacaagatcagccatgcttaagaaagtccaacaagtttgtactcttagtgttgctagagcacccttcagactttttctcctctccctataatttcagtgtttgtaccagatgttgcctgtttgatacctcttcttaatgcaaaaatatgtgtgaaatttttgcacattgactaaaggggtaattattgtacaacgcaaatagacaggacatgtttgaattgcttgactttttctttaaaaaaatatataggataacacttacaggtaaagaataggaatggtcataccttccgataaattattcccatgatgcttgatcgtaacatcaactttagcttagctagacgaaaggagtactgactatctaaaaacgacctagtgaatgtgaacaagaatgtaaaaaaacatatgataataaatgaggtgatacataactgagtgacagagcttttcattaaaaaaaactgttcattgaaaaggtaaaaacaattcatttgtgtcaacatttggcatgcccaactcaacgaggatttgaacataccttgtaaaagtggaattcgcagaaaaatttaaaagtggaatttgcagaaaaattaaagtggaatttgcaaaaaaaaaaaatgaagattagtttttccaaaaaaaaaaaataaagttcagatttaccagagacaaaatttcaatacctaaaactgatcagaactagagttgaagcatcaacataaacactcttaatggataatattgttgaagtttcagttaaacctcataagttaccagtgtatattatatctaataggttcagatactatctctatacattcaaaactaaaggagttaaaaagagatgtttagaagtatctaagttttagggtgcacaaaaatcatgcacaaatttacaatacatggatatggggaagccaaacttatttctggtaacaagacatact

SEQ ID NO: 23335 - DNA, 12780 bp, Oryza sativa
acatttgattccactattaccaccatgccatcacaaatgtacattctatgcaaaaatttgtaacctgtcagctttacgattgtaatttccagaaattggtgcttagcatttgcagttaaacatgcctgccgtgcaacacacaaataacattctacagacgtattaaaaataatgtatttcctagggcaagaagctcacatttacttcagacagttagataagattaatgtaggaccaacgctaaccaacataaacattatgatctgggtagaatggtttgattgtacacagaaacccaaatagctcatgacaaaaataacataccaagttggtcacttcagcctcagctttttcatcatctggaacaaggggatcttcaatagagttcatttctctaaaatagcatggatttaaaagcagctttagagaaattgtgaggaacaggatcattaaccattagatatgtaacgaagaaaacaaaagagtagctaggttgttgttcccgtaataactaagtctgatatgcctaggttaaagggaaggacatgaacaaatgcatcaggattcatggctccaaaagaaataacttcgtctatagttaactttgcctcattgcatcaacttcacatgcacgatacaacatggcacatgagcttactaataatacctactaatcaaaagttgcataccctacatattcatgacttagctagagttgacaaacaatatgtatagctcccaagtataacttaaaacccaggatatgttcggttaacgtttaaccggctacctctgcataaacagcagaatttacacttcgagttacatatgattgaccaaagctcaaattgacagttggcaattgacatctgacaattgggagcattacttttgcagttgctaaagataacagaatcgtgcagaagaataatttaaaaggattacttatttgctgatgaacttttgagaaatctactgtaactcagtaccatggcgggccgtgaccccacagcccgcatgtcattgagaaaatgagtggcatattaggatcaaaccaaataccttttattgtgtggttggtccactacagtagacacaactacaaagaggccaaatacaattgccatagagaatgagatgatctccttaaaatataacactgcctgtaaagagttccaaataaaagaatagattagatgtctattttgaacacctgttccttgccaatttgcatgcaacagttgtcaagttaaacactacaatgaacacgaagaatatcataaaacagaagaaattgtataaatatgtcataattcatatcaaaacggaacaatatgtaaagggaaaggaagaaatattgtaaaataacaaaatacctttaatactgtgagcttgtactgcaaatgaggtatctcaagaagaatcttcaaaatccagcagaaacacatgattgggttgtagaatacgaaccaaggtccatggactgagacaagacctacaaccatctattcaatggcaccaactataacagtttgttttcaataatttgtatgactggaaaggtagagcacaatcttcacagactcacagtaatgaagttcttacccacacaagaaactgggaggacctgaagaacgactcgtagttcacaacatctttcccctcaattttgttctttataagcataactatttcaagaaaagaaaggcaggctgcaaaaccaggcacaccgaaaacaaaccacttctccagaaaacccatcctgacattctaaagcaataggcaaaattaatatattagaatatttcagtaaaagataataaacaacataaagcaaaaattgatgctaattatcaagcttaagtaacatggtttgagtgcttcattttatctttcatttataataaattaatagttggaccttcttggtcctactgttcttttcaagaaaaagaacgttcaagtattgtttctacaaaaacatagaatacgaactagattgctgaaactaattatgataagattttcttgagtcaaagcaaacccaatggtttcaaagtccaaataagttacttcctccgtttcatattataagactctagcattgcccacatttatatatatattaatgaatctagacatatatgtgtgtctagattcattaacatctatatgaatgtggacaatgctagaaagtcttataacttgaaacggaggtagtattcaataaaaggatctcggcctctatttaatttagtagaagtatagtgaatgacccctgtttttgccacttcgtgcacaaaaacatcattatgcttgaagttcacgctatcctaagttcctaacaactcataccatcagttgtgaatataaatagctttagcttccactatcccgtttataatctcaaccatatctgttactgaacaccgtcattccaaaaacagaaacaatcagcaatgcaaccataaaagcttcatctatatgaaataccaattcacatccaacatgcgagacatgctgatacaatgtttttttttactctggatacgatgttatcttagctatgaaacaaacatttgtatgactagttcacacttcagatacctaacaaaagaaattgcagcaaacatgtgaacaatttgttggaaattaagccaatgccccgctaacgctagtgatcacttcctacacctttgtactcctgaagtttgatttccatagacattgtgaattcaaaaaccgattatccatttccttcctacgactttgtagtttgtactcgtgaattttgctgacaaagggcaataaacagagcagatctactacctcagttctccgcgcgttcctcctggagatgaagagcacaacggcagcaccagccgcaaccacatttccgctcaatcccaacaccgtagaatgttaaggcctaaacaacacaataaaccacgcaaacacaaacgcgccgaagccgaagcgcgatcaaccgccatcgcagagaccacgaacaccaccaaatttctcgaacgaaaccaaaggatataaatcggagaaacacggggtgaatcgcctcccgtcccacgcctgcacccaaaaaaaaaacatcacttcaaatgaaaacaaaaccaaaaaaaaaaactctcatgatcgctgctccagcattcgactccgacgaggaggaaggggattgggagggttttaggagaagctcaccgcgggatcgccggggcagacgaaatccatctccccggcgccgccgccgcgcctcctcgcccactcactcgctcacccgagcgcgtcgcgtcgtcgctctcgtctcctctcgactctcgtcgtctccgctcctctgagttctgacaccctcgactcgctcaacgcgccgtgcattgcaactcctcctcgaatatgagccactgatccgtgggacccacggtacatgggccccacgcaccaacgtccacgtgtgcagcggggtagggttcggcctaggtgagaaaagtatcgaaggagaaaaggtgcttttcggccttgggcgaaaagccgcgcaaccgcactcgcgggccgtacgcgaaggattggccaatgacaaggtgggccccgctgacgtcgggcccacaggtcagtgtctcaggacggaatcttccgagctcggatcgcaccgggaagtggagttgattttttggcgctagcttttttgggcttttggactgttcactaacgtgacacgcacgtaggggaggaaagaaacgaagcgccacgtggcccagatgcactgactgagatgggccggattgatgctaggtttgggccgagagatttactgtcttacgggggcccatcaaaggcggtttctgagacgtagttctttgctgggcctggtccacgggttggcattgggaggttgggctaggcgaggactttgctgtggtggcattgtgtcattgtggtgactttgctgtggtggcattgtgtcatggaataagttcactttaggtccctctatttgtcgcccagtctgattttcttccctaaaccgcaaaaccgggtatgacccatcccccaacttacgaaaatcgggcaaacgaggtccctcgacggttttgatagtggttttgggtgacatggcgcctacgtggctaatttgactcggttttcatctgacgtggcgcttacgtggcaaatccggaaaaataataaaactcgtgggccccacatgtcagtttcacaaacaaaataattaaaaaatggtgggacccacgtgggccccatatgccatcctcactcttctctcttctctatcctctctctcccctcttctctctatcccttccctctctccggccgatggagtagggcgagcggcggccgtcccggggcagcgcctgcacgagctgcgactcgaggcggcgcatgaggcgggagttgcgccgcgtgactgctgcgtacgcgtcgccgccgccggcgtcggcgtcgttgcaggacgcgctcttgggaagcatgccggcttgttgcaggtgcgcctcgacgccgtacgactgctcaactgcagcgatgaccctccgaaggttgtccagcgcctgcagcaggtccctctggaacaccgggtccgtcaacggcgacctcgccgcgccggatgattcgtacaatgacgacgacgatgcctcggacggttggtatcccgacgaccccatcgacgacgacgatagttcttgggcaataagctgcttgtgcaatatgctgccgagctacatcacataataattctattatatgactgtaagaatcacagattatccagagagggttcaaaatgaatttgtatttactctcttatttatgtatttcaggctgaaattgggaggcagacagcatcagaacgtcaatgggaggtctacagattcctccagttcttgggagctcagaggcgacgcccggcggcggtagctcgcggcagcagacgtcggcacgtcgttgtctaaaccatagctcgatccatcatccctgaacacacccatgtcgccgctcatcggccgcctggttatccgcgacatcggccggagttcgctgatgcggctgtgcatcggcgagccacctctctcttcgcccgattgctcgccgcttcttgaaccagtcctaatgctgccccgatcaaatgctgtgtagggagccgagctggtccgcaccggcggctactcgccgccgccgccgctcgccgcagcaaggggagggagtagagagagggcgcaccgcagtgtgcgccttgccgacccgccttcgccgctcgccgcagcaaggggagggaggagagagagggcgcgccgccgtcgcgccttgccggccggccgccgccgctcgctgcagtaggggagggaggagagagagaggggggacagggatttaggaagagagagtagagagagattgagaggatagagagaagagggaggagtgaggatgacattggggcccacgtgggtcccaccatttttattattttgtgtatgaaactgacatgtgggtcccacatgttttattatttttccggatcgaattgccacttaagcgccacgtcattgccacgtcagatgaagaccgagtcaaattagccacgtagacgccacgtcagccaaaaccgttatcaaaacagccgagagacctcgtttactcggttttcgtaagttgggggatgggttatacctggttttgcagtttagggacgaaaatcagactgggtgacaaatagagggacctaaagtgaacttattccttgtgtcattgtgggttatgttcactttgggaaaaaaaattagataatagaaacaattttgctatatatttgtcgataaattttcttctaaattttgacagatataattacagtacaatcatttaattatactgtaacttggatgtaattacactgtaacttgtatgtaactataatattatttgcatgtaacttttacatgattttgaacagttagatttgtttcaaaatttgtacaagcgaagaaaaaaaaattgtttcaaaatttatacaagtgaagaaagaaaaaagccattgtgcgcatatatgtgagaggattcgttcccatgacctccgttttcactgaaatagtatgttacaaagaaaattttgaaagttacatatatgttacagtgtaattaaatcacgattatactataattacatctataaaatttttaggataaaatttgtggacaaatgtataggtgatctgtgagactatgtaaaactaatattagaaaaaatctcggttcaatgaaaagatacatttaatatataccgtgtttcttttcattcgtgatatagaaacgatcaagctggtttgattcttttttcaccaccgaaacgtctacggtgacttcgtaaacctttagataagttcactcggtctttggaggtgctcattttggggcgcgggggggagggggggtgtacagtgtacagatttatatttttaggggtaagtgtccgcgcgtttatatgagtgcctatgtttcaccaaggaaaatactccatgtgactttattaatcttaaaatatcctagtctagagatagtatatacgtgcatatcaatttatgaaaggtgagtgtacacgtattatataagcgtatgcatatgtacatccacgctacaggcatgtacatgtaaatgcttcttaattctctattcaacacgtactttagggatgggtaaaacagataaattcgtaacatgacgtagaaatatagaattaacgattgtttaggtgagaccatcaaatgttcaaaacaatcctcttggagacgacgaggctagttagcttttgtgtggctatgaatttatcgatcacgtttggaaatttgcaaggataactcgtagagttggctgcgttcgtagccttttcccggagccgacaaggcaaagctccggttggatacaccctacaccaaagcctcaaaggctatatggaatgtttatgctacctacaactctataagtagtggtaatatattgtaaatcgtccattttacgagtatgtttcaatatattatatatatatattatttcctttatatatatataggtaaattaactagtgctacatggagtatgggctccaaaatttaaattgagtatatatccaatttaaatgagtataaattttttttaaatgtttagatatgaacattaacttctttactaacaagttcaaacaagtttgaactgagattgaactttttttttcgttagattttggttctaggtatataacatccaaacatataattcgttaggtatgtaataatgaattgtgaaataaagttgagtttgagttgttttgttattaagtatttgtatgaatcgaattcatatacctaggtatatactcacaatttgaaaattttaaaaaatttgagaaaatttgtgtgttttataccttggagcccgggtaccatggagtcccatatgtgtatcatataaatatatatatatatatatatatatatatatatatatatatatatatatatatatatatatatatatatatatatatatatatatattaataatcaaaatttacacagaatataagtatttctggacactgatttcaatgcatcgaatctaagaattttttagccaattaagtgattatgagggaatctaagcgattaaaaattcaaaaattgatcgttggagtgaatgcagggatatctttttaactcttattcttcgctaaacaacaaaaatacgaatattttcgagtggagagggtggaacttttaatatccactccttgttccacgaaaattaccttattggcttattcgtatgtgtagcgtgtgcgactgtgcgctctttttataaataaagagaaaaatatcacgaaataaaacgatctcaacaccatcaaacaatgtcatcaccatgtcgctacacatgcatgtaaaggtttagttttttttgctggaggaggcaagacagtaagaacatgcatcctccaatccattattttctttctgatgcagtcattctaaaaagacgaacaagttccaagatttcaagtgcattcaaatcaccaaactttccgatcgatctccaccatcatcttctagtcatatttttcatcgatcccacaatgatatatcaccacgtgcatcgtttcccacaatgcatatgaatgattttggagcagcggaaatcgtgcagaaggaatacacggctccgtcagcggtttcagctgttagtgagttctggcatgtgctgtgtaactgttcagccagtccgtggttggtttttcttttcttataacccgtctagttttttacttctgcttattaaaaatataattggcagctctcctgccggtttagtttaaaaaaagaatgtgtggctttgcataaaaatcgcagaaattcaaacggatttgctataaatgtgtcgccagattttctaagaaaaaacagtcgaattgttgcccgtacgatattcatcgagattcgcgccagtgcaaaggaaaaaaattcaggcgcagtggtggggagtcgaactctggtctcttcggtcttagacagagtgactaaccaactcagcataataggattaatgatttcaatgccaaaattaagttaaaattcattcacgaggtacttacagtacttactccatacttacatatcacttacataccacttacaccacacttacatatcacttacataccacttacaccacacttacaacgtaattacataccacatacactacagttacaatgtaattatataccacttacactataattacataccacttacattactagttatagaataattacattgtaatttttatgtgtttttaatcatatggtttaaaaaataaaatacgtactagtccctaattaatcataaaagggtgtacgtagttggaggtccactgagtcgttaggtatggattagcagtagagaaaaatccgactgcgtttgggttcgttttatggcgaatgatttgtagatagtcccaattcaaatagaaacagaaagacatattttccgatacctttctttacgaaaggtgccaaacgaacatctctgaaccttcttttgtttttcctttgaatggcatctctgaaccttttgtgttagcttaaacaaatcatcatcatcatcatcttgatcaaatgtttggcagagaacaaagtacatatcacacgccaataaggtcgaatccacaaagggatttttggatattgttgacatggaaagacgagttaggagcacaatcacacacaacattcagaggagtacgaaaactttttccaaagggaaaaaacatccacaagaaaccaaaagaaaagagagaaagtagaatgcaattgaccaacaaaactacaacagcacaccaagagaaaaaaaaaaggaagaagaaagtagcacacacagatggtttcagcaaaagagttttggtgaaatcctagaggttggcgctgctgcagcgtcagcagcaggaggaggtgctgctttggagaagccaacttggctgggtaggccaaggtagagcattctttttgtctcttgttagagtggcatcccctgcacttatgcaccccaaagggggagaagaaaaggcaggcctagcagtggctgaaaaattgggtaaatgcatagctatctatatttttaaactctttatttgaaattttggaaatgaaccaaattctaattggttggcttcgttcggaacggtttttttgttggtgggcttataccggcatgcgaaataagatgggtcattagcatgtgattcattcagaaactattataaatgtggatatttttgttttatttgaatttttatggaacttctatataaaaagtttttgtacaaatacaccgtttagtagtttgggtcttcaggaaacgtactcacggacaatgatggagtagcctagccgagaatccaatcaaaatgcagcctttgttgataaatctttagttaattcaatgttttagagctcctctgttgtcaaacaaaatcactgcataactcaaaccatatatcttagtatgtcttttatttttgccaattacatttttctctaatttatactgcttccttagtgtagttttggtcacatactgactttggttttgaacccaactataaaaatgtgagaaggataaggacaatgttcagcttgtatgcaggaattccgctgacaatagtcatacaaaaatttatcatcatggatggagatttaattagcgataggatttcgtgaataatgttttttcatcctgtgttagttggttcttgtcttcacattgaatgtgggatgtagttgttggtgctgcaaactttatagtaataattacttatttcttttgttaaaataaagatcaggtttttccatcatctagagagagaaccctagtgaacattttgtaatgttgttgtctcatcacaatacaatcatatatcgctctttatatgttactactactaagggttgcttgcttgatagacacaatttatctaagtttaccatagcttaagttagataaattgatcaagatagacacacgtttgatttgtagccacatttatgataaatttccttttttcgtcccatatgcaattgaaaagagagagagagagagaaggcaaacttgcctaaaactaactaaagtatggattcagttttgttagccaagccctttggcaggtcagtcaaaacaaattatgacaagcttagacaaattaaggtcttgtttagtttccaaacaaaaaattttcaccatgtcacatcgaatgtttggacacatgcaaggagtattatatatggaaaattaataatttcacggattgcgtgtaaattgcgagatgaatattttaagcataattgcgccatgatttgataatgtggtgctacagaaaacatttgctaatgacagattaattatgcttaataaatttgtctcacagtttataggtggaatatgtaatttgttttgttattagtctacgtttaatactacaaatgtgtgtccgtatatccaatgtgacacgccaaaaaatttcgttcgcgaactaaacaggccctaaggtggtcagccaaatagccctgcaactttcacagccatcgcaaatgtaccccttgggtatgatttgggcgaattttggagcctgaagtgtggcctgtttggtacagctccaactcctcaatttagctctaggagttgagtctggagtggagttgtggagctgtctaaacccagctccataactctagtttattttgtgagagagctccacacagctccactcccagttttggtggagctgaaactgtttggctgagcttcagctctacgaggggtggagctggaactggagctatgccaaacaggcccatactatgccttttgtttggtcaatcggtctcacgcgatgcatcgtcacactcacaaatggacttagcttgcagtatggtcagccattgtctatcagtcaacatgtaaagctgtagcttcccattctctgaaagactgaaactgaaagcgcttgctttgcttgagatggatgcactttcatgctgtaataatacattgatagtaaaaccatagaccgcgcagataccacctgctttcagccagccatcaactgatcaactacctagccccattcagatcaaattggaaaccggaattgagctgtttcctgcgaaattcatgtacatcttcccttacaaagggttattttggaacaaaggattttcatatgaaatttgtaggattaaaatcttatggagctatttgatttgaaggatttggctaaaaatctcacagaagtccttaatttcctccctttttttttgaaggatttcaaacataagctcgaatcttatggtatttttacctttcctctcaactctatattaataatattttccatatgaggtatgcaaacaaactgtttcacaaaaattctcgtgtgtttcaattccttaggattgtatatattaggagcgatattctggtgctctctaatgatagtattatactattgataaaataatctgaatcgtttgttattaaggataaattagtattttaccaatacagtgattaggggtaactttgtcatttatgtttgttttcctagctagatcgatttgtgatcatccattacattggcatcactcatattccataaaaaaagctaaaaagaagaaaaaaaaggtctagccacagctaaatgacgattatacctctccatatatattttttataataatatctctacgtttctattatcgttagatgaggtggtagtgtaattagttctgaacccttcaaccaaacatatcaatggttaagattgctttctactagtcttgactagtagatagagcatcgtaatggggctcatatatgttttgactttttctttctacgtttttttccttattttttggatttccagttcctgtgttttaaagtagctataagagccagtgaaatttcacccgttgataccgcatctcactgtgtgtaataaaccagcaaacgtactccctcctccaaaaaaaaaaaagacaaaccctagtttccgtgtccaatgtttgaccgtccgtcttatttgaaaaaattatgaaaaaaattaaaaagacaagtcatgtataaaatattaatcatgttttatcatctaacaataatgaaaatacgaattataaaaaaatttcatataagacggacagtcaaa

SEQ ID NO: 23336 - DNA, 863 bp, Oryza sativa
aataattcttattggtatttacagctacacttgatataatctttaattggaaggccaggagaacaatggaatttgcagttaaactgagatatgttctaaagttcacatagcagccttgtgggtagtattactgccggttacatatgcatacacctgggagaatccaacaggaattatcagggccatcaaaggctggtttggaaatggtcaaaaccacccatcactctttgtccttgcagtagttatatatttgtctcccagtttgctagctgctattctttttcttctcccatttctacggcgtatacttgaaagttcagactacaagtttgtgaggttcgtcatgtggtggtcacaggtaaatttacataattacattttagtgaattgcatgatagcttcgttttttatcaacattgcattttaaactcattaaatcatatcatttttacccatcaagaaaatttaggcataaatttgttaatctcttttgcagggaattaacttgatattctcgatttttctttgtaaactacagttaactactgaccaagataatgtggaaaatatagttgtgagctactacctgagaaggagacctgatatgacgaagcaaaatgtatttttgggtcaaaaatataagtaattaactctcgatgaaatattatttatttagtaaacttatttaacaaaataaaaacattatttatttagaaataaagaaataatactgtgtgtaaacaattataatatgaggaaacagtggttttgaaattacaaccttctaacagttctgtttttacatttaatatcatttttattttaaaaatattctattagtattcttggacgcactactattt

SEQ ID NO: 23337 - DNA, 10770 bp, Oryza sativa
ttgtctgtggaggggaactttcaacaaatctctcctgatcatgtgagcgagtctctacttgtactataaatctttgtataatacagtagcatcgtgtatgtgtgatctgattttctttataatggataaatatctggcccctatatccacttgtgatctgaatactgcagtatatattggtagtaaatcttgttgtaatttatgaactgtctttttcctggacgatcgattgattccaaaatcgtgggatttgagtaccagtatctgactcaagcgatctgaatgagtggtggtttagcgttagttgggagaaaattatcaagcacggagcaacagcgacccattgaaagttgtagctcaactagtaatcctggtggcttattggaggcctaggtggttaggacttgggagatcgcactcagacgagtatactcgtggcagttctgtctgtataaatcagaatcactggtctgtatgtgacgcactgtcattttctagtagaccaatggagcagaaacaacggacattgttgctagaacaccaaactagcatactagcattcacgcgtaaatcggctgaaaggatggatttcgcaatcagacggcaataccgtagtgggtcgtgatgatgatgagatattgagatccatccaacattctccaaaccacttaatcacctaagactagagtagtagactgaagaggcttaagctcagctaatgctcgagtcgtcagaaaagaaaatcaggagtgaacagaatgaaagcttggttgataatgcaggttggcgttggtccacccactcaactagaagtgacagcttcttagggtgaaaatccaccaggcccacccaataaggccaccagcccaatattattaggaataagttcactttagatccctcaattgccgagtctaaaatttatccctaaaccgcaaaaccagacgtgcccctcaacgttaaaaaccagtgcgaatttcagactagtacctggtattggaagctgagggacgcgctatatctgtattgcggctgaggatgaatttcagacttgacgacaaaggacttaatcggttgtgctggctgcagccagcaagccattcacagctgccgctctttcgtttggattggggctgactggctgcagttgctgcagccagcacttccgattagggccaaattgagggatccaaagtgaacttatccatattattatacccagccgcgcgcagcctatactaattgggccggaacggcccatccctctggaccacagtattgggccggaaagggatcgtggtgtatgcgtggcctatgaatattgggccggaacgggatcgtggggtatgtgaggcccatgtgagttcggctcgaacgtgtttgttgggccgagagtacggcaggttggaaaaccatggcaatgcgtcgctgctgacagcggttggtgagtctacttcaggggatcagcattccggaaccttcgaaaagagcgcctcaccttgttcgccgtcatcggatggctacttcctacctaagaattgagcttggaacgcaaatgctggtgcgctgatccatttcgccaatggaagcacgaaccgacaaggcggcaatacatgatgcggatgcatgctctcaagtctgaatctgatgaaccaatcaagttttcctagccatgttaatttggagagatctacatctactccaggtgactgacagacagatagcaagcagcaatatatactccagaacggtaaaatctatgggcaaagcagtgaaatcacgtgtatatttatgaccttactgtactttacttgcaaaatgtattgtagtagtagttctttaaaaacaacatgcagcctcgggattctacaggtaaagccccacttaaatcaactagctagtcgtcttcgaatcaggtctaccctcgtccctcgtccagtggttgttctgtagaagaaaccactgctttgtttctttacggcagacgtgatctgaaactggcaagaaacagtgccaacgcccgtccaacgataacgagatacacgcaacagaagcgtataaccaacaatttctggaatcattttggaaggatacccgacacagtaatggtctaccggttttcatccaaatggcagagcagaacgaacagtcgaaacacccgacccgacagaacggcaaaaaacgggcctgaatgccagcctgaaccggcaccgcgccaccgccacgtcgtcatcgtctcgattggcagctgccctctcacttccccaccaatgctagggcctgtttgttggaacttttacctgctacagtttttctcaaaatcagaaacttcccccaaacaatctagctttgatttgtataatctagaaaataaactataacccaaaacttaaaaaacctagcttctttaattctcataagctagctaccaacaacttctcggaatgcatgccctagatctcctgcgctgccatgccgcatcagcttagctagcgccttcacgtgcgcatgtgctcgctatattatccaaatcgcaaaaccatccaaggcgcgcggcctcaccaaccaccacgcaaacccattgttaattaattagcggcacactgtcacggcgcattatttgctagctccagtgacagctcactcctcttcttgctgctgagggcttagctagccagtccacctcgtcggtgtgtgtcggtgtagtctagcagctgcggcgggaggaggagttgccggccggagatggcagcggcggcgcagcggcttgtcgccgctgtcgtcgtcttggtggcctgcctggcgttgccggcggcgcgggggctgaacatcacggcgatgctgaacgggtacccggactacaagatgttcaacaagtacctgtcggagacgaaggtgtgcgacgagatcaacgcgagggagtcgatcacgctgctcgtcctcggcgacgggccaatgtcgacgctcgtcctcgacgccgaccagtcgctggcgggcatcaagaacgcgctccgcctccacgccatcctcgactacttcgacccgaagaagatccgtggcctccccgacgccgacacgatgaccgacacgctctaccaggccggtggggacgccgccggcaagatgggcaacgtcaagatctccaccctggacaccggcaagatcgccttcgcgtccgccaacccggggggaaagtacgaggccaccatggtcaaggccatcaagcagatgccgtacaagctctccatcatggagatctcggcgcccatcgagttcgacggcctgttcgacacgccgtcggcgaccaacctgacgaggctgctggagaaggccgggtgcaagcggttcgcgtcgctcatcaccagcaccggcgtgctcaagacgttcgaggatgccatggacaaggggctcaccctgttcgcgcccaacgacgacgcgttcgacgccaagggcgcccccgacgtcaagaagatgcccagcgccgacctcgtcacgctcctcaagtaccacgcgctgccgtcgtacaaccccaagccgacgctcaagacggtgtcgcgcgccatgcgcacgctggcgtccaccgcgtcggggaagtacaacatcacggtggacacgcggggcgacgccgtgacgctcaacacgggcgtcgacaagtcccgcgtggcggccaccgtcatcgacgacacgccggtgtgcgtgctcacggtggacaacctcctcatgccggtcgagctcttcggcgacgcgccggcggcggccccgagcccggacgacgcggcgcccgccccgtcgccgtcggtcgcggacgcgtctccgccggcgccgccgccggccgacgcgccgtcgaagccggcggatcacaaggaaatgaaggcgtcgtccgccgtcgcgttgcggtcagtagtgctcggcgcattagccgcggccgtgtgttccttcgtgctgctttaagcacaagtttttttttccctttcttccatgtccagtgccggtgattgtgattgcacgagctgcattgccaattattcctctgtataatgcgagcaaactgtgtacattttgttctaattctgatatccttttctccgaatcgtctgcgccatttcggtgcggtgaatttggaagaattcatgtcgcgttgagctgtacaactgtagatcatgtgagttcttgtcctttgagcgcgtcgtcatgcaggcccaccacagcaaatgcgggtgtgttgatgtgatcttgaaaaaacagattcgggcgagagagctagtgcggctgccgctgcctccttgtgctggcattggcagctcctacggatttcgatcaattcgccgtttcaggaccaccggtgccagtaatgcccgttggccgtgggttatttgataactctatctagtctttaaatatttttagacaaaaataatagaaatttaggtcatcctattttgaacgcgattctcaaatttaatagactaaaaaattaaagtcccttaccacctaggacaaccacaatgcagaaatacaaggggtattaaggggctgtttggttgagcgccaacctttgctacagttgtgacaattaaatttagtgtttggttcatgccacaggtgagttataccacttttttttttagcaagctagcccacttgtcattgagtaatttttttaccataacttgccacaattgtggcaaataaattttagccatataatgtgccaaatattttgtggtaaactatgaaagttatgaaagtcatccaaactatggaagcctctaaagtggtccttatacattgtaggagtagttcatatatatataatgcctagccataagaataaaataacaatactttcttttctctctcacataacatacaattgagtgggaccagtaagatctatgctaatgcctcatcttatcatagcatattgtagcaactaccataattaatatcaggtcccatcttattacccaagtagacattatacattaagcatgccctaagggcatcagcatcagcaatgtttattcccaaaccaagcaataagggtgggcccgttgtcagggaaaatatctagcaatgtgtgtatgtaacagagggggggaggaataagattggtccaccttcaaccaacctatcacaaagccttgttctgacttataaaagtgaggtgggacccatcatattcccttactaccggcaataaacttgtaacctggtagtaactatttactactgtcacaatgtttattacttgataacaaacccctatttaatgcttattacctgctctagcactacattgtggatgcagttgtgagcactgtgtagttaatccacggaagagtaaattacacttctagggctcgaacttgcatggcagagaaaggagtacaataatttggaaacgctttttctgctcaacttgttcatgcgaaccaagaattcaattgaaatgcgggatgcacgggtatagccgttcagcgatattagtacagatttaactatttatctgtggagaataatacaaatttatacacatgaactccataaaagtaattaagaactaatgtcctgaaccctgatcattgctaaaggtcgtataaacaaatacggtatttacacacggaattgacatgctggcgtttcttacacactacactatccaattatacatcttatgttacaagtaagaggatatatttcactgtttgagcgaagttgtaactacaatagatacaatatgccctgtggaatatttacaacatacatacgccaaaatacttaaatcttgaagaccacaagcacaaaatgggtagagaagatcagtccttgttgcgagaggaccgctcccgctccttcttctgaccaccaagaatccgagagatttgcagtcctctactgaacgcttgattaaatagcatccgtgtctgaaactcggacacaaagggaaaccatgccaaaatagtaattggtgtaaagagaagaactcccataattatctcgtatgcccgagcaagggcacgaacagatccccatagccctgctcgccgagcaagaggcttgcaagcttgtgcaatctgaaagagattgagcaacaatgagaaatcaactaaagcataaatgaagttaatgagcagaacaagtaggagaaagacaaaccagcaatattccccatccggaaggtaagaatgccagaaagcacacaaatatatctcgtaaggtcatatgaagtattgctatcagtacaatcaagatggcgatgaacgaaacaaatatcataaacttaatcagacggaaaaatagctgaaaatccgcactaaatctccgccttccgacagatacagtctgaaaacagtataaacaatttaggtaagcaaaattatagataagatgctatggacagcaaatagtgttgttaacgtggccaccaacccgccaacagttgtatgatcctttttttttcttgagaaattaattctcaccttcataacaagcaataccaccaaaatcacgagccacgaaattaaatatacctggaaagaacaaagtagcaaaaaatgttacaaccaccccatcacttgttcaataaaaatgtagctctaacgatctttcaaaaaatgcagctttaacagaacaataaaattaacatggagggcataccaatatacttttgtcgcctgtgatatttaagtggtaaacaaggccatactggtatatgaaaaacctcagggacaaaattatctcaacaaaaagtccaattgtcccagaatatttcaaatgctctagctcgatctcccaccaggattcccaactcttgtctggtgacaccccaatgccaccacgattgctgatccacttattccaatcagaccaatcatccacaattttcgtccactcaaatcccgatggattgaacaggaagggtgcaaaaagccatgtcaacactaggaaccacatagagaatgtaacaaaaatataggcaatggttgagcggtaagattgaccaaatagttggtaaatgatgagcagaatcaacaactcaatgcctttaacaaagtgactgcgagaataaagcctgtaattctctgcaaacttagcatgaaagacaacaaagcccctaccagtagctctgtactgagcacctccatggagcaacattcgtccatagtagtgagtcttagtgccaagtgaaaacgtaaagaacacagctgccaattgcaagttcatcatgataaattcacttagtgcttgaccaaatcctttttcaaggccaatttccatcatcatgggcagggccatcagaaaacctagctgaaccagagattgtgaggcaagagcaacctgaagggggtggttatgaatgtatctcctttgtgttaaaagcccttcttcaagtccactgagagcaagataaaggcgtccatacagaaatacataaactgtgacaactgtcagctgtagaaaaagtgaaaagtattaaaaacatagttaactgtgctggcgtactcaaaacaattgcaaatacaagttattttagcttagggcattaggaattaaggcctcaatcaacaagggataataggaagatgtgagaccaatgtggctcagttgtacagtgaccaatcttcagggagtggtcgacgcaaagcagacataccagagtactgaaataaaatcccacagtagtgaagtagcatgaaagcattctgaagaaatcgaagcggtgtccaagccggtagatatcacggctaagagtctgctctccatttccattggccaccttacctcaaacttagagatctggtttaaccctacatctcttcctttaccaacttgcacatattcatgatgtgttatatttcctccacggagagttgaattatagcctgtaacataaaagacaagaggagcattaccccagttcctgaatatccagttacatctggaaagaaattaacatacagggcattcgtattgaagcaatggagatatataattactgccaaagaccatgataattgatcttagccacttcattaatcagcaaattgaaactttcaggaaacaaacctgcaaaaatatcttcgctcaagttgatactccttgatgccttactgacaccacctcttgttagatgaaaaatcctatcaaatacgtcaggatggccatagtggaatcgaaccctagaataaagaaagtaatagctttagatgcaatccaaaaagggaaattctgtacgttttattataaaattcttatgtagaactagttatcggaaagtgcactataaaatggcttgctcaatatgtttataagctagcaaatgacatggcttagttcatcacatgcaatttcagatttagagaatataatatatgatcacttagcctttttcttgtgattgatgaaaataatgtattatgtatccattcaaatgtatagtaacacacatgtgaggaggaaataatcagataggagaagatctcacttcagagggtttgcaagcagccgttgcccaatagtcacaaaactatgctcctgattggacataaaccatgcgagagaagagacactgcataattgaagagaaaggtgcatgaatgaattactaacagaacctgaaaactcaattgagcaacagaacaaagaaatagcagaatgtgaaaactagattgagcaactcttatcaacctgccagtaaaaatatgttccctaactccaagtatagatgggcgccgaactccatgttctgtaaggaactcttgaagcaaatttctcattttaagtgcttcttccatatagttatcctacaaaattaaaggtgtgcacaagtaaatatgagtttgaatggaagcataagtgctgcacctcctttggagaaaatgacagcataaagtacgattctacaaacctggttcatgtctatggtttgcaggccttcaccacgggtgaagattattgcatgattttgattttcaggctttccttctcccaacattgcaggtcctggaagttttatccggtagataaccttgaaaacaaaaaaatgcaaatgttgcagcttcacaggatcacagaaagaactttcacacttgatccacttctataaaagaagcccataacttccagcatttatcagtaaaagaagtttcaagaacagcagttgtgcaggaggttcctaaaagtgtgtacacgtccacttgaacctttaaagttaacttcttgagcatctatcagttagagagagtggaaaggaattgtggcactgctaagcaagtcccgaaggaactcaggacacacttatcactctcattgcctgggaattatgaaaccatcggtgtgattatgttttgaagttttcaataggacagcagcattcatgtggtcctgagatccatttctcatgaacatgaaggctttcgttggtgcttggctgggcaaaaggacttgcgaatttgcaatactagctggccattccaggccattactacttggtggcttggtcgttcatgagtggtgtgtgctgcgtgtgtaaatatgtttagtgtgtgtgagttggtttttgggtcagaacgtccttcttgacctttttgtactgtgttttctccttattgaaatgacatgcagctctcctgcgtggttgaataaaagaagagagagtgaaaaaatctcactgcaaaattagattgttgaggatacctcttcaaatctaaatagtgttgtttggtctatggtttgtatcacttgttttagaattaggctgggaatcctttgatccttctattaatagtgtttttgttttgtgcctaacatgatttgccaaaatttatgccccactacctaatcaggtagaagtacggttacctgataagattttttttgacaaggaattacctgatcaagattttgaactggatctgtagattcagaatccttagttagagcaacctttaccaaagttgagtaataagctggctccattttcttttcttccactctatcttcgacctgatcgatatatgctacacgaagagaagggtacctgcaagaaatttatcgctaacaattagaacttgagacagaaggaatgacctacattatccaatcatggaaaacactgtactatcatgtctacaattgtgcaaattctgcagcaaagctttggaaaaaaatccattggttgatgtgtgtgaaagagtgtgatataactgcaaaacattaaatatcatgatcaaacatgatagcatcagggagaaatgaaatataaatttaaataccaacaattaaacagtgtattggcattcttctttcatatctctctctatttcttccaatacaatccaatcatgcaatttttgtggtcaaaataatatcttctatatgcccagtagtattgtcagctatttggaaacttgcacacgaagttcatacgagttagattgtatctctagtgtacacctaatgtggctccaaaatttaaatccagaatgatatgcagcattgaatggattacttatagtattataaatattgaaatcactacagctactacaatatgatgagtacttaactaatctctacatctacagtattcaggtaaatgcaatatccttatttacgttctcatcagctgtaatatgtcttgggcattaggaagagcagcacgcttgtcatttccatattgctggcatgataccacataggtaaacttcatatcagccactgcttcacattgcgcaaacaaggaccgctgtaacttccattgttcat

SEQ ID NO: 23338 - DNA, 2191 bp, Oryza sativa
tcaatcacgcataaatttagaaactatcaagaggtacaaatttggaaacttttttttagaggaagatcattttttgatgcagactttgtaagaaactaataaaggttaatcagcaatacctgttcgagctaatgtttgccctctgtatgaagcccacagacgaagctcctcattcttgtcttcattctctttaagttcctcatcccattcaaccctttgctgaaagttcttccattcatctacatacatatgcacaacaggatatagtaaaagccagatgtaaatagaagacatagacactcatatgctacatcaggacaatggaaaatagtttcttctcgacctgggtaaattttctgtaggtagaatagggtggaaactccatcctcattttcctcctgcagctcttttatcgaaaaaagaacaggttcattgtaatacggggtcaacgcgctgcagatagaaatagacattatcagtttgacaagggtgccatgagaatactgaacatagaggcactgcaaaagtaatgtcaaaaggaactcacaaaaaataatgagcagcatacaaggacttacgaaaatgaaagcatgtttctgactttgggagcatcaggcatgtccataaacaaagaattggtgaaaaaggtaagacgccttctagcctccagatttgaggggacatccatagcagactctttcacagtgagtaacagttccagcctttttatctgcagcaagaaaaaaacattgttgacactcatttagaattaggaagtttagccaacaacagcaaatggttcagtctaagatatagtaaacctgaagcacacaggcaaacacaccttctctatccaggcatctgtgaattgtacgggaaacttgatagctccagccggttgaaataactgatattcttgatcccatgtcgttgtgccttcaggccttttgggggtattgaaaaaccaccatgacttgactccaaaatactgtcatgttgcaaacaaataaaataatgacaaactgctggaggtttgaacaggagcaatcatgtcatacaaaactcatagcagcagaatttatttcatatctcgtctacaagcctcctgcctctatattttttctttccttcacatccatgagtcttgtttttctaaacctgcacaaatattgcacatggtagtgaaatattcactatcatttcacccacgctatcaacaagcatggttggtccggaaaccttgtactaagacactaagtgatgatggttctgtgcatctccgggtgcagaagccaggccattttattccactatctaaaaatagcaaaatattccataattttattgtccattgaaaaatgctacaacagaagttgctcatataatgatattaaacagtaaatcgtcatggttcagtacttcatcctcatgatatttgcacatgtttaaaacaatagttgtacctagaaagttggtcttccattatatctcttgttacaacctccagcatatcttgaaaaatctttattacagcatccctatcattcttatcattcttctcctgatatatataataaacagacaatgagacaaactagaatctggtatacagacatatggacagactccatgaagtttgcatgtataacaagcattgcgaatatgagcttaccaatcatcatcagtaattgctaaaaaaaggtcatcagtagacagacagtcaatcatgaaaaggcaagcatgtttctttacgcgttgcattcattaagataaaatgcctagcttctcatcaatttacgtgccagaatgccaactgataatcctttgtactaaaatactttccggcaatataactatcttttagatattacaaaatatatttcgattatctaacatttgaggaaataaacagtacattttgcagtaatttgctgataaatggaaaataagctacatttctttagaaagataaataagctacatgttatgatgattggttagacaaaaaagatgttgaccttaccaaatattttaccaattcaacaaacttattgtaaagatctggcaaagcgtgcatattcaaatcagtaataactttgtcatcagcaatatacttttcaacttctgcaaatatagtatttatgaccctgaaaagcatcacaaaatgcaccatggatcgggctgcaggaat

SEQ ID NO: 23339 - DNA, 1812 bp, Oryza sativa
ataaataaacagctactcccattgttcccacaaaattgtcactgtttcaattttgaccatttatatttttaaatggttagtctatcatgatatgaggcttaatacaaatgtttacaatgcaaaacactttgataatatagaatatttttaggtacttataatttctttttgcagaaaatacaaatgatcaaagtttaaatatgaatagtgcttgggataaatatttaagaacttgagggagtattgctgttagcatgaaaatattgggaagcaaaagattttaagcgtactagtgtactacaaatagtaactggtcactgcaacatggacaagctgtcgtacaacaaaagaaaagacaaatataatctgtttgaaagatctattagagagagatatatattatgttctttattttaaaattatgtgaggggttttgttgcatatttgcctgtaccaatacgtgtatatatttgagcccagagccctttgatgaatacaagtgatcttcgcaacaagatccagacatagatatacaaaagtataaaaaggaaaattaacctctccaagtcgttggaaagcaccataaattccaccaagcagtgtcgagaagattgtataccaaatttgtgtatccatgaaatagacctggaaaggcaacaagaatgcagaaaataattgtatacttccctctacagcacaaatctagcttatcacaattatcttgccacaaacaaatggagcttcctaagctaaaacaatgcgagtgcttaaaaactttctaggaaaacaaaggagaaggtcgtaccaaaatgattggagcccaaagcgcaatcacgacaccaatgtttccgttcgctacataacaaaatttaggattgttataaactaatatacagctgaaattgtttgagtgacatagttaccttttgggaaaaactcatgccactgaaaagtgtgtataggtaacttcatgatatccttggtaggttcgacaagaggcttgatctttaagaataaatgcaagattaagttggttcatacagttacttcaacagaattgatttctaacaaggtaagctcacaataattgagaaaaaaaaaaggcattgctcaacatgaactagattcagcataatcccatgatttcaaaatgtaagtccccttaattgaaaggttcttcaatgatcagatcgtcatggttaccagttttattaggtgcatcttgtgtgcgtcaaataaatttatcataacattacactagaggtttctaaacttgtagagaaggtccaagtggtgttaaacttggaagcagaaggtcccaaaacatattgagtgctgctcaagtctgcaaacttaaaaaacgccatttatgtcataaaggattattttatctgacagaagttataaaatggaaatagaacagattattggatatgtgaaactaatgcggatcatttaaattgatgttttctatagccatattgggtattgtgactttcaaattggctgaaagagctgacacagcactagaaaatggaggtaagcagcgcacagtgcagtttcatacattgtgacactacaccaatactattttagctctcgtaatttaggtaaccaagcatgttgtacttgctctatcattgccatctgctaaccatgatgagaacatttagatattacacataaaacatatactatcaaaagcattaaggcagatataatgcaacatgctcttaacagtagctaaaacagtcgaaaaaaatcatatagcaacatcaccgagcacttatattccaaaaatatatatctata

SEQ ID NO: 23340 - DNA, 765 bp, Oryza sativa
ttttaacagaaaatataataaaataagatgcctttacttagaacttcctgggcaattctcatatatactgctcatgtgaacaaagtgctgataatcaacaaatatgtacatttgcccttataatattcttcatgaattttaaatagtcattgcccttttaatattctatatgaatttaaatagtcaatttttggaggtcacatccatgtttcctttactccaggactgtgccgttggactattatttgctctccttccagttctgggtggtgctagtggcatttttggaggcgtgatgtcaatggctaaactgtatggctattatcagaatagctatgttaaaataaaatctaaatttcattatcatattgatgcatgcctatgttttagtgcctgtttggttcatcagtaacctcaaatatctctaatatgcaggctgcttgtattatccgtatttataactgttgcatatatgatgacttggtcatttgttcctcgattcttgaaactgatgattcagctatcatcgcaggttagatgaattagcttgttattttttgtttctgttcctgtttttgcattcatatgtataaattcatgctcatatttcttatgtacttcaccttttatacatgttaatgcatgaatagttcgtctcagtaccatgtaagttgaaaaataacatgggtgtcccacttgcatgtgatcccaagcccctgacagtttcagtcactttggattttttttcaatcattaatctttgca

SEQ ID NO: 23341 - DNA, 1532 bp, Oryza sativa
caggataaagcaaccatgcttgaagcctacaacagatcactctaacattacaaagccacagacattcattcatttgactgacaatgatttattcgtgcattaactctttgcacatgccgtggaacattggacagacaattccatcatttctttttgcggcaatacgtctacacaagcgatgactaaagacacagtttgacaggccggggatctgttggtataccatttaagttgaaaaattgagttgtacatactgtacatgttgtcagcgtagcatattctttagactgtaaggccccaagccttggttttgtatcatccctgccaactcaacctaggagttaggtaggatttttggtgtaatgctatcagatataccgagagaaccgatatgtgctgattccccatcagaagaccatgggaaagctctatgttagtatatattgtccatttgtcctatgtatgagctgccaggtgacttgttctgttcttgtcgtatggataaacattttgtcacaacattctcttgtcctagtatgagctaccattggaaagtagcagcattttattctcccgtgaaggttattctcttctcctgcctttttgtgtggtgaacattatttttctggagaaaacagcttgttagaatcgtcttgtagcgctgggcttttttggtgtatccgcatgattgcgatgataggtccctggacaagtatttttgcagaaactttcggtgcgtctgtccagtgggtaatggttgtgctggctcgtagtcggagcagtagaaaactagaaatcctaaacaagttggtgcaattattaaaggagaagctctgaccaagctagctggagctgaagagctggagaagatctggcccgaggtgctgacatttgacgctttgtggcgaatcttgtttcagtggttgcgggacgcacatgctcacgtggtcggcctttgcaggggtagagttcaattttcactattcaaacttcatcgtagacatagaaagcttttgttccacacagtgcaaaagctggaatagctcagttggccagagcgtatggctgttaaccataaggtcggaggttcgagccctccttctagcgattttttttaatctcatcacaaaaaatgtaactcaattgttttttttactctttcaaaaaatgtaattcaaatgtatcacaaaacaaatttcaatatattttttaatgtcatcacaaaaaatgtaactcaaatgtttttttactctttcagtattttttttaatctcatctttgcaatatctttttcactctcataataaaaaaacttttttactctcattataaaaactgtaattcaaatgttttttactctttcagtaatttttttaaactcatctttgcaatatttttttctctcatcatcaaaaatgtaatttcctttaaattttttaatctcatctttgcaatatcatttttactctcatcataaaaaactttttttactctcatcataaaaactgtaattctaatgttttttactcttt

SEQ ID NO: 23342 - DNA, 12708 bp, Oryza sativa
aaaatgcaatttccaatattattatgttctttagcaaaaatgtatttgttcttttgcgagcctaagctcatcagcagaccagaataatcgtttcagttgcttgtataagagcttgccaattccacttccagtgctttcctccgaattacaagactgataaaaagttgaaaatttagtggttctcttagaacacaaaaagaaaatagcttcacaagtttagctacatggcagtacaaacaacaccgaaaccgctaggattttacacttggaacaagccacgccttgctgaacttgctcaattattatgggatctcacatgcacacagtacagttcgtccatgtgccgcaaccatggtgccttgcagctaagaacacacaattaaaaacttcttgatgagttcctgaaacagcaaagcaagaggagggacaaagtacagttaattaaaacgggagcagttgtggtgtctgcatcacatgccgcttgcacgttataaaaaattcctgagtgccaatcaggtgaagcatccgtgggattcctcaacggtaaatgtagatgcaatgggtcacattctcgtaaggataggagttatattttcaatatgctgcagtgatatgatttttttagtgttctaaatcgtaatgcaaaaaaaaactttaagttgtcaagaagaatagagataccatgcttgcaaattgagaattgcgatgttcattctgatttctgaacgaaaaatgtttggtatgaatatttgcagatgcaaaaaacaaaattcaatgaaaattttggaggcgttaccgttgatgagagggagaggttcttcttcttgacatcaactggcatcccttgcccgcagcacaatttgcggctaagcatcataagctcctccagtgtaaatgtgctcttgggaggactccacggattcttcagctgatcatcgtcattagcaacctcccagcttttctctgatggtgcccgtggaaactgaaaatctagcgctgaagtgtctccacttgagttgctgtaagcttctgtttctgaaaatgaataccatgtgccatggcgactggaaccacctgcgcattctgcagttccagatgcttccttgctgtctggaaatccaaatgcttccagatcaaaccctagagaatattcttcctcactttcagccaagaaagggtttagcgaggaaggagatacagaaaaatcagcatgatcaaacagcggatgaaaaggagatgcatcttggagaggcttcccgggcttttcttcccactggaagggcacgctgacgacaagtttcgccggagatgggcatgagatggctgatggcactggattggaaatggcccagtccttttttggcgctccaggcttcacctcccagagaaatgggactgaaatctgctgcttgacgcgctcccttggattgaattcagacagttcaagctcatccattttggatgtgtggttttactggtttcggaatggaatttgagctgttgtagatctttcaggcactgctgatataagtaggagagaacaggtggtttagatgagctgctcctgtaccacaatgctcttgttcaactgatccttcgctaccctgcaaacttgacacacaattagacagtaccaactaccaactcctctttagctcagacatgcagaaagaggtactcaattcagagtggttgatcttacatttgcattttccacagtactagaaagaaaagagggtgtagggagcacccgaaaaaaacagagataaatcctcacagggtttggtaatttgaccaaaataaccacttattcagatgcaaatctacattttacaaatgtgactggggacacaataaagaataaaaacaatgtgatcatctgttcaaaaaccagaaaacgttttttcctgttttaacatcctattctgctactgtaccgtgacgtcaggagatcatgaattagttctaacagactccaggtactgtaccacctctgccatgtttggtcgggcagatggtgtgttcgaagtgcataccagacctaatttgagcacttggactaattcagcctcaacaaatcccttcatgctccgatcaaagcagtctgacacagtcccatcctccaatatcgccctaacataatcacgcagaaccactgctgtcgccaccccagggctctccactggtttcctccctgtcacaatctcaagcaacaccacaccaaagctaaatacatcactcttatcactatatctcaagcttggagatgctaactccggggcaatgtacccaatggcagcatgcaatctactcaattcatagctacctagaataggcaaaagctttccaaatccataatcagataatttagcctcaaagtctttatctaacattatgttggaggacttgatgttgagatgcaggacttgtggtcggcagtcatggtgaaggtatgcaagtgcccgtgctgtaccgagtgcaaccttgaacctctgctcccaggagagaccaactctgctgctgcttccggaaaatgtatgaggactcccgtgaaggtggtcgtacaagctcccgttaaccatgaactctgacagaatcaattgcgttgatgatgaccagtagtaaccctgaaaagcaaccagattggggtggctaaggttaccaagctggcccatctcctgctcaaactcatcctgacttctcacccttcccagtgtttccaacttcttcacagcaatggataaaccattctcaaaggtggccttgtaaactgtaccaactgacccaccaccaacaaggcagtctttgtcaagcagtgccttagttcctgcctcccaatcttcataccttgaaggcaagctcttgctgaaaagcaccaactttccaataatggcatttgagccttgtctgccaggagatgcaagcatcggtgtgctctcggactccagcacctcatcctcctccttcccctcttgctcctctttactcctcctcatgtaagcctttatgttcatagcacaaacaatgcaaactccaataagtataagcgctgctgcgactatgacaattatgacagacacagccaattgtttcgccctccggctagccccacacagattgttcagtggaggtccacatagtaatgggttacccatgaaggcggagctaccgaaactctgtagaactggcaaggcagggatcatgcccgagagtccattgtaggacacattgaaatgggtcaggttagacaggttcccaagctctgaggggattggtccagtcagttggttctctgagaggtctagaagatcaaggtttgtgagctgtgcaagtgtcactggaatcccccctacaagatggttccgatgaagatcgagcaacttgaggtaagtcaagttgttaagcgtgtccgggatcactccttgcaattggttgccagacaaattcctgcagtagttcaaattagtctgtcagtacatgaaaccactgtaattcaaacgaattggactgggttgcgtagttaacagacactcacagctcaagcaagaactggcattggctcagggacaccgggatgtctccgatgagagcaagaccagcaagatctagtgtgacaagcatctcaattcctccgagctcggcagggattgaaccggcaatgcctgcatttcctgcgagcctgagcactgaaagcgacctcaatttcccaatgcttggtggtatgtctccagcaagagcattcgtccccaaatccagaaccctcaggctgcggcaattggccacactctccggcaccggcccagtgagccggttccctgaggcgtcgaagtaggagaacttggtgccgcacgttgcaatgttggggatttcaccatcgaaggcgttggacgagacgttgaagtaggtgatgtttaccaggccaagaaggccgaaaggtgccggtccggcgaaatggttgctcccgacgtcgagcaggtcaatgctccggcaagcgttgagctttccggcaatggcgccggagagcgagttgcttcggacggagatgtagctaatttccggcggcgcgcagagctgatccgggagctcgccggagaggcggttgtaggagaagtcaaacccggcgaggcgcgagcagttggtaatggcggtcgggactggccccgtgagggcgttgtgcgcgagggagacgtaccggaggcggaggcatgggtcgaacagcgaggcggggatctcgccggagaacgcattgtaggagaggtcgagcaggcggagccacgggaacgcgccgaggaacggcgggatctcgccggagagcgcgttgcggctgaggttgagcttgtggagcgtggggccgagcgcgctgaagctggaggggatgccgccggagaggccgttgccgaagagcgagacggactcgagcgacgccagccgcgccacgacggggtgagcttcccggcgatgcccgcgccgtggacgcgcaggcgctgcacggcgcgggacgacgggtcgcacgtcaccccggcgaagtccacgcaggggtcccctcccgccgtccacgacgcgagcgcgccgttcgggtcggtcacggcggccttgaactccagcagtatccccctctccgccgccgtcgccgcgtccaccacccccacccaatgcagcaccacacccaccaccagaacggccgccgccgccgccagcgagcgcgtctgcctcatcgcgacagctggaggagcaggcgcagtgcgagtgcgagcgcatgcattacccccgccgcggtggcgacggcaccggcgctctacttctactgctgtgactactgactactactcccctcgtactgagagagagagacaaggcgcgccgagtaaaagagtggcgagtaggtggcggtgggtggcgtgcgttaatgtgcgggtggtgctgccgcgcggccatgagccctttcttccttgacgtcggttggccagaaaccacgttcttctgggtgtttggtgcgtggcgcgcgcggcgtttaccttcaccttacccgtggaaatctaggcgagacgcgcggtcaaaccgaaacgcgaacgcgaacgcgatcgggagcagcagcgcgcgcgcgcgcgacgtggtttggtgccacactgccaatctgccggcatgttgaggtgggcaggaagtgcgcggcgcaggcgcagcgaagggtggggtacggcatgggacgcgcggttggggaggaattttttctcttcaattcgctggctgcgcagccgcagccgctgttcacgtcaaccgctcacgcatcgtgccgctgttcacgtcaaccgacggccgcggacgtggtgtcgttgcccgtttcgcgttgcgtccgtataggtcgtagtactgtggcctacagggaaaccatgggtacaccacggatgcataaatgagcttattcactgctcgtccgtcgtgccggtacggtgctactactatggtgctaccaccgtgctgcggctgtacgcacagatctacagtaatagcaaagctactagtactgctactactagtattcattcaagcgtgagtggcaaacagatcagcatattgctgcgtgggcttcttgtatcatccgccggcgcaactgcgcgagcggacgatttaactactagctagatgtgccatctgccatgccatgccattgatgggaccaacataagatgcagtaggcatggtcgcatggagaaagtttgttggggtttggagttcagcgtgcctttctgtcggcaatgattcgtcggaacgtatcatcatggaccgacgtgcttgctaattaccccgatgatgcgttccagtgccatggctttcgactctcaaagcctgaactgcaaggtctctgtcaagatttggttaccaacctccacaaaagcattgccatggatgaaaacgatgccatcaccgggtccttaattacctcaaatagtaccagatccttgaaaaattgaaatgaacagaaacggcacgatcaaacttggcggaaatgaaggaaagaaacgtgctacctcatctactctactctacatgtctgtttcagaatagaaaggtctaatctgttatagtgctttgctacgatacccaagtactccctccgcccctaagttcaaatttacactaggggtaccaagtcctaacatctaaatcgatcccggcaaccaaatcgagccatcaaattgttcatgaattcgatgggcatgaagtaatgatctagcaatgtggcatttgaggtctgaagtactccaagttgaacttaattattcttctgttacccaatgtgtacaaacatatcacgtacaagaccacaagacaaacattatagcttacactctcatcgtctacttgttagcttatcagtcataagactcacaacaataaaaagtttaatttcaaaagaagttaaaccatctttttaaggagtaaagaggggttgtggcatcttccccctctctccccagtggtgacctcagatgacaaggagaacacctcaacggtgacctcagatgacaaggagaacataagctaggccatgatagtcgaggtggtagcatcaagtgatcaaggaaatcgaggcttgttcccgccattactgcttgtttccatcctcgttgcctccgccttagtcgttggatcaagaacgagctttagcagtagcactggaaagctccagccgataggaatgagctcaacggcaatagaggtaactatagctgatgatagcaataattgggtggcacggacacaggtcaatacacatatgtagatagaggcgacaagctcccaagtggtaagctctttacctctcttatcatcagctttcctcctcaccccagcctgaaatgctggtgataaagtaacatcttaccagcagcaacgcaaacgccttttcttatatagttgctttccactctcaaaacaccatgtcctctatggactacaaaacctttcttcaagccattttatttttctccactatggtagctctggttccgacgtgggtcaatgaagcttgtgtacccttgaatgttgaccggtaagcatggcctaaggtccatgtggtttcttcacatggattgtatatgttcgtgtttacaagagaaacaagtgtagcgtttttttttcaattgcaagaaatacgcaaacgtgcgcacaccatgcacaccgcgctcacatactagtaagtgtgcccccgaacacacgcttaaggagatggagactggcaacacatccttggacccatgaaattcctgatgaaagcatgctaacatatgattaatattcgtatacaccagaattttaaccctagtgagtagtcatgcacccatgacccaactatcacacgagtgatgctttcctgtctctgtagcaaatatagcatttgacttgacaaaaactttacatgtgtcgaataagatttgcactattaaacacaagattttcaggccaagtgaataaattaccatatcataaaatcagataatcgaaaaaaaaaatctaaaatctcatgcgtcacgagcagaggggcttgttggtataaaaagtgctattgcaactgctacgcaatgtggactctggttccttctcccgcacactacgattcggtcaacttgacgcctcgtggaccctctctggtctccatctaacggccacgatggtctaatctcacccccacgcgaatctcagaacttgtatccctctctccgtcttccaccacgacccgccacgacaaacacccccttcccccccactccactccccttccctacccgcccccgtcgccgtcctccttttcccgcgaatccgcgatcttccgccgcgcgcgtcactcgtcgacccccctaagccgccgccgggcgatggcggcgctggacccaccgagcgagctgttggtgacgccgaagacggcgaggaaggacgaggccgcctcctgcaatgcggccaccccgcccaagccctcgccggtgtcccccgaggagatgcgcgcggtggcgcgcaagttcgccgagcaacccgtacagaaccccgacgacggtgtctgggctgtcctgacggccatctccaagaatgctcgcctgcgccctgaggtccccctcccttaaaccctaaccctaaacccccaatgtttccttttgtaactgctagtactaattcagcattgccatgaaaagaggttgagatattgaatcgtaaattgctgagttagctcccaaaaaagtgctgagttagctgattggagccattttgtttaattgtagggaatgaacattcttttaagcgccgatgagcactacataggccgtgccgttcaggaatccagcttcaagatttcctctttgcagatcagtgggaaacattgcaagatatatagggacactgtgttgggggagcttaaccgcaatgaacctgtacctgttttcctcaaggactcgaggtttcttgtgcttctggttatcttgtcatgtattacaataaacagcaccctttcttaaattaacttattgtagcactgcagctcaaatgggacattcatcaactggaccaggcttaagaaaatttcacctccaaccaagcttaatcacggggacattatatcatttgtctccgctcctcatgacagtaaagattctgagcttttttcactttctatgatccaactctactgttcttataaacaattatgataaattcattgccttgtaacttttttagagctttcctgcacatggcctctgctagtttacctctgtgtacttgattatatttactgtgttttccctgtttaccttgcattgtttttcttgtatataatcgatatcgaactttttttggccatttatattgcgtgtttcatctacagatacttcctttgcatttgtctaccgtgaagttaatgctgtcagtcgtgcagagaatgaagttaccatccttaaaaggaagtcaggtaagagggaacatgtgctttcctaagatttggtgattacatttttccagctacattacaagtaatgatatatgtaccacaatttgtatttgatcttaaagaggatattcattctgaaagaaagagactaaaaggtcttgggattggttcctctgatggtcctgtttcactagatgatgttcgtcggctagagaaatctaatgctgtaagttgaccccttcaagagttcaagatggtagtttttattgccatgaaagtttcttaaccttattagcaaaaatccatgcaggagctcagggaacaacttgaggaacatgttgtcacaattgagactttgagaactcaaattaaaatatctgaagcacagcatgaaaaggtatatcctacgtctgcatcttggtgttgtgtctcttctaggataatcgcccttcttgtactgcgtgacactgtgctactgcctactgccacttctaatgtttctctccactctactaaattaatgatgatattccatattctagtgtcaagaaattactggtagtgttgccaaactatctaaatatctaaatagtgttctgtacggcttataccatccctctcctagaagtgaatgtactgctgcttttccttttaaatcgccttttgttgtcaaagactacatttcttgaaaggtgccctcttgatttccctttcttatatctgagtcttctgcaaatctgatgatgtaggaattgaaggagttgaaagagattacatcgagtacttatgttgatcaagctaaatctcttcagcaaacattagagtacaagcagaaacaaatagattcacttagtacatcaaatacagagttacagaattcaataaaagatctcgatgagaggcttagcgcatataagcaatcacgtgctgaggctgatgagataattcagaggttattttttctgttcttttgattaatgctttgtggcaatactcataacttttagttttccgtatatggtgttattagcgttaggaaaaagagaaaaaagtcgcatatatttttcagtcgtgatcactaaagtcatttaaaaacactggtatatttcacccttttgtttcccaaattacaggtatatgtattgtagtatcttacagcatagttgtgttgaactgggacattttgctggtttacttgagggtcccatatcttagagggcacatggattcagcaaaccgtaaaatactccttgtttggaataaaggattttgatagattttgataaaacttctggagggatcgtactgcttcctagaaaattcccgtgaaattcatgcacagatatgcccaagtattattttatatagcactttagttgatccagggagaaaagtgagatgttcttctggatagacatttaggctttttcagcatataggaagtccaattttaacatcactctccactcattcaaacgttttcagccagaaatcaaatatatgtgagcttgaggcacagctaagtgaggagagagacttgcgaagagaggagcgtgataaggctgcagaagacttaaagtctgcactgcataaagtgaatgcagaagctcaagaagaaatcaagagacaagctgaggctcaccttagacaacaacgggaacagaaagaagttattagcaagcttcaggttttaccttttctttccaattctagggaatgatcaggaattgggaaataatgtattgcgtggacctttctcttttattttcaggaatcagaaaaggaaatccgtttgcttgtggaaacattgagatctaagctggtatgcttttttgctgttgtttatttgaacactcattccttttccattctacaattatttaccttcacattcaggaagatactcgagagaaccttgtcacatctgagaaaaaagcaagagagctggaagctcaacttcaggatgaacagcttgtatccgccaacaatcagaaggttacagtcgtaaacatgtttagagctattaagcccaagttgtttcatttgtagttcattgaatgtatgtaacatcttttcttcacttcctccccccttgcaatcgcagaaatcagataaactggaaatggatctgagaaaagtgaagaaagaacttgaacacgagaaggtagaaaaagatttcaagttcctctgatgttttcatcacataagctaatctaccctggtcttcgcatgcatagaggattgctcttgtttacttactagctgattatctgtgttcttctgttagcaggctgctcgggaagaagcatgggcaaaggtctcagctcttgagcttgaaatagctgctacaattagagatctatcaatcgagaaacagaggtatcaaggagcaagagagagaattattttacggtaagaaacattgtttgagtttcatatagaggtgaaccccaagtttgtgaaactacaaatcagcttaccttttcttttgtttcctatgttgcttactgcagggagactcagctgcgtgctttctattcaactacagaggaaatatcttctctgtttgcaaaacagcaggaacagcttaaagcaatgcagagaactctggaggatgaagagaattatgagaacagtatcatgggtgatgatctcaataaagtgccactggcaactgtaactgctgacgatgcccgcacgagagtaaactactcaaaaaatacaatggaagcttctggtgcttcaacagagaatacccaggcaagtgaacaaagttcaagtgatgattccaaggagactgaacaacaggatgattttaccagagttgaaggggcaaacactcaagaggtagagtgcaatagtccagaaatggcaacagagagattcaggtctgattctcatggtgatctggctgctacagctcctgagctagagccaacagatactgagcaagttcccgagacagaaagccaagctggtaatgttggctgtggtgatcacaattcagctcttcaaagatttagtgaaatgggaggtgataccatgcagctagatgatgaagtgcaaccacaagagaatgatgagtccatcttgatttgcaaagatagagggcaaccacaaggaaatgaggaagcctcgttaaccctcaaagatggcattggtcactattctgaagaaaaacttgaggttaactgttctgagagaaaacacgaggatacccagaccagaaccattggtacagctgatttgttggcctcagaagttgctggtagctgggcagtggaaacaggtccatctgtcaatggggagaatgagtctcctaggagcttgggggagactacagaccatgccggggagcaggatgaaaatgtcagagggagctcagcagctgatgctttagtgaactctgatggacaggctgctgggagccagagtaatattgatcatgtcatcagtaaaataaccgatcatcatcgtgttcttaatgctatgatcgaaattgttgatccagatttcagaaagcaactcccaggaagtggtgttggaaaagatgatctgatgtctgatgcggagactgaggaaggcagtgaggcgaatgatacagatagcgacagtgaggaggccatggttgaagattctgttggataggctataaggcagctacttttcctcgtaaatatcttaaccattttaccctgcactcgggtatgagcttgtaccatttttttcaatgtgcatttttttttcatttcatttcaatttctctttat

SEQ ID NO: 23343 - DNA, 17870 bp, Oryza sativa
aaaaggaggttcaccaaccaccacctactagaaaaatgcaaggggattattaacaacattaaaacaaatgagttaggaatatgcgaattgcgctcatctaaaccaatattctctttccatgaaccacccaaaatgcctctggaatcattcttttgattcattgttcttcgctgcaccgttctgttgtgactgctgcagttgatagaatggtatctgcgtagcctgctgctgctgcagttgaaacatctgattctgagcattgagttggatctgctgagctagactgctggacgagcaagaatcgccgagctcagcggtggcgagttttaggcgttggacttcggttgtcagggcctcattcagcgctgttgaacataagataatggcgaagcagtgaggaactgagcatcaaaaccagaactaacaagtgaacaattcctgaactctattcgtggcatactttcatggtgcagtgtttaacagtatattgcaataggatgaattcatcttggtaaaaatacagctactcataacattaatagatagattaacccttaaggatgaagtcatcatgtaaaaggcagtagacatcctagatcagtgtagattcttgaaacgaaagactccttgtgagagaaggaaatgtggcaatcacatggcaatatggcatccaaggagaaacatttgatacgtgaaagccctgaaaactagggtggcaatctggagaagtcaccgcagaatattgaatactccaaaacattcttctcctacacgggactgcaggctcctaacatgctagcaactaacggattcagacttcagagacgccatagggcatactatatattttatctttgattgggggaaaaggcacgcacaatagcaaatcttcgttcttggatgattgctaaggcatgtcctcctccctaccagtagtaggagtacatactaacgaccaccggcttcccgagagaaaaatatatgcataaagaaaagctaactaccaacctccaagcgcaaaaacacgagattatggcaacagttgacaagcactaggacaaacaagcatgtcaacgtcaataacttacacaagactgttcatcatagtgccgagcacatctaaagtatcttatgacgttggcgagcacaaacatgggaggagcgagtgatcgaggaggtttaggggaggcacgtaccgtcgcgcagctgcgcctgctgctccatggcatgcagcctgaacttgagctcgttgttctgcgtcgcgagccccgccgagtcgcgctgccaaaagccaaaacagtcacagacaacgtaaacaaccgtgtggatttcacgcaggaaaaaaggcgatcaggacgatgagacggcaattgcacgagaaagcgggaaggcgaagggatcagtgcgtgttacctgcatcatcgtgagctgcgcggacagattggtcgcctccgactgcaggatctgcaccttctgctccagctccgcaatgtacctcatcttcctctccttggacctcgccgccgactgcctgttcgccagcaccctgtcaccggaggaagaaagctctcagcgatcagtcgatcgatcccctcatgtcgtagcgctcaatatacattgcaatcatcgatcgttttctaatcatttgcatttgcgagacgatatggatggatgggagagtgatcgaatattatttacctcttgacgcgctttgggtcggcgagcgccatctcggccagcttctcgtcggccatgatcttcttcatctcggagggggtgaactcgccgctgccgaattccaggctgaacctgttcggccccaacgcgacaccgttccccgcagccgccgccgtccccgccgtgaagttgaacttcccgatgaggctgtccatggagaggctcctggcgtgacgggccagcggcgcggtggccggctcccccgcggcgttcctcttgacgccctccctcctctcgccgccgtcggcggaccagaggcggatcccgccgcgggtgtcgtcggcgcactcctccgactcgttctcgctgctgtcggcgccgttggtcttgatgctgctcccgcggctgtccccttcgtcgtggcggtcgtcggaggagttgagcccgtccagcccctccaggttcaggtacgcgttgaacaggtcatcggcggccgccgcgccgccggcgccggcgccgaggtggccccacccggcctccaccttgggcggcaggagctggtgctgcccggccaggtacccgaacggcacgtcgctgctggagcggcggtgcgccttgcgcggcggcagcccgccaccacccccctgcgccgactcctccatgcacacgtcgccgcccgccgccgccgccgcgcgctgggcggcgaacacctgcggcggcgtgggcggcagccccgcggccctcggcttgttggccgccgccgccggctccgccacgaacgtcgacgccaccatcggcaacgacgacgacatgacctgcacgtgctgcggctgcatcagcgcgtcgccaatgccaccgttcatgatagcgagtagtaccagcttccgccccccccgcgaccgcgagcgagcgcggtgttgtaaaatcaatcggctccgcgaacgggcggtgcactgcacacacgcgcgcgcgacgcagcagcagcggaggaatgtgggggtttgcgttgcccggactggggatcgggtcgcttttaagggtattaagtcggcgtttggtgacggtgtttgtgaggtggtggttccggtggtgcggtggggttgcctgatagccctctccccgcctcaagtctcgtctcgcgtcacatgtgtttcaccatcagtttcacatgcgctacgcaccacttttgtaccgtcttacacccaggccagcttgcacactgcgccactgccccttgctgatttactggccaggggatggcaattttggcagccaccggcaaggcggaagcgacgaaacggatgcgatgcatatggggcgcgttgcgttccgttgccacccgtcgcagcgcagcgcactttccactggccaacctcggacgtacgtacgtgcgccctgttcgatcggtgtcagctgcatgctgctgcgaatgtggggagactgcccggcacgcaatcaaggcattcattcatgtaggtttctgcctgcaagtcttggtacgagcttcctgttggcctgttggacccctgctcattcgctagtcgctacaggcctctctgagacatgcctccctcttgcatggggagatcaatggcggaccttaggagaattttagagccatggactcaactacaactagtttttgctacgaaaatatcatgcaaaccaaccagcccaaggatccgcatgccgaatcagatcctctggcataacataaccataactttgtggctgacaagtggggtcatgtggcaattgtcacatgttaatttacgtcggaggatcatattccgctgcaaagttggatatttacatgtttacatttttttctagtaaaataaatagtatgctttcatacctgctgcacctagagttaaagctttatactgtttcgaagctggcaataaaatgtattcttccagtcataaaaacatgtcgtgatgtgttacaagctgtatgatgtttagttctaaaccttttcacacatatatgttttcacatttaaacaaaatagtcaattgtttattcctggggaggatccaaggccgagtggccatccaaattcgtgtaccttgagttaagctttcataccattttctatgctagtaaaatgtattcttctagttaaaagcataccattttgttgccagcttcatgatgtctagttctaaaccttttgacacacatgctttttacattgaaagaaatagttaattgtgtattcctaggagtggatccaaggcctagtgaccctgggcgaccgtccgagctcgtgcacctagagttaaggtccatactatttctaagctggcaataaaatgtacttttccggtcacaataacatgttgttctgttgctagctgcatggtgatctagttaacctttttcacacacatatgttttcacatttaaacaaaatagttaactgtatattcccggggaggatccaaggcctggtgaccacgggtgaccgttcatatatatgcacttagagttaaacttcatactatttctaagctggaagtaaaatgtactcttcctatgacaaattaaaaacatgtcgtttctgttgttagctgcatgatgtctagttctgaacattttcacacatatatgttttctcttttaaataaaatagttaattgtatatcctgtgagatgatccaaggcctagcgactacgggaggccatccgaattcgtgcacctagcgttaagcttcatagtatttcaaagctgacagtaaaaatgtactcttccagtcacaaaaacatgtcaatctgttgccaactcgatgatgtaaaaaaaaacatgtcgttctattgccagctggatgatgtctagttctaaacctttccacacatatatttttttcatatttaaacaaaaaaaagttaattgtatgttcctgggggaggatccaaggcctgccgaccatgagtggcactgtccgaatttgtgcacctagagttaagcttcacactatttctcagctggcagtaaaatgtactcttccaagaaaaaaaacatgtcgttttgtagccagctgcataatgtctagctagtttttaacctttttcacacacatatgtttttacatttaaagaaatagttaattgtatttttttggggggcggatccaagacctggtgaccccggacgaccgcccgagctcgtgcacttcaagctagcagtaaaatgtactcttccagctaaaaaaacatgtcgttttgtgaccaactgcataatgcctagctagttttgtttccacatttaattaattaaagaaataattaattgtatatttttgggagcggatccaagacctggctagtggttaccttcgggcaaccgtccgaactcattgacaagtcacatcaatgtaatagcttccatcgctgatgttcaatggcatccatataatcctttggacatatatgtttgttcatgttctaaaagatctctagattcgccaatgtacattcacacacttaattagtcattcgtacatgcagcgtgcttaagtttctaggcgcataaggcagggtcgactagtatcccttaataaagcttatggtgatatgatggtggcattgtgtgaactgtgaaggtgtccaattatcaagtgtacatggtagccggctcgcactgtctatatcatagctcctcttcttcccttctaaaattttggaaggatgccataatatggttttgaagtttcttggccgccaagctgaagccaccaccacactgagctgtcgatccgcgtgtatttgcagtcggtggtagtaacacgcacggtgcatcctgagccagtgagccgctttagcgacacatcacgtgcatcggattatcggaagcacacggtcaaggcaagacaggtattttgttagtcgcgattaatctacaacagttagggcatccacaatgtgctacaaaagtagtccatagggaataaactattccatttagccatttagtaacactgggcaactagtccatataaagaaaatagcaaaagatatccatatgcatatacactacctatatgacataaataatattatatatctctacttctctctcttctcctaatgttacattgtatccatatacattgtgagattgctatagttaaggtttatttatatgggtcccatctatataaaccacttttaacatatacattggtaatgcccttacatcatactactactacatcacgatctggtcaagtgcagagcattgcgcagccgcagcgcaggcaggcaggcaagcgcactgccgccacatggctgcacgaacaaaaaagctagtagctccaagcctccaaaggccggtgtggaagaagggagatttcacggttggaaaagcgacgacgaccgagagaaagcggcttttttgcggaggaaaccgtgtggaccccccccgtgcgcgcgctgccgttgctgccctgccacaccgagcgatgagtatcgagcaagcgactcgcgctcgccacgacgatggggggcgtccgggcgtagctccccgtgacgccttctcccgtggaagctgtgagcctctgtgaggcgaaatgtaacactgctagtagtagtggattattctattcggattctccacgggacgcgcgggcggcggccggtggtgccgaacacatcgcccacttttgttcgatccgcaagacgacgtgcctgccgcgccgggctgtcgtgaaggcgtagcgatggtcgagcgcgacacatggaatggatcgatcggccgattcggttatatcgccatcggttttgtctccgcactgatcctgcactggatttgggcttaatttgcagagacattgacggtcgttcttaagcgaagccatggcccgaccggctagctccaaggtcaattgcaacgaacgatcgagcaacacttgtcacgagcgtaggctggctgggccggagatgacgtgctgcacccggaccacgcagcacggggatcatccgcgtacatgtacgtacggactacgtactggactagttattcatgtcaccgaccaagcgcgacgacgtacgtacacctgcagaggtttcagaggaaatacagtaatttctgaattctaaccgagaataaggaacacacttgcagtttcaggccgtgacgccccgttcgcggtggcgcggtcgacacggcgagctagccgtcctcgtgaggccggcattgacatggcatgaaccactgtaccatactctctccgtctcaaaaaaaagacaaaccctagatttccgtgtccaattttaattgtccgtcttatataattttttttataattcatatatttattattgttagatgataaaacatgattaatattttatgcgtgatttgtctttttaatttttttcataatttttttaaataagacggacggtcaaatattaggcacgaaaaatagagtttgtctttttttttggtacggagggagtatataccactacggatgtgtgtaggactgactgtacgtacgcgcgtatcaatgccttgcttgctcgtgatcgatggccattgactactgggaggcaatgcgatttactgctgccgttccagtagagggtaaaagacgtcttcaagaagaggaccacatgggatgtggcctctgaggttgattagtcgccttccattcccaacagtacgcggtgcagcaacgtaccatactccagtaatttggtcgtgctctcttgtatggctacaggctacaggctacatcatgtgcaaacgactagacgaggatgtcctgcaggcttgccaacctcatcgtaatgaagcgcgtgtcagggcgatagatgcagagtttcttgcagcacagctcaaacgagaatttttgtatgaccacttcgaaagacttaatattcagccatgtagcacaaaggctttgtttagttgctaaaataaaaatttttcatccatcacatcgaatatttagacacatacatagagtattagatgttgataaaaataaaaaccaattacacagtttacgtgtaaattgcgagacaaatcttttaagcttaattatgccatgatttgatactgtggtgctacagtaaatatttgctaatgacggattaattagacttaataaattcgtctcgcaatttcatggggagtctataatttatttgttattagtctatattgtccgaatatccgatgtgacaatcaaacctaaaaattttacctaactaaacaattcctaagatacatagcgccaacatatgttcgattgatatttttctagcactttggcagtgtctccagatttgtttgttcgagctataaaaaaaagggtgtagctatatttatggtgccatatttttcatcaaaaaataatcggcatgtatttacattgtaagttcatagtgtatttacaatgtaagtctcaaaattacatatgtaagtactaaaattacatatgtaaattcaaaaaatacatactaattatatatgtaagtggggtgtaaatgagatataactactatgtaagtggctgaaaaaaaatcgactgtagcatatggcgccatatttctaacgactccggaaaaaaaatgtaaacaagaaagaatacatgggcttcagaaatcagaaacaggtcaagcctacagtctacactagcccaataagaaaacaactgaagccctactttgggccgagggggaacttaagcccaatttaaacagccaactcagcaatttggcctctttgtcctccgtttgaactttcaagggagaacggaagctgctacccgtaacatctctctctctattttttttctttcttcagagtttctacatctcttctttattgcatttgtgtgcatgcatctcaatatcttatcctcagactgtatatgcgtttctttttcaagaaaggaacagtacaatcactgaagactagctagctatcttgaagagaagagcaggaaaagactatagcgaaaggcaagcatacgtcaatgcagaataatgcacaatgggcacaattacaggatagaagagtcagagagacgaaagctagctagctaccagaggaggctgctatggatcgatcgcaagagcacccaggatcgagtgggctgcaatggatgccgctttttaacagagccttttcaccacagccatatattgttgtgtgaatggagatcatagatatacgaaactagaaagataaaaagaatggatggtaactttgcaggaaaagattgctcgcatgagttgagaactagctcgcaaggtgtgaatcatgtagatcggccgcccggcccggcctccgtgcgcggtgtgctccccacctcctccactgcgccgaaatgatgtaatgtacgtctccgacgcggaggaggagcatcaatcggcaaccgcccgtgtgcgcgcggtgtccagctagccagctgaatttggcagtgactcagtgagatcaaaggcaccgcccggccggccacccactgcattcagtgctgcagacttgcagaggcatgcaattgcatgcagtcgcaccttgtaagttttagtaactacatatcttaccactgaactgtcactagctaattgttgctctcgatcgtctatgtgatgaatggtccacttgtctgtctgccattaggccagatcagagaggatcttgtacttatgagctttgcgagctgctgctacggtttgcgagcttttctgtgccgtatcatgtcgtttctttgctcgtcgtcatgagagacgatcgatttgatagaggtagcgcgcgatcattccgctggttattagtccacgaaatccatcgatgcctcacgcacaccgaggggctgccagtttcctgaatgattccgttccagaagcgaacaacatggtagattttttggccacacagcagggaagctatcaagttaacaatcgaagttgattcaatttacttaactactctcatgcatgcttgtccggacaatgccatgctcacgccaactagcttttgagatcacaaccatggcactccataccctggaatggaacgggaatggaggccggcgagcaatgatagcaaggaagcatcgacaagccatgcatgcagggacagcatgtacagggaagagaaaggatgaagggaagaagaaaagaaaagaaagaaacaagcttgatgctcacatcacatgtatcaaaagcggtaagagtagtgtgcaacaagtatctatccctctatctatatatctatctatcctacatcagctgcccttttctcagtagccaacgtgttgtgcagtcactttccctttaccaacctccatatatggctgcagcctctgtccacgtaggagcaattcaatagtaactcgtaacaacctacgatatcgatccttctgatgatcccttgccgttcacctctcctcgcactagctagccgatcgatctgagatatactacatcaggcatgcatataagtcggctcatgtatatacatccatgtcacaccgcttcaaaattataagcgtgccgccaaatcaatcacacttgtgccgccagtgaaagtgagagtccagaaaaaaaaaatcaagcttagctttcttagtcagtcgggtcaccggatcagtagcatttttagcacgtcatcactcttacatcaaaggtaaataggctttttcttgaagcagctagagaggatgaaagcgcgagcatatgtagctaactagctagcagtacaacacagaagagaacaatttgtatgtgtgtgtgtgtgtgttactgtcacagcagctaggctttttatgcatgcactaagggagcaaacaagcatgctatagcctttttgccgcttacgccaaggatctcacacatgtattctcgctagccaacttgccgtatctttcctcaccaaacgatccaaaaggtctccatcccgtcgcacagatagaacctgtagtacaatgcgcggcatgcctgcctgctcaattctcggcaaaaccgcaaaagggagaggtcacgccggcgccggcctcgcgcgtaacctgcagctatagcccaccccctgcgcgggcgcggttgcgtcgtgcggaaaacaagcgagatacgcgcgcacgctggtggtggtgtacgtgcgcgtcggcgttggccggcacgcgaaacgcgcggggtggtgtggatatacgagagccgccgaggcgcggacggcgcaacgcgcgtacgagcggtggtggtgcgaggcggggcctacgtacgtacgcgcgcggggtgggggccggggctacccggcgtcgggctcgcgcgcaccgatccggccgtgtacgtacgtagcgatatatatctcgagcaaatgatgccgcgacccgcgaggtgctcatgattgggcgggcggatgggcgccgcccgggctaatctttcggaccgaccgatcgaccgagcgaggagcgcacgcggtgcatgggcgacgagccgtgccgtccccatccgcactatgcatgcaccgccccacttaccaccgttccattggttattgccccgcgtggttggataccagctgcatgctgttacagtccaaacttacagtacgtccggccagtgatctgcattggtgcatgcacgcatgtaacattatatgtatgactttcgatcgagtttgaattgtatatggggaccgtctgtcttttttcccatccagaaaccaatataatgttacctgccggggcggccgtggacgccgacacactatccgagtttaaatgggactttgtaaatgttatcatatgcttaggtaactaatgatgcaaagtgaagcagaggggttaactttgatagcgacgtttagcccgttactctggggctgcaggatattttggtcagtcgccatccggttaagtaaaacgattaattaaccaaggtaagaagagttagttacagcatttcaaagatacgcatggtgccgaccaaccaatgaaagttaagtatgaaaaataactttttatgcatactccttaatatcctgcattcctgctcggtctgatatgatcttatagtaacaggctaacagcagatatgatcttgaacacagcatccatgtattgtgcccgtcacatcacagataaagtacagttctgaacaacttttgacttttctgcatcgccggctggcctgggccacaatggcgagtttctagaggcaacaatatgtgcctgccggtgtactgtactgtgaaaagaacaacctttccatgggaaaaaatctcagcgctttttagcgttctgaggaatagacgaaaggcaaacaaaacactgtattcactcgatttgtggcaagatagctaactttcattctgctttcgcaatatctgcatgcatggctgcatctacacatcaacatgctgatcatacaaatggcacattcacactgcctgcaactcgacgtctgaacacatttgtgcaagctggagtagctagcaactgctccaagcctgccacatgtaaaataacctgtcagaggttactctcatggacgtaccttcgtgcttacaagtggaaatcctcgtagcctaaaacgacgtcgagtacaaaaacgacgtgtatgtgtactttgcatctagtgtatcttgtacgtaaagcctttggatcatcgaccataccattagccaaggcagcatcagtcagctgcagctaggtacgtgtcgagttcagacgttttccatatgtctggacctctcgacgagttgcatcgtttcaggtagggtcaccattgtccatcggtgtccggccccaggcaatatgcaacttgacctccttttcttgtcctaccaacacgtctgtattttgcttgatgttgctacgtatatatgtaccctgttttatactacattactagtgctactgctatatactgctactgctaggagtacatagtttcagacacatggattcagtactgcaatgtgtgggcctaaaagtagatgaatatattgggagctagctagctagttctagatgcatcatcgggagtagcatgattagtatatacctggacgcccagttattggccacacgattgtagtttatgcttatgtacgggtgaggcgtaacagctgctaagcttatcctgttattgttaagtgcacttttggggagatgctgttacatgcttggtgggggaagaaaggacaagtcatcagccagccttaaccaagaaagaaaagaaagaaacatggcgtgccgttacagctttccgatcgattgatcagtctgttgttcctgtatgtttcgatcgcatgcagctgctgaagtgtatagtagtaatgtgcaaatatgtgtgcaatgccagatgaaaagcgcatcgctttaagaaatatgtggtgatcagctagctagcttcaatgctgctgcatacggtgtcaactgtcaagcacatgatgaattgaagaattagtacgtatattccatagctagaggccgggagatagaacattagcaaggttattaattagaagctgaccagaaaccagaacatgtcctctatctagatgatcaatttggaactctgttccacacattaaacctgccttcccttcaggtatatgctaattaagctgctaatcactcttcagcgcaggctaatggcaatgtacattcttaatataatgaactactaactagacagtaaggttaaagtgctcgtgtagaccaagaaatatcttaaatttatcaacatgtcaaccaagaacagaaacagcttgcagagacaagaaaagtgaacccgtctatacataatatcctactggcccctgttccctaatgctgcgccactctaaccctgcagcaagaacatgggtaacccagggcacacccactgaattaattagggtttaatcccagagtgatctgcagacgacgtgtcgtccggggagcaaaagtgcaggggaatgtcgtgctccagcgtggagagcagctcccatcgggattagcgccgcgtgagattgttttgaggttacatgatcattagcagctgctcgcctgctatgtcctacctgaattaattcctcccatttgacctctccatctctctctaccaaaacatttgtgatgaggaaacaaaagttcatgagaaactaatgcatgtctatagtagctagctatagatagatgaaggggccggcattattatagtcacccggccgcaagaacatgatgcaaacccaagcaatttgcagggctgctgggcccctgtgtccataatctttttccatctctcacactacctatccttattaggttttgaaagttctgtgttacgacattcatatggtccaaaaaccaaaagtgtatcattgttttgttccagtacaccagtgtctgctatatttattggaaaaaaaagagaacaaacatgtatgttatgctgtagctggactccatatatttctagctttttgttccctgatcacttgttcatcaagtactacaaacatgtatatatacttttcagggaaggcaattaattaatctaattaaagtacgttgttgcagttgaaaatggagtactaggtctaattaatactaagtatttatattatgggggaaaacagacaaactcagtgtgacgaagaagattgagtgagtttaccacttgattaatttacaattgaaaatttcaaaagatggtgcatccagaagattagaatggggactagaatggggtgtagtatgtaggttttattattgaaggaaaaaagcacaactttttcgctttctttgcttgacgaaaaagaaagatcgaatatagatacactaccttaatccaaaatttgaccaatgcttgctttgtctctgtggtcacccagttgaattagaacacatttgtaataatcatcaacaattatagcacactagctactccgtagatttccttgactttgctcatgataccgttagttagagttggattctggtgttgtaaagctctgcacagattgaaaaaagtttccctttgtatattgggaaaaattttaatttttggggggaggaattgaaaaaattttttgggttaataaaaaccaaaccacaattggggtaaaaaaaaaacaaaaatggggcccctttctttggctaattgaaaaaaacttttttttgaacataagttggacagcagctacccagcaatgagaaccggaatgatgcgaggtttcccaaatttgatccaatcttatcacgcaaggatttgttgtttccctgtggctcctaacagtggtaggtggcatcatacttaccacaacatgttttgtgtaatgcatgcctacgcccctgtgttatcgacatcataattcccactgatcatgcttctggaatataattgatttaatgctaatggctaaggctaacagacgcaattagtccctcatcagccctggtgcatattgctctctgatctgagaacacaaaattctaggtaggacatgaataataatagtcaaattaagaaaggacatgtctgtattgcatatatcgatctgcatttgataagctagctagctagagatcggtgatttttactggcttctgtgttgagtgatcaaaatcaaattaactgctactagctagccagctagtgattgctacttacatatcagatcaaaactgtacagttaacatcattttgttcaattaaacatatcgcatcaatcacaatttgaaagtagggaaacccgttcgccccagaaatctactgcaatgatagaatggactgatcatgcatgatacctggacaactgtgtacgggacctgcaacaagcagcagctcattctactgagcaatttgttcatctgtcaactggggcaacatggtcctataaacagctgaaagcacattgtggtaccattggcaagaattaacatgcacttgattgcaccagaaactaaagcatgcatttaaaagttaatcatgcctcgtttctccaaattagagaggacgagatgcataactaacttatatatgttcttctgttctagtttcttgatcagaatatatatcaaatatagctagtagcttatgtatgccatctagcactggaatggcatgccgccgaatccattgagagatctaggtttagtctctcttaaattaagtgatatatgcatgagttactagctaggtgcagatacctttgcacctgcttctacgtatgaattactctaagagccggtatatgcaaaggccctagctggatcatggctaagttctggccgctacaagattgatcaataggcacatatatcatcagctacatgcaaaggttagacatagatgctcgaatgctagagcttcttctgtactgttcagtgccgggagaggaaagggaaagaggagtagcagctagcagcaggaggaagaggacgacgtgacgtcagctggtgggcccatatgtggggcccaagggccttcattcccctcacccacgcgcgacggaaaggagagcgaccccgacccttttttatacccgccaccttctcgacccctcttttcttctccaatgcaaactccatctcctcctctccaatgctatttattcttccacacacgcaggccagcttcttgccaacagctagagaagagaacatacagacgagtttgtgcttctccttggagaagagagtttcttgaattcgatcgcctaatctgtatagatcgagataactgaagctgtcgcttgatctgaggtgagtttcagtactggttgatcgatcagttattagctatatatgttggtgtgttcatcgatctgtgatctgtgctggtttgatcatcttgatctgttctttaattttgttcaatctagctcctctctattaggcaaaaatccttagctgcttgttcttcgaaaaaaaattctagcacttctcttctcctctttgctagcttgaactgaaaatagtcgaacaagatgtagctatgaatgtggccaaatacatctcgatgcagaaacttcttcatttctgttatggaaaaagatgtggctatatatatgccctgtttatttgcaaccttttcagttttttttcttttacattcccctcttttcttcgttgatctttattgatcataatcagatgcttaaaaaaattcttcatactggtattggtatcatatgcatctgatgtgatatgatgtatattgattaaaaatcaagctgtttattgcatgctctacatacatagtagtatgtgtgtaaagttatatattttgaattacatttgctacttcaacataatatttttataataaaaatcataaaacaaacaattctctgtgtcggtagtatatgttttgtatatagagcaattttacagttctcaaggtatcaaattttacaagagaaaagtggtaccttaaggactgtaaaaaataaatgtgacacaaataaatgtgttcattcacatgtaactacaacactgtcacaccgcacagagacattgcatccttctgattgaccccctatatgatcatagtaattgatctacctcttttccttttcgagaaagcgcagtggtcatatacataacccattttttcttctttctttttgttccattttacccccaaagaaagatctgaatcatacactcaaatagaccgaaattgccttttagattggccaatgtatttttggatatggtggtatatggtgctataaaaattaaacgagcactctcaagatggtcggttcagatcactatatactactgtagctatagtatgtacttttacacactgtgaagtatatatatgttgaactaaattatatccacttatatatgtcgtcgtacaataattaatagacggcgtgacaacacttcttttacacgaaacaaccttatatgagtaagctaataagtgctatacagtccacgcatagtagttttgttgcaccaagctagatgaggtttgcatgcagaggctggaattggaaaaatggtcggaatgcaagcaaatttccaaagtctgattaatttgaagaaaaacaaatataaattaatgtagccttttgccatgtaaactataccagcactgtactagtttggtctacatggaaatcttccataacttattttgttccaatttctactaccatataaaaacacaagtgtggaatgtttttttttgaattttttttacaagtgaccattattttagttatggcg

SEQ ID NO: 23344 - DNA, 23124 bp, Oryza sativa
cttaggataattaatcttggtaaatcatttgtctcattcttgaatcattaaacacggatacgaaggtcactgtacatatcgatctaggaccaccatcccctttctatccattctgacccaacctggtatagtatatactaccataggaggtctgtgacaatgttagcaaggtagcatgcgtgcaccatcttagttgacatccttacataataacaaccctagaggattaatactttagtgtagtgactgatccatcaataaaaaatcaacattcctttttcattgccatgaggtatatacccgacatcgggacttataggcggtctgtaattttatcctaattaaaaagggtagatctcacatgaaaggactggatttacaaattaacaattcattagcacattaatgaatggtgtatacttatatatatattataaattaattaatcatgcattatgtcctgttattcaaattcgttgcattgagcaagatctcaatttgtcatttctcttgcaagctctcgaggggacattcccttattatttgcatgtcatctaatggttataatttttttataaaaaaaataacaagatagattaatgtgatatatcactctacgacacatggaatgtcaaatttaacttctacatgtcgcaaaagaaaaattggctatgaatatatgttaactagctatagtttaattttcttttgcaacatgtagaaattggattttaacttgtatgtttgtggagtgatatatcatatattatctattttctcaaaattttcatatttatttagatgatatgcaaacaacgaggtgatgtcctctcaacagttcaaaatccactccctcacatttaggcttatcagctcattttctttggtgagacataaaacatagaaagagtatttcctagtatgagatgttgtatattatagtatgataaatctagacaaaaatttgttcattcataatactagaatgtgacacatcccatactaaattaacttaatatgtgacgaaggaagtactatataactagcaacaaccatgcatcacaatactaaaaaccaaaggggaaacacaaaatgattgtgatctacccctggaccttctgtgtccaccctacagaagagctaccatccatgcatgccctacgagctgtactgtactcctccactgcacaggacactccccgtccagtagtacgatcggcatgcactatagcgttgcaacttcgcaagcagtatctcagcaaatgtgagcgcatctactagtagctaggatcagtaggcagctcgcccacaatgcacaatgcaaggccagagctaagctagggtccctgctgtgccatggaattcctcgacaaacagacagaacggtcagaggccgtgcaagaaaaccgatagtcgtgtgcccctgctggctgctgctgtgttagctttccattctctctgtgcatgccatggctatagctttcacggagcagtgagtgatcgagtgagtgttagtggcgcttttttagcctcttcttctcctttaatttgcaggcctgatcgctgaaagggccctccgatccccggcattggctagctagcttcctctcctcacgtttttattctctccatcttttgctcccagccccacctttaatttgtcaaatttttttacatgccccacggcatgcaggcgcgtgctcatccgcccggcaaatgctagcgatgcagctttctcgttttggttgttgtgttttaagcttagccccagcatccacgcaccatgtataaatgccatatgttttataccctttttatttaggcttataagccaacttataagtcaaaaaatataagcctaaacaaacaatcagctttttcgtttggcttttttgaagccataagccactctaacactattaagccaaaatctaggttggagaagtttttttggcttatgtgagatagatgcatgactccaccattaaacttagaacattaaatccaccggcttataaatcatataagccaataagctgacttaaaagtctaagccaataagcccaagcccaaacaaagagggcattaggccccgtttgattcaaaggaaattcataggaattttagaggattttattcctataggaatttttcctacaaagacctttgaatcaaaggaatgaacactatggaatcctatgaaattcctatggaatgcctcttcccatacaagttttggaggaattttaacaagaggtagaacctcatggaagaaatccttcgagtctttatctctcctcaaattcctgtgtttttcctgtggtccaatcaaacggtcattcctatgtttttcctgtggtttgcaatcctctgttttacacttacattcctgtcagaatcatatgtttttcctattcctccgttttttcattcctttgattcaaaggggcccttagtttgcgaactagataaaaagctgctaatattaagatatattcaattctagaattaattgcagatatattgcattgcatatatacttgatgctctaagctatatacagtacgtacgtatatctaagctatgtacagtatatgtacaaaataaaggcctggcaagctctgcgtacagtgctttgcattgagccatgcatgaatccattttcatgagagctgtatgatcagaatgagtagaaaatcatgcatattgaggttcttaagtactagctatactagcgtgtatctagcgcacacatgcacttcaaaaacatatatgcagcactctctagtataaaagtcacactaattgttgctacaaattaaggcccctaattttattactctaaacaaattactgaactctgaacaaactaatcagagaaggtacaataaatctaatcagcaggctccaaaatattccaactcagattattctcacgtggaagagagataactggagagagggaacaaagcgggcgctagatgtagcgccgagcgatacacagatacgcatgcatttgtgggtcccgcaaccaccccgccgatcccgtgtatcgttttgtttctgttgtgcctcttccgatccgcccgatgcattttgctccgcttcacgccgcctccgctcacccctgtctcgccggaattttctcccgcgacgtgaaactccgccgtgaaagctccagtgcgcccaaaaagttagtaatcccagttctcagcgacaaagaaagcgagaggaggattgagaggcgcttggtgcgggcatgcaactggcacccaaagcaataagcaacttcttgatttgaattggcttggtctaattcttttcttttcttctcccactgtctgttgaatgcttgtcgtctatgtttgttctaccgattcttcgtctcatctgttgcatctagtccgttctaatctcttcctatagctccttttattttcccttttgttcttctccttttttcatgtatagattatgcagttgggcagcagtgggttgtgatatactatgtgaattatcaagtgtgttgttattcgttaatttttcaagtagagtagtagataacccatatttattacataatacaaatggccatataagccacagagttgagggcgtttctgatcatgcacatgtaaagtttattgtttgaataatgagatcatgttgatataatagccaacctattgtactagttagttttggtattggctataaaatgacatggatgttattggagctagtagctggctacactattgaccttgctcttatatagcagaccatttttctgctgctgcaacagctataattcgttgctgactatagcccacatgcctctgagatatcaccagtcgacagtatcattcgcaggcctgtagctttcctacatttgtccctgctggcctcttgcccaggctctgccgtactttgcctttttatcctagaaagtccatagtgcaaacccaacatggctggattaaattttaccaaagcactgaaacccatacacactactgtagtagtatactccttgtcagtcagtctgtagctagtcattcagtatccagaccaaaccaatgctactagcccttctgtgcagatagcttttgcatttgtgtgtcctataaaaaatcgcaagatagccagcctgcttgcaccgaatgattcgagcacttgcatgtgttctttactactagtgccactcgcgagctatatcatttgatgcatgcatgcattgggtgtggatggatatttagaagacggtgttgctgaatctgatgcacggtgcatgcaattgcagtgcaggcacaggttggtgatcatatggacgccatggaatcatgcgtccctcctgggttcaggttccaccccaccgacgaggagctcgtcggctactacctccgcaagaaggtcgcctcccagaagatcgacctcgacgtcatccgcgacatcgatctctaccgcatcgaaccctgggatctccaaggtacaactagagatcgtatgattaatttgagtttcagagatgatcattgtggcattatttatcctaattgtgttgcctggtttgttgattgatgaagaacattgtgggatcgggtacgatgagcaaagcgagtggtacttcttcagctacaaggacaggaagtacccgacggggacgaggacgaacagggcgacaatggcggggttctggaaggcgacggggagggacaaggcggtgcacgacaagagcaggctcatcggcatgaggaagacactcgtcttctataagggcagggcgcctaatggccagaagaccgactggatcatgcacgagtaccgcctcgagaccgacgagaacgcgccgccacaggtatatacatataccgatttcactagctaattggtttcttaattttctctgcatgctagctagctctacataaactagcaaactggttccatgcttgataggctaagttcctaattttaaaaagttgtatatatccggttggatgtataggctgggtttatcaaaaaaaaaagaaaatattttttaaggttgttagtgaccacattgcatacttatatatctgagaaaatatatctgaattatatacttatatatgtgtgttgcaacttgcaactgaagataaaatgcagtataccagcttaggccttattagaggttaaggtctaatggtgcccagagatttctaaagtagcacgcacagagatctgccgccgatatacatgcgtgcaagcatgtctaattcatgtaccactagtaatggaccatatagataggaatatatcagtagcactaagcagcaccacaactctttttgttcttgaaagataagtcttgcattggcctccctttttgtgagccttccaaagtcttctattctctcccaaataaaggtagcctgcatccagtgttgatgccatcctgaccttaccactaacaccaaaaccttttttccctagacaattgcatgcgcatgcatggcctagttagggtttcccctggtgtgaacgtcctaacatgcgccatatattgtttacaagctgtatgcaacttgtgctagtactcatcaaaaccattgcatgctgcttggcaaacatgtcaccacaaaactaaaaaagttatcagctcgtattgttccactatcacacagtgggaagctagctaactttacgaatgattggcaaatactttggtgtcaatgtcaaccttgcaaaatgcagctcacatcccccccgttcgtttcctcttaaaacaatggattaaattttgaatttttgtgctacgcttttcaaactgctaaacggtgtgtttcttgtgaaaactttctatatgaaagttgttctaaaatatcggattaatctatttttcaagtttataataattaaaacttaattaattatacgttattaccacaacgttttacatgaaatatttaatcttaatcttcgggagactcaaacaccacctaagtatctaactttatttgcatgtgtgtactacaggaagaaggatgggtggtgtgccgagcattcaagaagaggacggcgtatccggcgaggagcatggtggagacgtgggactactccttgcacgagcgcaacatcatgagcgccgcggcggcggcggcgttcgccgatccgagcgcggcgtacgcgcagatgaggcggcagcacaggagcgggcggttcaagcaggaggcggagctggacggcgccgccacagccctcctccactactccagccacctcgccgagctgccgcagctcgagagcccctccgcggctgcggcgccgctccagcccaacccgagccagctggccaccgccggcgaggacgacgactgcaagggcgataatggcggtaggagggccaagaaagcccgcgccgccggcgacaaggtggcgacgaccacggactggagagcgctcgacaagttcgtcgcgtcgcagcttagccccggggagtgtggcagcatggaggcaacggcggaagccgcggcggcggcagtcgccggtgtgagctcgccgctggaccacggcgatgacgacatggcagcattgctgtttctcaacagcgacgagagagacgaggtcgacaggtggacggggttgctcggctccggcgccggcgcgagcggcgtcgacggcgacctcggaatctgtgtgtttgacaaatgagggacaaagcattcacagcacgatgtgttcatcacatcaaccggatgggatatatggttatagctgaaatttttataaattgttctctttttttttcttctgcttctttttatgttcccaaatgtgattgtaacctttaatcgatctgtcccctgtgcagagtcataagatgcatggcattgcaatgtgctttttttttcccagttgatgtgatcctacattggcactttgtaaatgtctttgactcccagctgggtggcatatatagtacactgtactctctacagtaattaatgacataatatttgaagtcagcataacttgctagaaacgactaaagcaagaggtgcgcgtgcagaacaaaatgctactctgactcagcacactagctagtaactcgttgaacttgtacaaatattatcaagaaaaaactctaggaaatttagattgtgatcactagtcaagagggctgtgcgattgatcaggctatatacataatcatagattccaaaacaaagttgtattatatatatagattcttatagcactgctggagaaaggggcatcactcccggttggtaaccctctaaagtcctggttttgcaactggaccacgaattcaagactaaagatgttaaaataaccaagagtaaagattgatctttattcccggttaccaactggaacaaaagagggtagcgccaggctctctaatccctattctcctctttttttttttctttttcattgttctttgcatattgattttacaccaaaatcacatagatcaacatcacaaaatcgaacattgacatcacaaattcacacatacatcacaaatccaccacaaatccagacatacatcacaaatccaccacaaatccacacatacatcataaatccacgtatcaattcgatatacaaatttactaacacaatacactacaatttactaaaatatttttatatatatttttttaaaaaagacgagtgatcaaagttttgaagataaatagtcctattgacagttactaaaaggggaggtgaatggagtacgtgttatggctttatgcaaatttggcgtgtttgatagaagagaatatttgtgactacctgagaatacagatgtgatttgcatagaatagtgacaggctctaggtagtagatctgaagcaaaatattcgctaaatcaatatactcctatgttgttattagtgcggtctcactcaatcaccacaaatccctagaccttaattcagtcttgttcccagttgttgccaaacgacgaagccgtaagtagggatgccagtagttagtcccgttacccgtataaaaacccgtttactagttcatttcttacacgatagtataaaatttagaagaaaaaataaactagaagagagatatataagcgggcttaaaaaaaacccgcttgcatccctaccgtaagattattatatacgacaacagatgatcttccaaataggaggcctattctctcgtgataggtagaagggatcaacaactaattaattataccgtagtgcgtgcttactacccattaatcaattattataccgggataatgaactcagtctaaaatctctgttcatgttggtctaatatatattatcactaactagtctgatcaaaataatgcagaaattcctattctaaaaaaaaactgcagaaatcaaggattcaagggtgtacctgctgaattgctccggttgatcggatcagcttctgaaaatccacccacggatcgtaactcgccgctcgccacacgcccaaaccagtacaactagggcggcggtgcgcgccaacgccaatcgatcggccggtggtggcggtgacgcccggtgccggcgccggccctcatggaaacgagaggattggtgcgaccgccggagtgcgctccgatggccgattggccgcggcggcggcggcggcaccgcgagtcggcgagacgacgcctgatcaggccgccgcttctcttccccaatccctctacctcccggtcttgtactgtacatcatttaggcccagcaaagcccacgtagtccgttttttatgtgggcctcatcagtccttcctcgcaactaaggcccatttagcgaaacccaggctcgttggcccagttctcccctccgtcttcagttttctccaccatgagaggactgctacagagttgtggagtggatctccgcctccggtgagctccagctccgatggcacgcggaggcggctacgggtgggcgctcgcggcgggcctcaacgccgcgctcgccgccatctccgccaagttcttcgcgcctccggtactctactagctctctctctacctccctccgatctgaacattctgttttctgttcataccttgcttggaaggctgccgctgtaaccttaataggccgcttcagcctttgttcgggtttaatttgttcatgctggttcgattaaatgattttaccaagttcatgggcatgaaacagtcacttacttggatccgaagttgcggattcatcagataattcgaggttagatgtgtgatcccttcagctaatgacttagtgctagaagtataactgggataatgtggaaattgctgatcaaaagttaactatcatgtgtggttcaattagtttaggatcagattgtgaaaatacctcaaatcaaatgataccggtttaacctgtactccggattagttcctcctaccagtgtacttgtagtctagtgctgcctgctattttgttacttgagacttgactttattattgccttctacagcttctgaaatacagcatggtgatacttttcaatgtgacaatgtggggctgctatgtgaacagcctcaaagcactgtcatccctccaagcaaccgtcaccaattttgctgccaacttcatttcatcaggtcttgcagggtactttctgttcgaggagccactgccttctaaggtaatatgagaattctcccttctgtgtagtgcgtgcacatcaagctagttattcatgcagatcaaatagctaaaaattttcaaatttatttgtgttagcttatgtcctctgttagattgggctttttcttccctttcaaacatgggaagagtatcctaggttgatctgtcacattgcttcttagtagtatgagtaggtttatttattataaataggattaaatctagttattaagctaggccactttatctggattcatattactcgcttgaaaagtcacatagcatacaaagattatcttataatttactgttgtatgaaaaaattcttgagagatgcatgcagttggttgataggaaagaaaacacactggatctttaggttgttatgctaaaatagatgccgtttttcagatagagaaatagatggtcttgtgctttatatcatgagcaatgacttgcccccttgtataccagttaaatacaagccaaaccctgtcataaatacaacaataataacatatcacttgcctactatatctgtacagctgaatttatgtacagtctgtaaaatataataataataaaaaaagacatttggagggagagatgtccctccaaacagtttcaagaagaaatgtgagcgtgttggggattgaacacgggacctcagggttgaaaccacacaccctttgccactgcattatcaggtgtatctcagactgtagaatactgatacatcactttccccacttttgagtttacatgtatacaaaattgtaactgaactgcactcagcttttgaatttgatgtatgttcatacagtggtttgtaggtgctagtcttatcattgttggtgtttttatcctaagcaaatcaagcatcgagaagaaactgaactctgactagagtaagttttaaggccaaaattttattagctacgacacacattgtcagtttgtacttctataagcttgtggtatgtttgaccataacttgactcttttgtaaaaacttgtgtcaattatgttttgcaactttagttcatatttttgtaattagtaaataacttgagctcatctattgagacatcaatacaagattgttttaaaagtgaatgcatgatctaagaattgctttttatattgactttaagatgacaacaatcaggaagtggaagcgccatatctgaaaggagtatctcttttctcattagcagtatagtcacagcagaaattcttccctctaatattttcataatttcattgcccgagctctgactttgattttttttacggcaagaggagattttcagctgttcctgaagcactgtagatcatgatcctctgaaatgcagtgtgagtgaaaaaagataaggttctttccactgttcatgaagcacagcagataatgttcctctgaaatgacaatcctatgtcggatgctccatcaacattagcttcccatctgctgacccctccaagggacagcataatttgcttttgatacccgcggtatagtttcatcagtgtttaactgtcccttcgtttctaagagaaccttcttagtacgccagtctggactgttaactgatactactaccttgtttggtgatactgatacctgaacggctgaacctgtgttatcacttgtcaggaccttacagtttgctctgtcctgctagcgagcaacgcaatcagtaattcagtatatcgaaggagatcgtgcgtggtcgtgctatcagccgatcaagtgatgaaaacttgaatctatagggattgaattgtcatcctcatcagtaaaaaatatttgcattccaaacatgtctgaggcttttcttgaaataaaaaaaagaatcattgcagttgcctgttgcagcatccggaaagaaagaaagaaagaggagcacatgcacatgccatgcgtcccatttgagcatcttttattggggtagggtgggttcctcctgaatggatgcaatctgcatggcaagtaaaccatttctgttgactagtacaaactcctgctgaaaaatattcttcagacaaacggagtaggaccatccgagacgatcgatcgatgaatcgatggactttatgggtgtagtacgctgggcagagacaagagtttggctatcttgattctgaggatgagtcgaccaagggaccctttgcagggtcaggtttgttttttgtcccactctctggaagactggagtagtacactacttgaagcatcccatagctgggggatagtgacaattacagagtcgttctacattgtgtattcgcttatctaatttgctgatcctgaagaaacgggcagtctatcctagatggaaatggaagaacaacgatctgaaatgggaatagtaaacccgaaattatggaaattaggagtaacacaggattgattggaaacgtttcattcagaaatttttatacgttccaaacgagacactgcgtgttgcttcgactacacgttgtgcgtccggcacgatacgacaaactttccagctgaagctggatgtatgcgagcagtgcaacggccggccgggaaacgaacacctcttgaatccctctcacagaagcgaacaagccagcttcgtggccagtaagtaccaagccacagctcaccgcggaatcgaccggggtgagctgagctggatgcagattgcgcccggagtaaccgagctggggacggggttaaagtgaggacatgattagtctgttgaaaaaaaactttaggaataccaaattttggtttattgatacatggtaaaaaaaaagtgtaccagagatcttatttgctctgaattttggaaatctcaagagtaaatactcagaatctactaaactcctatttggtaaggttcatatatgtttagaagatagtatatttgatttattacgcaaccgaaatatggtatattgtttttcctaacgagaaaccaatgaagcccttgattttcggggtagaaaatgttgaaattcttactacaagatgtctgatttattaccttacaaaatgcgacagcagtaaattttggtgatctttaatttttttttgtggcaagaaacccatcaaagcccctttgatcctggcgtggaaagcgataagcggtggtgtcgcgtcgcgtctgcagtagaaatggaagcctgggggctgtggctgtggcgtgggccaaagcagcagccatcaccagataaccccgcccgcatgcccccgcctcaggcccccctccccaacgtagtatattcacctcgccgcacggcagcggcagcagcagcgtgccacgagacgaccaccagctagctcgcaatggcgcagcacgagaggaagccagtcggcgaggcggtggacgtggaggcgggaggaggaggaggacggcagcgagctgcggcggcggcgggggagagaatgaggttgacgtggtcgtgcctcgccgtggcgccgggcgtggcggcgacgggggtggcgggcgcggccgtgctggtgtggtgggcggtggcgttccacccggcgcatgagcagctgtggatggtgcccgtctgcctcgtcctcctcggcccccgctcgtcgcctggctcttcctcttcgcctccggtgcgtgccgccgcctcggcggcctccgcgccgtccaggatctggtcccgccgcccttcgctgccgagagatgactgggttgtcttcgatctgtcgtccgtccgtcgagtgtacattttcttagtcttattattcttcttcggtgttctttcttatcgtcgtttttcctaagatgatcggaatgtgatcagaatgggatccaaattctaaagaaaagttcttgctagtacaaacctgcagatttcagatgcttcgattgatcttgcagataagtttggcacttaattatattctagtcgatcaagtacgtgggaagaaattctcgttgtcaaggttttttattcagcgagttaacattgacagctccggatcgaattttgagagagagctatgcagctcagcccgacagcgatttgtcatagtcacacaaaaatgatggctcctttactactatcgccgcatagtccacacataggcacgagaaaagaaagtgttgttttctttcctacgcggtcactgccacagcttggaaacacagagtgaccgcagcgactagtacttggcagttggagcacgaaggcctgaatctgatggtggtgccaactcggccaaagtcccaattattcctcacaagtcgcgacttggcaatcgacgtcgccttcaataatgcaaggctgactggcaatgagactgggcatgtagcacgcgcgtcgctcatgtgtgtgtatcacgctaacatttgtctcggggctctggcagattatgggtggagatttggacggaagctagctagtaatatatatgttggtctgttccagttacgttgcaaactgcgataatggcgaacggatcgatgggcacaaagccacatatgcatggggcatggacttaactagatagtgcggtttggtggcgtctacacgttttagaattcgcatctcattctcggtgaataaaaacctagtcaaaagttgaggctctcccatctgcaagactgcaaccgaacagacgctgaagaatctatcttaggatcgagctcgtcgtgttcactgttcaggcggccgaagctttgcgcctggttgatggggacgggagtatctatagtggaccagtacttcactgtactattactactactactactactgctccagtacaaatactgatgatgtgtgttcgcatcacattattctggctaagctttcttcctcctctttcttgggacgaggacagcggcggcagcgtacgcagcgggccagattctacacgaattctgcacgctagttgcatgcaaaagccgccttgcgagttgcgagttccgacgtacggttacctctgggcaccaaacgggaaaccggccaagccgttgctgtgtttcgagttccgacgacgacgccgctgcggcagcggtgcactcacactcacgatagctgtggcaattcagctcgattatatcacgggcgggggcatggcgtgtcctgggacggtgccattcggtggagcgtcaactcggaaagcggccgtccggtgacacggccgacctggcctggcctctcccttcggcttcacttccctagcttgagacttcccaaagagcacccacaatagtaaagtaacgtgctatctataaaatatatacatatcagtaatagactagattaatagtaaaccactttaattgtatgtctatatgggtatctatagctctctaatccattgtctcgtttttctctatagactatctccagattagtagatatctttgctctctctctccatttaatctctttcaagtaggaaaatatgctgacatgtatcttttatagaaaatctatagataattattgcgggtgcccttattgtaccacatgttgatggagacattcggggtagttgaccacgtcggggcgatgaatcatgcgcgcatgtatcgtatggtctggagacgacgatccttttcttctcatgggctgggcttctttcactcgtcgacagagagcatcatgggccagcccaccgttgtttttgtaaggcgagagcgagagagagagagagagagagagagagagagagagagtccggtttcagggcctgtttgtcaactgggcctgaaagaattgggccaggtttctcgccagattatgggctcccaaacagagggttttgggtttatgacatttcttctgctgctaacctgccacgttgggagctgaatatctacgaactacgtcaaaatgtataaaatcgcggttttaatttttcttttcagaaatctcttagcatagccttcttaaaatagaaaactaagcattttctatctagcacgattctactttcttctaactcgcggttaggagtgtttctgcgacaaccatcaagtataactcgacaaaaatcaccggccatggagctcatcgaagtacgtatcctcctggaatcgaaatcccacaagctgacaacgcaaacaaagtcgcacgtggaactctcactccagaacaacagtgctgtccccgtcacaataatctcgccgtctacttccaaagtcacgaaagctgctgcagtatcaaccactaacacaagagttgcaatcacaattctctccaaatgtaatgtgacggttacgatttcaaatcagcaatcacacacaggtcgatcggtcacgccccctgtcgtggtaatgccttgatggcggcgaggaaaaagatttgagagaatgtggtgtgcagtgcaggcagcgacgacgaacgggacatggcacgaggcgctagtggtggtgtggtgcccccgcgtgacgccgcaggataaggctctcggccccatcgcggcatcaatcatgcattcacgctgctactggcctactgctattgctattgctattgctagccgcttgctgattcgtggcgcaccgcttccgaccgcgaccacatcaggcaaggttaattgcgtgcatgattgctggaaaaacaacacagcaaacggcatacagtagcaagatcacacacgttcgtttttgtcgtcgtcgcggtcgcggtgaattgttcagaggagagccagagtttgttcaggggaggacgtgtggagcacggatggatcagcgcgtcgttttcaacggaggaatgattgagagtacggcaccgtacgggtgctccttcgaggaaggtgcaaagcacgcatgttcagggttactactagctcgttgcctgtcgctgtggccacggtggtggacgacggcgagattttccctactccagcgtaaagaaaaccgaaaggagcgatctccaagtggcaacacgtaaaatctcgccccacatttggatttatccatccgaggaggagccacggttaaatgccgcgttcgcgcgtgctcgttacgtacgcgtgttgctttcgagtttgattaatcgttttttttgccggggtggtggtgggattgggatagagttcgggccactgcctgtgaaaactgtgaatcgcgtcgcgttgcacacggccaaaacgatagcgcgcgcacgcacgcacgcatccgtgccgcacgccgcgcgccgcctacgtctcgtcccacgcggttcccgaccggaccccacaccacacctgccaccaacgcatctccgccttatttgaggcgcgcgcacggggcgcccaagccatccagcctgcgtgcgacctaccaacgcgcgcactcctcgatcccatcatcggaaggcggcgaggcgcgcggtggaggattgatctgcgggagggattgatggcggaggcggaggcggaggcggcgggggcgggggcgggggcggggccggcgaggaggacgacgagggtggggcgctacgagctcggcaagacgatcggggaggggagcttcgccaaggtcaaggtcgcccgcgacacgcgcaccggcgacaccctcgccatcaaggtgctcgaccgcaaccatgtgcttcgccacaagatggtcgagcaggtccgccgccttaatcatcctcaaaattgaatatttatctctttttttagacatcaggtaataacaagttggatcttttctcggaggggatcgaattaagaatcctaaattattctagatagatgctagattattataaaagatggattttcatggggattaataaacattaaacgagaatatgcgcttactacgtctctaccattgtcaagattctgtctgtttggattgtttgtgattgaagaaaggtcatgtgtccgcctgtccagcgggctaaatctgctctgatctaaaggaaattagatggaattgtatcaagtttgaatcggaaatgtaacaacagattatcaagctgggccatgtaactataacaatatctccgatgcggtgatgccaaccctgtcttaatcaaatgctttctgcctagcaaaaagctgtgctagctttggtgttcgtaggagtggcaagagttgttctagattcatttttttttctcggggagttataaattcagtctgactggggggaaactcgggtattgtacattccgtgctagatcactcattggttgatgcattgtttggtggaaaaactagtattttttttggttaaatatgtgattttccatatgatgtgttggcacaattaaatgtccctgctcgagctgttctgttttccagcttgagctttcgattgtgaatgataacctcatattccacttctatcagatcaaacgggagatttccacaatgaagctaataaaacatccaaatgtggtccagttgcatgaggtactttgctatctttgcaggaacaatagcgtcattaccactcatacccttctttttttttttatctcatctcattcaatgagaattttacattcaatgtgtgtttgacaggtcatggctagcaaatcaaagatatacatggttcttgaatatgttgatggaggcgagctttttgataagattgtaaggcccatgaactttctgtgccagatatcacgattcttatttttgtttatgtacaaattgcttttacatgctgtaagagtagcttgttgaaccggcacatttgactgttttgatactgactgactaatccgcagttcttggaccatacaagttgacccatttatcatcatgttattatcaactaggtcaattctgggagactaggagaagatgaagcaagaagatacttccatcaacttataaatgcagtagattattgccacagcagaggagtgtaccatagagatctgaaggtttgttgaattatcctgcttacctcctttctgggtaatctccactgggatggatgtattctcattcatattttttatgtgccatttgcagccagagaatctgcttcttgattcacatggagctcttaaagtttcagattttggccttagtgcgtttgctccacaaacaaaagtatgatatctagctagtacccagaagtatgtttttgtagttgttaaaaaattaaccagtttctttatcctaatgtgatgtgtttgggttttctagcatttttctggtttaattgacttgttccttaacttgcactattacctcaaatgaacttcggacgcataattatttgttttggtgacaagaaagttgaaagaagtaactttggtaaactattttgattgttttatttaggaggatggacttctgcatactgcttgcggaacaccaaattatgttgcacctgaggtgattcatgttgcctttgattaaactcgtgtattttctccaaaaagatgtaagaatcatatattcatactgttccctcaggtgcttgctgataaaggttatgatggtatggctgctgatgtatggtcctgcggcataatcttatttgtcctcatggctggatatttacctttcgatgaccccaacctaatgaccctttacaaactggtaagtatgtgtaacatgcacgcattctaatgtttcttgtgaatttcattggtaaacttgatagacttttgatgttctcttcacagatctgcaaggcaaaagtttcttgtccacattggttttcttcaggtgcgaagaagttcattaagcgcatacttgatcctaatccctgcacagtaagtgacaattaaggacatatatcttcagctaaccagtttgaccagctgactgctgctagtccaatgagtttcattgtatatcctctttgaagccttttatgatggcaatttgagagaagtcagaaaacaatgagctatattctttgcagagaataacaattgcacaaattttggaagatgattggttcaaaaaggattacaaaccaccactttttgagcaaggtgaagatgtgagccttgatgatgttgatgctgcattcgattgttcagaggtaatgctagctgaacatttatctgtaacctgcatcctttcccaaaaatacgatttgtaacctgagttaaaaccacttctttgtttgttacgtttgtttgtttaacctttcaggagaatctcgtggcagagaagagagaaaagcctgaatccatgaatgcatttgctctaatttcaaggtcacagggattcaaccttggaaatttatttgagaaggaaatgatggtaggttttgatagagtccaatattataattccatgttgagaatatgttatgtgctagatagattggagtgcttctttctggaagcttgtatcggttaatataattttgctaatgttttcctcttttctttatgtgctaagtccgacagaacaattatgttttgatcaatttatcatcctattagttgtactccttagtcgtttactaaatagtctgagtctacctaatatatatagggaatggtgaagcgggaaacttccttcacatctcaatgtacaccacaggagatcatgtctaaaatagaggaagcttgtggacctcttggtttcaatgtgcggaaacaaaattataaggtttgtagcattttagacggctatgtattgactagtttgctttatgtgggtttctgttagtttccttgagaatttgcatcagtatgttcgccattcagaagtaacttggatttgttcttttttgttgggctccagatgaagttaaaaggtgataagactggaagaaaaggctatttatctgtagcaacggaggtattggaaattaaattgacatgtatcctgttaagtctgtgcaatgcttcagtaaattttgctttaataaaagaacttattcacatgctatctcacaggttttcgaggttgctccatcactccacatggttgagcttcgtaaaactggaggggacacgctggagtttcacaatgtatgttatcaaactttgtatattctatcatttcatagtgggtcattgaaaaaaaaaatcatttcatagtacccagcatctagttgtttcttgatgatttcagaacgattaacgtcatttctatcaaattgcatgcagttctacaacaatttctcgtcagagttaaaagacatagtgtggaaatctgaatctgacgcaaaagcagcaaagaagaggtgatctttagtattccaactatccaatgctcctggatgtagttccccctttgtagcgtttgcaccatttctccaggtgataccaaaggatatcgtcctcctggtcttgtgcacattgatgaattttctgtggggtcacatcttgttgtgccaatccttgcaaaagggagcgcttttttttttctttttacccttagcgcaactgtagacatgctcacatgcatgtataaggccctcccggagatgcaccttgtatttgcagttgggatgtcaaataggtgtcctacatgctttggtgaccagtagggttgtgtgccttttcttttagtgctgaaaagtatataataagatcaaaatgtgaaattgggaggctatgtaacactaagctgtgctctgttcttgagaaacctagcagcagaatggcagtgtaactttgttagttctttcttttgtgaaactgtaatggcttcacacctgagctatgggtgtatgtattcaatcatgatgcaatctgattggccggataaaagaaagaatagtaatcacctttgcatgctatttattatgaaccatcacatcctcttgggccggatcggtaccaatgcgattctagtcgggtttggtctcaccagcccatgagttaatacggcccggatggaggagagagtttgatttgatctgctcgcggctctccctgccacgccgccggtcgccggagctccgtcagccgtccaccggcgttgctgcacggaagctacaggcgatcgccctggagttagctgcactacctgtgtttccttgttctccaactcattagcagatgggaactgaagcatcaaaatttaatttctatttgcaatcttttcagttcatttgtttaatacagtagttcatcgtgtgataagttgtcttttatcagctgctaattgtatttcagttgtattacgaggctgatccatttgatacggcttttgcttgagtgcgatgatagcaaccgcaaagctcaaatacaggcgccgatggttacaagatttaaaccagaaaacagtggctgcttttgtttgctgttgcgatcattcatccgacttcttttttccttttgcagggagtacaaaaatgcagagtcatatgacatagactcgtgctggagaaaacaaagatgggtgtgtttagttcacgcctagttcacgccgaaattagaagtttggttgaaattgagacgatgtgacggaaaagttagaagtttatgtgtgtaggaaaatttcgatgtaatggaaaagttggaagtttgaaaaaatattttggaactaaacacggcgataaatttacttatctgtcaatgtctgctcctatacggacgatggtttctaggatatcatgaggtaactgtccatgtagttttgtccaagaaaattctgtcgccgagtggagcgatttcattttcaccctctgcgacaacgaaagaggcgggtcaggtgaggctggatgataaaaaccgcagcaggcagccaggtaaattttcaatggcattatttctgattttcttccatcgccatcttcaccgaccacagcacacacgtagcttcatttccgtattttctgctctaatatatttgcgagttgatgatcggaagctgaacatgacctcacaaaatcactatttttaatcatcacatgatcacatctgcatcaatctataattaacaacaattgtttcgtgatatatctggagtacgaaggctctgtttcatcgaaaacgaaaaagatgcgtcgcctttggctgaacggttgagctcctttctctagtccttcagcgttggaagaggtagctgccaatgctgtcgtcaggggtgacgagaaagtcaggatcatccgactcacccaaaccgcaaaaattgacaagcgattcactccccgtttgtttgattattataggatgcaaaatggatctgcaaatgcaaatgggaattgggacatcacaaccacagctgctgccaatattcttctgctagttttttcgtcatgttggaaatgaaaatctacccaccttttgaagccccggtgattctgccgtctttctttgcctcctcagtcctcagtgctagtataatctatggtcatggtgtgcggtatttttaatgagaaaatgcatacgcagatcaaacttttggttgagacttaaaccttttcctaactatggattgttgtgatcctaaaaccagtgcgcaataaagaactcgccgactaatcttcagtttatttatagttgaaaaagtttgtggagatacatacactagaaaattgaaaggacactaaaattttcaggcttacgagtggctgtttcttcctaaacg

SEQ ID NO: 23345 - DNA, 580 bp, Oryza sativa
cctgcagcccagctctacatttatcatgaatttgaactattatgttcaactgcaggtggagacttttgcgcaattcggtgtggtgtttcttctattcgctcttggccttgagttttcactgacaaaggtaatcgtgaattcattgccatatcttttatctaatgttttctcttttctcaaatatgattatgaaactatataatgtgtcaaaggtttactgacttgtctttcattcatcagttgaaagcggttggacctgtcgctgtaattggtggtctactgcagattgttctgttcatgttcttgtgtggcctaactgctgcggtattaatatttatttattgtccgttgatttttttcgttgtgtttgcttcatcatattctctcttttattagaaaattacttatccaccttattgcaatttttccagttgtgtggtgctaaatcatcggagggagtatttgttggtgctttcttgtcaatgtcatctactgcagtggtaattaatctgttcaagatgactatcattcaacattcatacttagacaatttactactaccttttgggatgaatatgtg

SEQ ID NO: 23346 - DNA, 8792 bp, Oryza sativa
ctcctccatgcttagcctatgcggtgaataaaacatttcgtaacaatctgtggagtcaatctggtcatagttttttttatgattgatttcatgggtgttttgcccctatgttagcacttattctcttatgtgcataagttgctttgtgcattgcaaattggctgttcattttaagtaatttgtcgatgaataatgtaatgcatcctccaaggtgtcgctcctaactgtgttgacatacaggcttcctgatccagctgcaagaaaatttctctgtttcgaggattcaataggcttgcagacggagcaccagaagccagattctactagcactggtgcaaaacagaacagctcaagtgatgataactcaagctcaacagatggcccacccgtcctaactattttggctggtatcattgtgttccttctagtcttgtgggttatcggatcgctcttcacctggattgctggtttggtctttggcgctgcaaaatcttagaagttcaaattttaggataattctgcacctttttagttgtacatacttcggtccaattgtatgccaatcttggataaattgcacttgatggtttcattcttaagtgttgaacaactgcttcatggtgttgtaccattgtttccagctgtgccttgggtattgccttttcatatgtcatttcgaggtggaaacagtggtttggttctgttcttttgtatgaatccctgagagtggaatttatagtaaaaaatttaacatacgggtctcctgaaaatgcaggcttgtgtgtttcattcatcagtctctgataaacattcgcattccccctaacagtgtacacgcacctaatcgaactgaaactccatacaagttgccttttgagcttgttgtatcagtgcattgtgatcttataatgctttgctatggacagtacaatcataccgttctctgactgctgaataggagtatatgccatgccatgatgtcttggcattcagttcagtctgctcccctcccaggcatcagtgcgactgtgaacgtgtgatgagtggtgactgttgaggttgaggccccccctgtatcatcatgcctgtcatgctatgacctcatatgaaggtgaactcaactcctgcaacgcaatcccggtgtagtaccaaactgcttttcgttaatgctcatatcagtacagcattactacgccattgctacggtcatcatcaatcaccatggatctgaatcctaacggcctgaaatcctgaatccacatcattctatagtccctgtcagatttcctgcccgttcttgctcacgggagaaaataaatccccccccccccccccccaccaccacagcaccactactacgaccgacacgagccacagagtcagaaaggcgtctccctcccgggaccagcctgcgccgcaccagatcagcgaccgaccgcgccagcgtcgcgcgcgcgcgcggcacgtgagatcctcacccgcgctccccaacggctatattccccatcaacctcctcttcttcttcgcctcgtctcgtcttccccttaaatcccgcgcttaaatccccctcgcctcccccatctcccgctcctcccattcaccaacggattcactgtgtcaaacctccgatctctgcaatggcagcaacggcgcagggcggcggcggggcggtgtccgtgcagcacgtggcgagggcgtcgtcggacgagctcctgcgcaagttcgccgacccggacgcgcacgccaagcagatcacgccgccgcggcgcagcctcgcgctgcggcggaagcggtcgtccaggagggtggcgtcggggctctccgcgagggatttggagtcgggggcggagctcgcggcgcccaagcggaggcggagcatcggcgggtccaccgagtggaaggccgggctgctgctgccgacgaccaccacggcctccgcccgcaagggatccgccgcgagccactcccaccggggcggggccgcgcgcctcgatgacgccgccgggatcggcctcctcctcgccgcgttggagcgggtaagctaagctctcaactctccaatgcctcgtttccaactctccaatgctgaattggtttcactctgcgcgatgctcagacatggaggaagacggtggcgggggcgtcgaagatgttcgtggagaggcaccgcaccaaccacgtgctgctcatcagcgacatggtctgagctctgaactctaaactgaagcctctgccatgacaggtggccgagctgtgactgattcttctctcgtcatcgagctctcctgctcgggttggttaattggtttccttcgaattgaattcgtttatgactgatcgattctacagtttagctagaataaaatggcagaaaagaacaacacaaaattgaactagctgtgtagttcaggtagagtaggttctttgactcctgcctctgtgtttgcttttattcactcgttgtttctttatactcggttgaatcatcgtctcggcgaccacgttgtaaattcaagtttgcaatatcaataccagtgctgttcttctcagagaaaattcagatattgtgttattgtgtgtttaggcaattaggcctttggttttttagtggattataggcctccatattgactgggctaaagacctgaatactgatgggccttgtgggtggctttcgctacacacaatctgaattcctgaatgaggtagaagaacttaaaaattccaagatccaaactttccacagatgcagttcaatggtttatactccacttggctttagattatgcaccatataaaggtttctttactagtatcagtccatgtctacccagaagcctaccttgttttctctagtagctccacatacgctttcaccacctgattaaacattactacctccgaattaaaggtacatcagatatgatcaaatgatcaatcattgatcctttcttttcttatcttctccttttcatttctgatatctcctctgcactcagcaaacccccttcgctaagaaaacaaagctgaagacgatttagtctcaagtccaccttttctaagtctctgaatatggtgtgggggtctctctttgcactgaacctgatttctcaattcttagttagcacttgggcaggctcagtcaggtgacccgttccttggcaagatcgtgacacatctgattgaagaatctgaatcgcctaaagaaaaagtaacgctatagtactgatagcatcatcatcactgaattaattactggtagcatcaccatgtctgtcctcattctaccagtctacgatacgaacaacgaacaactattaaaccacttgtcaagttggaaacttggaatgaagtgtactgctctgaaaattacaattggctcactctgctgattccaccgaggcgtgaaggttaatccagacacaaagcaggaagcagccatttcgtcaggtttgagtgtttgaccaatagaaggcagatacttgtgccgcctcatggacgtccgggacacgggacaccgaattacttgggtctctgatgctgtgatgcagcacactcgccggctgttcgtagtaggatcagacaggtgactgaagaagatgagctgcttttttcgtagctttcaagccgagctaatctgttcccccatcctgccaccggaaatggcagcagattggtggggaggccctttccgtagtagagggtccgacgcgcatcgcagccgtcgcctcctcctcctccatcctcatctcttatcttttagcaaaggaagacgccactttggaaggaaaagaaggaaaagctgcaccggtggagtcaaccagaactatctatccgtggtgcttttctcctttgtgaagggtgaatttgttcgtgtgctactgtgtctgggttaagattttattctaatgtgatcctgtagagtattttcaagataagaggacattttggaacttgcataatcatgaatcaataaatggctcgaattgtcagtaagaaaagagaattaattttcaaaatggtagaactagattgacgaaattttctacaagtaactcgttaaccgggctagtgtaaacaagtttaggtgcatgtgttgcattgctggtagtaaaggtattaacatgtttcagtgtatgacacttcatttttgtaagtggtggtgattgtgaatatagggtagatgttgtcagggaaacagaagatcatctcaaccatattcaaatgctttttagcttttggtcaatcagccattccactacccttcgcatatgatggttagtttgtagccatgtgtatagtactgaaaaaaaagtcacattcagcatctgattttgtaggacaaaatggtaggccatacataccgaacccccgcagcacagtgaccaggatgtctctcttgaccaaaatttctttggcatttttctatagaaaatgataaagagcgagtacatatgcgataaacaaagtgcacggccttgtagaacaacgaacctgagctgttcattcgtgcagactactttccccccttttttaccttctgaactgatatttacagatgctgtaaattatggtatctgttctgaacttttgatagcagcatgttagtactaacttcgtattaccgtaaaaaaaaggatagtagggtttttttttaagtatgtgagcgatgcggctctgaattctgaaacgctctcggctaaagaggaacagatcccattccacaacggaagatggggagcaggaatggactcgagatgcgctgctgaaacatacagcatatttattctatatttgtctgcacaaggatggaatacggaggaacaagatgcacattcttcggccggctgaagtgacctgactgcgaacctaccggtggttgatctcagaagaaatgtcagcgtgagattatagccaaaattctttgaagcatcacaagacaggaagatcttggggtccattacatctttgcgataaggtttgcccaaaaaatagaggaggggtttgcctcttaacatcagatccatgatctgaagagagaccattccaagaaacgttcagtagctgggcctgatcatctatgtctggtgagacactgatgcagcagggcaagaaaaaaatcctggtgcgatttctgcagagcgggtcgccgtctggcaattatatcggcacctttctcggcagctcgttcgccaacgacacttgcgcgtaatgaagtgtgcagagacttcgtttcgtcatttgctccccctcggacggttggacaccaagcattcgccatttcactttcggttggtgtcgtcttcaccgatcgatcgattatttctctgtctctctctcgagaagacacggtaggctgcacacggcacctaacacaggcaatcgatcgccctagctttgctatcctatactgcaagaactaggacgacacttgcaaagttgcttcttcctctttgtttttttttctctctcaaagttgcaaacggaagaagaaaatgagaagactggtgcaggacaccgtaccgtaactgcaggctgatccgtataaatatagttacatgcacactccagccgtttcaaaataaataaggcccctttgattcaaaggaaaatcatagaaattttagaggattttatttctatagaaattttttctacaaagccttttgaatcaaaggaatgaatcctatggaatcctatgaaattcctatgtaatgcctctttccatacaagttttggagaaattttaggccccctttgattcaaaggaaattcataggaattttagaggatttcattcctatagtaatttttcctacaaagccctttgaatcaaaggaatgagccctatgaaatcctattgagggcccctttgaatcaaaggaattatataggaatttcataggattcaaatcctataggaaatttccctattttgccctttaattcaaaggattgaagctttccaaatcctatgaaattcctacggaatggcacattgcatgtggattttggaggaaatttagcaagagctccaacctcttggaaaatttcctttaagtctatctctctcatccgattcctgcgttttttctgcgctccaatcaaacgaccattcctgtgtttttcctgtgttttgcaatcctctgttttacacttcaattcctgtcagaatcctgtgtttttcctattcctccgttttttcatccatgtgattcaaaggggccctaattctaatatgtaagtgacataaaaatattcatcctaaataaacatattcatgttcatatgcaaagtaacgtattcatctagattcctatactggaatgtatcatgttctatattagtgttttattttgggaggaaggatgtacctatatatctgcagaacgacagtgcacgtacgtgcgatgcatagacgtacctcagtaggagtacgtactaggagtagattggaaaagaagcgaagcaagacgtggcttgcttggagatgacgcggatctctccgccttttgatgagcgcgcctccgccgccgcaaccgccggactcgcgcacggccgcacccactagtccacgccttcttccacttccgtcttcccagtggcacgtccccgtaataatccccagtttccggcccaactacgtcaaaaacagtttccagcttctcctcttccactgtctctccttcccaaatcctcctccctccctccttcccactcaaaaaaaaaaaaaaaaacccgcatcctctcctcctctccaactccaatccccaccacctcgcgtcacgccgatcacctcctcctccccttccggtggatccccgcggcggtttcgacaagtcccgcgtcgccgtccggtgtggagcgccgtcgcggccggtggcctgtaaggtgcggtgttgttgctggtgagaggttactgggttttgccgcgagcgaggtgcgtagccgctcgcctgcgtttcgcgcgctgggtcttatcactttggaggcttctagaaggttctagccttctccgagttatcgcgccgattgctcgcccattgtccttttgggcgaggaactaatgaaatcctccttttgatcaccttcttacagaaggtttctggagttttctggaaactgcgctgtgatgcccccgcgactgcgagaaagtgtctccaagtttgtgacacaggcgtgattctgcttgtaggctggggttttgcattttggagccgcggtggtctcggcggaaggtaatcgtctccacctctgcttccacctcgttgttctagaaggttctagtagcatagcacttcatgttttgacttgtgtggggacgaacgctgtttaaaagtatcttactgtctcttgtgcggttaggttcctaagctctgcatgttcgtattctgaactttctgaaattttggaaattccaggcatgggctaggcccccagcacggtttccaggtgattgattggtggatagaattgttgcctgagagcagcaaggtagtgctaacatctctgccttctagaagctcctaccactttctagattcgtctcgatactcaacttaccttcagttcgtgtgcgcaggtttgggcgtggtgactggaagcaatcacgatgacgtcattgtcacgaactctatcccggggagggccaatgcagccaccggggcagcggcgcatcctcagaacgcagacagcggtaaacctgggcgagcaaatctttgacagtgaggtggtgccatcatcgcttgttgagatcgcgcccatcctccgtgttgccaatgaggtcgaggcgtccaatccccgggttgcatacctctgtaagctaccccaacctgctcctcccagtgatttcgctgttgtgagattgcacatgaatcaacacctccagctatcttctgcatttccactatacaaagaccatattttggcatactgctaactggactgtcacaatgtcacctagtgtgaaagcttgctaatgttttgttttaaaaatttgaatgcacaaacgaacatctctcttgcctaattgcgccttggtgatggaaatgctttatgctatcattatcttagacttctttcttggataagaattttggggggacccctatctcgacacttccacaatacgtacaaagaagttagctacagaaaaacactggcgtcttggtgatccacttacaaacattgttcactcattgcttattaccataaaaaaagaatactaatcttattctgcttcacaatgtgtttgatcacattaatttgtatgtctgtaataatggataggtcgattctatgcatttgaaaaggctcacaggttagatccaacttcaagtggccggggtgtccggcaattcaagacggctcttttgcaacggcttgaaagggtatgcatttcaagtacttctagctctagtcagttgtttgcatccatttttgttttatcctacaactgtcctgtgatggcgccattgactgcttgcctctgcttatatcctttcctctacctttttcctttacacatagccccttagccagtgctatgtttcaacatttttatgcatgctaataattgcaacatttacatgatcgtgtaaatgaatctttcattgtgctcattaagagttatatcttatatcatcataggaggttagtcttagcttctaaaaaaatatgtagttaattttgtccagaaaatgttgaaagattttaggtgaccacccaatgcctcgtatgaattaaaaacccaaccatgtcacagggatatatatctcaaattctcaatagc

SEQ ID NO: 23347 - DNA, 2496 bp, Oryza sativa
accttaatcatcattcatgttcatatggatattacttatctaccaagtagtagtatttaccaatcagatcatctgttttactatctttagatcttggaagccgctgataaagttaaagagaagacaaagatatatctccctttcaatatactccctcttgatccagacagtggcaatcaagcagtcatgaaatttcctgaggtttcttttatattacgattctattgagttgacttaatgctatcaaagtgaaggactttctgatactttctcactttcaagatccaagctgccgctgttgctcttcgcaatactagaggtcttccatggcccaaaacttatgaacacaaggttaacgaagacctcttggactggctacaatctatgtttggttttcaggaaaggcaatccacactttgtttgaatatttttcgttgcttatttgttcttcataactatgattctgactcttaacctacccattatctggggttttgatgtctcatcgacttcttgacatacagacagacaatgtttccaatcagcgtgagcatctgattttacttcttgctaacgtacacatacgacgaaatccaaagactgatccacaatcaaaggttctgttcttccctgaaaatattcaaaccctgagcctgaacagattaaaaatcttactttctttccttcatatgtttacataaacattttttatcccttttgatattcccttttattttctctgaagcctgagttatcagcaattttcgttgcagttggatgataacgcgctgaatgaagtgatgaaaaagttgtttaagaactacaaaaagtggtgcaaataccttgatcgcaagagtagcctttggtgactacctcagaatctcttcattgttatcttactgttcttttgtacttggttctttcttcttattgcttttgaaaaatatctgtttggactttggagttagtgctttgtgtttcattaccttacctctgcttgatggactgaatgttcataagaagcaaccaaaataatgtagaaagcccacacaaatctctgtgctctgcagttgcaaaaggtaaaacaatttgaaagatattaaaggtgaaggtggaaatttgtaaatataatttaaaaggggtagtgcaatcagtactccataacatccgacaccggttatatatgtaattcctggtctgtgagcctattagttcaaagcatatgttgtcaccctaccaattgaaggcaatatctctcatcttctcctttccttcgcgtcccttgctggtgtcgtaagtctgcacccatgtttacattaaacacacagagtaaggtgagccttagatggaataaacagaagaatttatggccatgataccatagtatttatacaatcagcatggtttgaactttgtagggttgtagttctcataatttgtaacctataaacagacccagaagggtggtagtgggcaaacttttagatggaaagaagcaggcacctaatgcattagtgttaaaaaaaagaagacaaggattgctatatgttgccgaaggccttccattgtggttcaaggttttagaatgaccttgagtatggctggtttggcatcctctcctagttttagggtaccaggagttttaactattataacatgtgttgagggacatatctagtgcaaactaaaactccaaaagcaataggtgtatggaaatctaagggctctcattaaattgaacggtccattgttgcaatctgcctctatcaactggaaaagttactcatagtgagccaagtcatatctatgtcaaatcaaagcaatcaagttttttaacatcaacttccctcgtgtttcaaaatatgtatgtgcaataattataaaaggtgataaatcatctttgaaaagtttcacgcaaaatggaccaaattcccaagttagggaataagtactgttttttcctcatcaaaaaggagaaaaaaaagctgatgccttacattttctgaacacttacagtctctgagcttccattatctttcttaatgacaggttgccaacaattcagcaggaggtgcaacaacgtaaactgctttatatgggtctgtaccttcttatctggggtgaagctgcaaatttgcgatttatgccggaatgcatttgctacatataccatcatgtatggtgtgaataaaaatctttctgcatcttaaattctccttttacttaaatttatatctctaattctttattttagttgccggattcactttatgaatatatttctcttcagtaggccattgattggatcatgtaggataacgactttatttatagcttttgatgatgcatttgctcgttctcttcatctgccttaaggactgccatggagtactgccctgcaacaaccatatatttcatgatgaataaaacaaacaatgaattattttctgtgaatggatgcgcggagtatgccatgaactgatttggttatgtgca

SEQ ID NO: 23348 - DNA, 1711 bp, Oryza sativa
  unsure (1)..(1711): unsure at all n locations
ataacactaacaataatttaagcaatacattatgctgtaaaatttattatacatggggttattagattaatagtcatcaggtattaatgtgtgatttatgtttcaattgtaaaatgttttccgggtaaactctagtaaaaaagatgttgaccatcttcttattgcctaccctgtttcacattttattgataccattgatcatatgaacatctagaaagaatgtggaagtggctacatgttgatgtacggtaacaattatgaacactgcagttacacaaaccctgtatcataagataactcaattatgatgtttatcttctatatgattcactcctttcaactcagctgttgtgacatctcattttgctaaaatcgaattaaaaatttatgttgtttcagtctaagagatcacacaactcataatttacagttactctctccgcccacaaatataaacatttctaggttgtctagcagaggttaaagttgaggagaaaagactttggtgcccctcactaaatgagggatggatgggaatggaagggtcgttaggggtaatatgggaataattttgaacgagaggcgattgatgggacaagtagtactctagacatccttatatttgtggacaaatttcaacgtnntgnaatgctatattgnntgaatagaggaagtatttttctgtaattgttgtttcatgaatgatcaatcttcacaaggtgttaaggacagtagctaaaattgctaattgtatgcctgagcaacatcagtttaagtaaattcctttatgtaaatgaggatgcaatcattcatattgagcaaaatttatactaatctacagttcaactctacgacctgttctatcaagatactatagttgatcctatggagagtctaattttgcaaccatatcaaccaatattcgtggagttcatttattgtgttagtataagtttttttttccttcgaagaatgttttagctcagaatttttcttctactgtgcccacaacaatgtttgtgttggactttgatagcttattgaggtgctgacaactctagcacttacaactctatagatggcatttgaaatgtatggtatgctagttggaaatgtgagtgccttgacgggtgaatatgtgaagccagcctatgggggtgagaaagaagcctttctgaagaaagttgttactccaatttacctcaccattgcaaaggtatatcttgttctcagctatcattccattattcaatatatgttttacactactttgctaaaattagtattttgctatcattcctcaggaagctgaaaggagcaaaagagaaaaaggaaatcattctgagtggagaaactacgatgatctaaatgaatatttctggtattagtttatcttacacctttgtacccctgttgcctatattttacattctttaaattgcaggtctgctgagtgctttcggttaggttggcctatgcgtgcggatgctgatttcttttgtcaacatttaaattcacctgatcaaagaaatgaagtgagcccactttagttattacttcagtatcatgtcttcttttttcgggtgtttgaaacaatagtagtgtaattgcctttttgcagaccacaagaactgaaaagcagaaaggaaaggtcaactttgttgagctacgctccttttggcacatattcaggagtttcgatagaatgtgg

SEQ ID NO: 23349 - DNA, 643 bp, Oryza sativa
cgacgagtcctcctccttccagccttgcctcggagctgcgatgggtcaggaatattgagtacttcatcgttagtctctgtgaactccccagctatgccgaacccataaatctcgccgctccatgtatgatatattacttgcttactgaagtactgtgacacatatactgcatctggtatgccacactccgctgcggcagcaatgacatgggtgcatggcctgtggagcagcttcggctttgcacaagagcaatgacatgtgccgtcggctttgagaacacactcctgcttcactctcttgcggtagatacccctgcctgccttatcttgacatagtatctcaaacctgtgctgttgggtaccttgcactacagctcgatgtttcatggcctttttacgcaactcctctagctttttctgcatgaaagctccaaacaaaatgctgttgttcggcatagagggaagaactgcctggaaccgatccctaaaatacctgcatgtcccatgtaaaatgaactccactatgccaactagtggcagtccacggacaccgcgcatcacccagttgtaaacttctgccaaatttgttgtcataattccatatctagcaccacctgtgtcatacgccttggcccatttctctt

SEQ ID NO: 23350 - DNA, 2499 bp, Oryza sativa
caagggaagccaagtgtgaccgaagatgacctagttggcctaacctacttaaagctcgtcatcaaggaaaccctaagactgcaccccgccgcaccaatgcttgtcccaagggagtgtggggagtcgtgcaaggtgctagggtacgacgtgcccaggggcactaacgtgctcatcaacgcgtgggcgattggcagagaccccaattactgggatgacacggagacgttcaaaccagataggtgtgagaataacaagtataactttagaggcaccgatttcgagtacataccgtttggatctagacgaaagatctgccctggtccggcgttcacacatgccatcttggagctcgcgctcgccgctttgctgtaccactttgactgggagctcccctgcggagttgctccaggggaggtggatatggccgaggagacaggcgtcgtcgttcgcccgaagaacgacctctacctgcgtccggtcgtccgtgtgccgccgggagctgcctcgagcggcaatggtggcacctagccgtgcaccgcatctactacctagccttaattatgtgaaaatgtaacctggttggatcgaatggattaagtgctaaataaaatggtttatgtgttcatgtttgtttgtgttcgtcacatgtcacatgcataagagagagaatcagactatcagagaaggcgaggtccagaagcaggatcaatgttatgcaccttgcaatgtcgatagcaattggcattagtcctaaactgctcagtcatcgtgcaggatattggtgcaggtatcccatagagtcatactctggttctgtaatcaccaggcattcagaaatcaaaaccgtgaaaactaaagacaggcatattcatgctccacataattctccaagaagaaatttggataaaaatattgatataaatttttaaaagtacggaacaatggaaactttcatctgataagcattcttttatcggaataaatatatcagtggatacgtacgatacaatgaacagatcctctcatgctttgtataaattgtattacatgctactacaatacagtgaacaggtcctttcatactttgaattacatgctacaatacatctcaccatactttacatacaatcaatggtctgagagaagggtcaagcactcaagcttcctggtgcacacattaatctacacctcaattgatgcttcaccgttgcttgcctttctccattttgaggatcgttgcttgtttatgatttggacgtaagggtgaatagtctaagtgtctaaccacaccatgagcaataggtcaaccccttgcatcatatgatatcttggtatgattgagtataagactatgagagggaatattgccctcaagatctgttaaaagacatcaggagggaaacgcccaggcatagaattgttctgctgagcttgcttcagatgcactctaagtgcataattatttatctgcaatgttaaatatacttatgtaagaacaatcaaaatcaccgggagtagtgttcgggacaaaagaatcaccaggagtaaggagtagtacctcaagagtttttatctgttcctgatactgcaaaaccagttgtttcaggctatgaacctcctgagtcctctcgtcaaactctttttgacgttcatgttggatagcaaccgccctcttcagaacagcgttctctctcagatatattgccagttgctccttcagcatcacattttcctgcaggaaagcaaagcataactgcttaatttgcctaggagtacaagtactatggatgaaacgtgcatatgctgttggttgcaccttgtgcaaattatgcactgcttcagttcctgctcgctccattatggatttctccaatgcctccagggctcttgaggcacgagcccgcgcatcatctatgtctgatgcactcatcatctctctaacaaatagctcaacccactcagaaccatgatgatttgtctgaaagttttctgtagcatgtgggttttcagtgagcacatccaaatgtccattattaacaacacctgtccaagattgcaagctgacatttagcaggcattttttggagaaatttaattcatgaaagaggcatagttcatgaagacatggcaaacataagttggcaatcaagcttggacatatcctagaaggaaccaaatatagtacatgtgtcatgtcataggccaattgaaaatggaaccacccagcttgataacttgctataggagcatgaagtagaagcatgcacagtaacttcaaataaatactgaggctagagaaccgcatatcacaatggaagttcatccttgacactactcagtactcacaattgtggattgtccattaatgaacacaccacaatcaactaaaacatatcatatttaaacgggatataagaacatggcacttcagtttatcacccactctggtgttacacgctaatggcaggttgcccataaaaatgctacagtacattacaa

SEQ ID NO: 23351 - DNA, 18683 bp, Oryza sativa
ggggggggggttggttggtcggtcagctgcgcagatgagtttattgcgttttggagcggctgctaagcttgtgcgtactgacctttatacccttctctttggccaggtgttctactactcgcttttggatgttggaatgtcaggtcactacgctttacttccttgttccaaaaataaatttattttttatccatttcacgtatatttaatataacaagaaaaaaaaatattcttactttattgaatcacaatataattattcttttttatatgctttcaatacaaactgattacttaaaatgaacttatttttaagagaaatgagaggttaaaaataaacttattatgtaatggagggagtcacttttttctaatcttctgcattttggtttagccgccatttagaaaaattggctctcatgttgaggcctttaaaaaattgaaaattttgaatgaagtaagaaaatgatttacaataggaaaatattttatgtttgtataatttgtgatataaaagttaacactgtaagttagactacgataaaagaaactccaaaatcaactctaaattaagttttaaaattcaaatagctaataagccaataaaccgactatgggtgccggaatatttctccattgctgtatacgaaattctgataaaaaaaaacttttacaaattctcgtgtctcattcctgaagagttgttgcatttcagagtcccgtagattttagttaagaaaaacaaatatttttggactcttgtattaaaaaagatcaaccatagtatggtttggtggcaatgttttattttttttctactcatctccaataatctgttcggtacaattgtatttctacttccaactgtcaagtataatctatataaaatattatcccctaaaaaaagtatactattatttgcacagggggggagttagcttcagatatatactactctactatgaattttccgatcttcacgaacttattcttgatacggatacctgcctatttcagcgcgtcaaaacgggggaataaagtcgacttgtccagcttcaattgcgtggagcgtggctgcaaacgatcctctggatttttgtccgacgttatccattcccgttttagcaggcaacgggtggcttttcactcgattcccgacctcgacaccttatcacctgacgtgtgggccatgcacgcacgccggtgtgctctcctgctttgcaccggccggcgagctgccaactccggcgagttttctgctcgctcgagcccgtctgagcaagcgatcgccggccatggcggcggcggcggcggcctcaacagctgcaaaagatcaacatgaagatggcagagcatccaaacaaagtgattaaatcagtacagtacatgattgaagggaaatgtataaagatataagaccataatgaacattggattacattgaacacaacaaaatcgtattgagcacacactctcgagaggtctgtctccctccatccatgtaattaagttggccttcttgcattttagagctctctcgctctgaaccattctattctttatgtatggttttttttcccgtaatcatggatgtttaaaccatctttgtgtctggtttttgatgtatccacatggttcacttcaaaaaagaacttagcacaaacaaaaggagggagagttattcacagctcaggaatggaacacacacacaaactctgcatcctacaaaacaaaatcggcatttccatcaagtatggaaatagtggttcttggtttggttctttactttcccttttcgttttctttgtgtggtatgcaagctagaaggtgttattgtgtcagcacaccaatctgctgcagagctgacttcatgtcatctgtactgtaaccctcaatgccaatgatatttgagctgtccagggcgacgacatcttgtaacggatatctcctgacagtatggattctgttcgcggggatgttgaactcgcccttcaggatgacggtcctgtggagaccacctagcagttcttcataatccgaatcgccactttcaccaacaaggactgcaacatttggcagctctattccccagcgtatacacaagtacctaaatgaacattaggtttggtcagcacaacgggtaacaagataaaacttcatttctgagcaagtgcaaatggttaggtgcacagcacaatgacacacaagaattacagcaagcatccttctactgtgttgtaaacaatgataatttgttcacatcatcgttcattttagcgaatattaaagctggcatgagtttgaaaaggaatcatattgcacattttgttattatctctgtttgaagcaaaatagtatggaactacagacagttttttacttaaaacttcaaaattcactgtttattgaagttaggcaacacaaaatggaaaaatacttctatggtgagttggtataaatgaaggaaagaaaaatgcaaaagaagatgccaaaccttagtgcctgggaacgtgatgcgtgaatgggaactacagagagtctggtggcactgtggttatacaaggcattgcaacggagtgattggattctcatcaatttcctcaactcctttaaagggggtagctacaatgaaaaaaaccacattaaacattcaaaagggaacgtctaaaaaaacattaaacattaatagcacacatcacacacgataaatctgtgtgtcagtgtgtggttggaaggctcacatgatttggattgaccactctaaatgcaagacaataggttgaagagtgttcagggtcttcaaaaataatttgtctttcgattcttccctttctttctaccactgaagtagcccatttcactagatactttcttaggccttctcctccccatcgatactcaatatgtgcttggtgattttgatctattgcaggagtaacctgggaactgcttggcgtatctcccgaatacaaaggataatagatattacttccactattgcagatgaaagcatcaaaaacagtaggcaacatgcctgcagacactagcagcgagcgtatctctgatattgtaagtgaagttgacagcacaaaaccagttgaaccagacattttttctgtgcgtgtgacttcaatagtgtttctgattatccggactagatcttccttgttaacagagtctacagatataacaatgatatgcttccttcctgatatgggtgccttctgttcctgtttgccaccaatagcaggtgatctcggaccaagtgtcaatatccttgacaagtaattcttgcaatgttcaggccatgagaactggtgaatattttttagcccattctctctacatctcgaccaaagttgtttgtcagaaagaagcttatacagtgcatctgcaatggcattctgatcatgtggatcaacaaggagaccattgttcagcacctgcatgaaacatccacaagaaagtaaagtgatttaccccttcagtgcgttgttgtatttttgacatataacatggtagaacatatacacacctgattaatttctacaggagctccattttttgttgcaataataggcaaaccattcatagcagcctgcatatagatataataaactggttatgatttggagtttaggacactgaaaaagttgaacagctggaaaaggcaagttgagctctcaaagttctgacctctattagggtaacaccaaattgttcaaaataagccacattcacaaaagcaccctgcagaagatcaacagatgatcaacaccaaagtaagtgggaaaggaacataaggtactgatgccttctgcctattataccataagaaaaaaaaagatacttcagttttaaaaatcaagaaaacaatctttgtttcagcaaaaacattgcttaaaaaaattgcaacatggggttcttctgcaaagcgacgtaggagaaaaaaagaagaaacaagagcccaccccatttcacaatatctgtccattcaaagttgcgccacagaccaaggagggactaaatctatttaaaaaaagctaatgtaaaatgaccatatgtacccccttttaaatgctatctacagccaattatccacttttttactgaatcaaatagagctggagtgtggaaatcttgcaatctcaatttcttcaatgggcaaggcacacattgtggtaaaaggtggaatggagggagtacattgaatggtagatttcaaccaagaacacttacagaacataaaagcagcataaaaaaactaaaacatagaaaagtttctttgctttatttcaggaatagcatacctttgtcctggcagctaaacgataaatgtctggaacttcagagtgcttatgatgcttgggataagccacttgaccatacaagtcatattcatcaatcaatgtaagcactgaggtcaagacagcagcactcatgttgttcatcttagaaatggcctcacggttacccattatcagtgtctgcaatgcataataaaattagcacctaatagtctaggaaatatatatcattttgtacactatacaatatgattatgacattacagagaaccaaaccacagaacatcgagatggtttaagtccaatcttaccagatttgctagctcccttagagggcgacattcaccaaatgcctttacaagtgatgtaatattcttttcaggatatggacgagcaacagccagaatcataggcttcctaggatttgtaaagaagcgcattatctgtcatcagttgcacatgtacagattatcagtgatcaaactcaggtacaggtttaacaggcagaacaaactatcctcaataagacaagaaatactgaataaaggttatactagtaactgagatctctgtaggattctaaaggaagtgcagtgacctgagaccaaatgggtgggtcctcagaggctggacatggattttcttcttcaccatccatttcaaaatcgtgaatgatatgaccaaattcaacaccaggaggtattatctgaaaaatcaggaataggaaagcaataaacattaggggttattgacgatgcttgcaactacagctaggcagctggtgctaatgccaaaagccctaaggtgtaacatatactttcccaataatttagaaattgttgtgcaaggggaggaaaatgtgtatactcacaaccatacgaggcatataacggccatagcagttagcaccacgcttaactcttgcccgaagcttccttgcaagtataacctcaaaaccatcatacaagttccactgctcttctatctcctgtctagtgctagcaataacaatttcagatgcatcaagagataattcctctgcctcaattcggcacattattttgtatgtcatatttatttgttcccttgaatgtcgcccttgcttgagaagcccttccaatttgtccttaccaagaaaatggcctgtaaatgccataggaatattaagagacccagacaacagagcagcagctattcctgcactggcatagtgtccatgaatcacagcaggccatactggatgcccacagccaatttcttcaccaatggtttttgacatccgcacgatatggccaagtgcaccatcaacaaattcttgaatgaaaggccatagatgttctttagctaggtatttgtcttttggtccaaatggtatccgaatgatgtatgcaccactgttctcacccttttcctgtttagaatttttaaagcttgttgaaaccaacatttctgtaggttcaccataactacgatcgaaatttggtgccaagatttgtcttgtcagcaaatcaaccctgtaaactccaggagatgaactcaacgctttagcaagttcaaccacatatttgacctacaaaatggtatgtgaatatatatttaagaacttgttggaacttctgctatgagaaaaatctcagtagataaactagaaatggaaatagagaaaaggtctgtaaatctgtcatacactaacagataatgcaaaaggccttagttttctcaggaaaaagtgtaaaagtactagaaattaccaccaaaaaggaaaagaacatctacccctacccccaccctgaccccccacaaaaaaaaatgtccagtgggccataacaaccattggatattagaacctaactcaaaatttaagactgcatcctaaacataaaaggattcaaattaaaatacactcaagtaaattttgagttgaaaatattagaatgtcagtatacataatagtatttgtagtcccagtatgatatagtcataaataaatttgtgttgccagagattgggatcccatgtgcacaatcatgatatagtagcagcattacctggccaccagtatctgaatctcgtcctagctccatgttctcaccacggaccagaccatgtaggctgcagtacgaagcatgaactgattaatgaacattacaaattggcttcaaggatagagtaacagacaccgtttccacgtgagcatggattataaaatcaacatggaaaattttggtcggctgcccattatgaagctgttcaaaagatgtatgattgtttgttaaacatgtgatacatttatatcttgtcaattctaagttgtggctcttgttctttcaacagtagcaacagactgcccaaaagctaaggaaatagacacataaatatataatataatataaactctgcaacagaatcagatgcagaaacaaaatgcatgctaaaatagcagcgtcgatccactctttcctaaaaaggcatgcaaagtgcgcaaaatgataatgaggtcatcctactagagccagtattcattgtataccacttcaagcttgtgaatacctaaatagacagaggaatgcaaaatgcacgagcattacacttggactagaaggaatcaaggaaatctacagaatcagggcatcaaagctagataatgctttggacttcgtttcttttcatgtgcctagaagcccagaacaggagagagttcttcagtgtcatggacatggccaaataaatgtcatgataaacaagaatactgccatctcgttatttgaaattactgcttcatttgtcggattttctttgaattattcttatagtacagaatgatgaggaactcggctgcagtttactcaggaagtatggagaagttcctaataaaaaagaaagaaaaatcgacacagatagcagctactactattaccttaagaaatttgactaaagtagtttgattaaattgaatttttcgtcctgatgttatgctgaatgattcacaaatggtaaaaaaaaagggttacttaaaataatactttgtaccttatcagtactatgtatagcttgtcaattgaactcgtcttaggtgagctccctgtggtgctgtcaccatacgcaactgagggatcaccagcatcttctcccttttctccttcaaatagatcttcagacatatctgcattagtatcagttcgtaatttctcagcttctggttggcgtttcaacagacgacaggcttcttctttctcgaactgcatgtaagaacatctgaacatgtatatgacaagcgaaggacaaaatacaatggtacagaataggtacaactccaacatcagtctttcaggcaagaatatttgtacatgttggtatagccaattatattacaacacgaaaggtaggtagatgctgaaaagaataaaaatgaaacattcattgaactgggaaaccaagggttgactaagacttccatgcaaaagtacttccaaaacagatggactagccaaaacaggatacgttgcgtcatgaggacaaagtaatagccaggcagagctaagagcttaagaaatagacaaaatggatgatggaacaggatgcgttatattgtgccaggcatgtaccatcaggtcgagttgctattcatatattacatttgtttgcagcctttgctttcatatgtatgaattaccaagtgatacaattcaggcactcacattgtacttagcaatatgacaaaatttaaagcttctaagattgtagcacgaggcacgatgacataaacagtagcaagagatactctctatcgtaatacctcaaacaaaagatgcagcaaaacaaatgacttcattcacattctacctagaacgttaggggtcaaaatggaacaaacacataaaggcttatcaattgtagtgtaatgacatagcggtcacaagagtattctaaacaactgaagcaatagaagcaacaaagcaatccagcattctctgcgtgctgcccgcatttgttcagtaactcggctcaatgtcttctaaaagtcttatcatagatgacgaaacaactctctgtaataaagcaatgccaagcaggcaaagcatccttcctaaataaaccaagagctttgttaattatcccctctgaacagatccagcaccatctaagcaagtaactatcacatacgccacactttatcaattcatccattagaatcaaaattacaccgagtcactggctgagctctctgcaacctacgcacactatcatcatcatcatcatcatcatcatcatcgaagggaacggagcgaagagctcacctccttcttcttcctcgcgaggttccagatcctccacgtcatgttctccagccgcgtgttcctctcctgcgggctccgcatcgcgttcgcctgcgccgcacacgcacacgcacacagatcgatccaccgatcgatcgatcaatcaaacaaacccaacggggaggagagcgcggaagcggaattagaggtggggggagggagggagggagggaggggggagccacgcacgcggagccatgtcttgtagaggtcggtctcgtcgtacccggtgatgacctcctcgacgaagtagcgcgccggggagaagtggccgcgctcccggaggaggagcgaggggcggtcgccgccgattgccgccttgccggcgtcgaggatggcgtcgaggtaactgtttatccagttgtcgttgcccgccatgccgccgccgccgccgtggagatcccggcgagatcgtggagggggagaggagtgagcggaggagtggaggcgaagccaagggaagggaaggaagaggaggaaaaggagaggagaaggagcaagtgcggagaaatggcgaagcataataattaaaaaatgcgtccgatttggggttttttttattattaaggagaaagaaaaggtggcctcgtaatggaatgagtaataataaattagtgcctgtgtaaatccattgtcaaaattttttaccatatcacatcaaatattttgacacatgcatagagtattaaatataggtttaaaaaactaattacacagattgcgtgtaaaatgcgggacgaatcttttagacctaattgcttcgtgatatggcaatgtggtgctacattaaacatttgctaacgacggattaattaggcttaataaattcgtctcgtagtttataggcggaatctgtaatttgttttgttattagtctgtgtttaatactttaaatatgtgtccatatatttgatgtgacacgccagaactttttacccctagatctaaacacagccttagtggactgatgatgaaataaatagttgtttaattctatatataaaaaatattcaaacaaatcttgcttttttaaaaaaaaactttgtttttcagggtggatttgtccatcttttccaaagggcaatcaaattccattcagattttggacaggctaccatcaaagttaggtgagcccttcgaaaaaaaatactaaattagtaagcagtactgacgccatttctaaatttaagtgcaatttcgagggaatatcatggtttgtgaaataaaaaaagataataagagggagcacgtttggtccaattcttctttgagaccatcatgtgtagcttaacaatttggcccaactctaaaatagacatgccaagtttgaggtcgttttgggccttaacgttttcactcttttgcattcggtatttttaccacggtttggttattgaaggatgtagtaataaattacattgtccgaatagtcaagtcaaatcaacgtatgattgacagaacgagaaccgtgtcaatggaattcaatactacctccgtccaaaaataaatgcagccatagatatctgtgcccaacgtttgaccatccatcttatttaaaaaatttgtgaaaaaattgaaaatatttagtcacacataaagtattattcatgttttatcatctaatagcaataaaaatactaattataaaaaaaattcaaataagacgaacggtcaaacgttgaacgtgaatagtgtaaaactacacttattttgggacgggggaatagttttttttgggtgtgtgttttaagggcaagaatgacgatgtggtgtcaccatttggaaaaagatgtcacgtagagcttttatgacgacgaagaaagagaaagatgccacctagagtattaattaccccctccctccatcctgtaatataagagcgagtataatagtagactataaaccggctaaatactgaggtggaggagaaatagaggagaagcgggttgtcaacttacagccggcttggacacaaaaacaaagaaactctgtgagagagacaagtgggccatatattaattgtaaagagctattccctccgtccaaaaaaaagacaaaccctagtttccgtgcccaacgtttgaccgtccgtcttatttgaaaaaattatgaaaaaaattaaaaagacaagtcacgcataaaatattaatcatgttttatcatctaagaacaataaaaatacgaattataaaaaaatttcatataagacggacagtcaaagttggacacggaaacccagggtttgccttttttttggaccttagggcagtcccaaacctccaactaggatggtgtctatagcattaactatattgccatgtaggacttttaacttatgtggcactatattaattaagagagagagtgaagagaggaagaaactgggtctcatgcaagacacagcttcaacacgagaacctatgcgccaggctcttcaatagattgaaccgcaagaatacccacgatttttcggatcgggaaatgggtcgaaccgcgcgaaatggtcgcctcggaatacagggcgcaacgaaaccaaggttctttgttggcgtgttgcgaaagccatatgaaccgctatttagtccttgaataaagaaaggtagtaatttcatctagttgcattccatcgaactaaggtgggattgaagaaaggggtcttcaacttatcttgagccatcagtcagattaaaagcagcgccctgccgccagctcctgacctctgttcctatgggaaaaagcattttggagatttgctcagttgataccgaatttgaagataagcccttcccccgaacaggctttttatttggtgggtaacatcgatgaagctagcacgaaagcgacactattaagttttgcattgggagataatagtgtcttcataatagataaagaataaatattattggtagagaagagagatgttgtatttattaatggtccactttaagaaaccatgggttgtggagtatagtttctattgtgatgtcttattaacatagcaccatagacactacttatggacactatgggttgggactgcccttatagctaacaagctgagagaaggctacaaataaccttatagccaacaggtcggttgtattattagccttgttctaagggataatggatggatgtgatacattctagtacaatgaatttgaacagataagatacatttatccattatctcttatattatgggacagagggagtaacatatagcttaatatcatattatcacatatagtcaaaatcattatttcgtggcacctaaatttacgctttctgctagaggacaccataagaatgtgtttatactataggacactataaaaatatgttaattaactgttgaacacttacgatattattttattatatgcagaagaaattgagcgagaaacaacgacgaaaatacgaatctccacttgtggtcgggcaaccggcttgcctagccttcgtggtgctgtggcgaagcaggaggtgtgtctccgccatggcaccatctctcaagcccgtgtccatggcagcggctcgcggcatgctcgacaaaggagccctgctggccctaacccccgcgacgtcgcctccaacttcgagataaccaaacctcaccgtcgatctgttgatataaaaacacgagatatgagagatctgcttaactccagtgtatgtccaaaagcttgtctttagtgtaggtgtaaaaacttgtctttagctaaaacttcttaccatattgttattatgttatactctatgcatacataaaaagttgacgtggagttatttcgttggatcagccattcagtgtcaaattagatctcataaactttctttattgcgattggatcccataaactttgttttattaacagtaattttcataaaaccaagttatatacaaaaccacaacgattttatcgtgggacacataacttcagatattataatcccgtttgaatccgatgaatatgaagattaagtacagccacgcaaaataaatcattaacacataattaattgagtttaaattaattcaaacctaaaaagggctttatctcatattttaaaatttttaataaatctatatgattttatacaacttagcgtagataaaatttacacttctattaattgatcatcccctgaaaccaacaggtggcaatattctcacgtgtcccatggtatcattttttctgaacgaaactgttcctatcattatccttatttcacgtactgttctcaaatgcgcaactacaaaagtatcccacttaaaaggcaaacagatgcgtctaaaggacacgttttaagtcttacctggattatccatttattcttctacctaaaagttgatgatttcttcatgagatttaaggcaaatatatgaattatgtccacttcatttttttattggctcaattctgtcaattttcgataaacaatgaacaaacattttgtgcgaatatagccaacgtgtcagcccatcagtccttttcatgctgtgtaaagtgattcttacacacgcggctgtgtttagttccttccaaagttagaagtttgggttgaaattggtacgatgtgactgaaaagttatgtgtgtatgacaaattgatgtgatggaaaaagttaaaagtttgaatctaaagtttggatctaaacacagccgaaaaagtaaaagggaataaaggcaactagagatatatgcttagttaaatatatctttttggtgcctggattccttgtttggtacacgatgactcatcattatatttagcttaactaaataacaatcaaaacctaataggagaatcttgtttgtcgatcgtaatgtttatcttgaaacttgattaaaaacataacttaggtgtaatgttagagtctccagatcctttttgtccatgccatgagtctaaaacaaattgaagttttcaaagaaacatcacttggcccttttaactccctttaatttgccatcataacattaattagtttgttaattttttgtgcaattgtaagaggatgtttggttgccagccatagtttaccacgtctaaggttagacagatttgatcatattggtagttgtttggttgtagtcacaattgtggcaaaattcttttccaataaattgagtccacatgtcattaacttagggaagtgtgacatgattctcttagacttgctaaggtgtggttaacaatttgatcgcctaacttaagcaagtgtgatagtatttattgacaaatggtggtaaaatatggctaagaaccaaacacaccttaaatttcaatgagtttaaatatagttaaagacgttaagtacaattaatagggcaagttatagtcagaacaaactcaaaaacggtaatttaagaacatagaagcaaggactcctggttgctgaaaatgatccttgctttgttacgtgaatactccatcagtatatatatgacactatcaactttatttggttaaaatttttaaactttaatcatcattttattttgattaacaatttattgtttggaattgttcttctgcttaattaacctagatgacaggtaaatgaatggtgacgacaatagccttcaacatttcagggtgactatactttttagtcatagacaattatagtgcttatatatggaagatttatctctgttcttgaggagataccgtgagtaccgtgcagggggaacagttaaaaaaactagatgaatatgatttgtgattattattatattcgatgatacaaatgaatgagttaaccattacaaaggtgaaaaattgtttcaaaagggtattgtaaaaaaaaatagtatacaaagtagctcgtccgagaagcacttaagccttataaaccctaaagaacaaacttgaatactagcactaaactacaaatttacaaaaccaacactgttcctttacagctgggagctagctagaagcaatgcctggtctcaaccataggagaacctatgtgtgtcctgcaatggcctgaaagagataaggggaccaatagcacagtgcatgcatgcaaatgaaatataatgcaatgcaggcaatcaggaaggtaccatccatccatccatctgaaaacgatgagaaacctgactccaaattcacagaaccacacgtagaaagatctgcataattaagcaagcaggcatgcaagatgtttttctactatttgtgttttgaattattgtggcctgagtttccatggcatcatcccctcttatccatccaagatcacattgtatggcgcttggcgtttttcgccgatcgatctcttaattctctgcatcctgatcttttcccttctcagattggaggttggtagtttcagacaatggtagtatgattgattgggacaatcatctgttcaatggtcctagctgaacttcttgttcagatgaagctattagggcacccataatagttatctataggctctctacaagaaatccatgtcagcatatttttctacatggaagatattaaatgaagagagagagagcaaagctatctactaagttagagatagtctatagagaaaaacgaggcaatgcatgagagagctatagatacccatgtagatatactattgaggcggtttactattaatctagtctattgctgagatgtacatgttttatagatagcaccttactttaccattgcgggtgctcttaagctagaagatttgtgattttttgtgcagttcaatggcgttcaattcaagctatgtattattgtagccagcgaggaattttacgcatttcgaaaagttcatctcatcggaatctgtatatgtgcccttttccatgttggaatatgttcttggcaagacgagaatattgaaaaggtgaagctcactgggttgttaagaacctaagctagctaaggttaatcattgtggcagggagaagaagacaaagcgaccagttgagctgtggttgtcagctactattgttccttcagagaattcagagttcaggcatgctgttcttgatgattaatttcaggcatggaatgatggaaatctaatttactcatgtgaagtaacagtgcagttatgaccgaacttcagaaactaaattgtctggtctagatatataagtatacatggtggattttgtgatgataatgtgatgcaattgttgtttcatttaatttggtattcccaggttgtaatttactagttgattttatatttgtagcagtgacactacgaatctacagaatttacatgtcactttcaaattcttatacaagtctctgaatctctctcttttttttttgtataaaaaggatcactgtcaggaagactggaagagtatcttacctaccattgcattaggagcatcaagaaaactgaaaagacatcgtattgtacaaaaataacaatggaataattcataccaaacctgtgtgatcatatcgaaaagaaatcttattatacaaataataataatggaagaattcatactcaatttgtgtgatcatatcatatatactatgtacgtttaagcttagtagacttcagtgattaattgatgatctgtacgataaatttcgtctaaaatctacctaattggcagtactgttgaaatttagtgacgattacggcaaaaaaaaaatcatcaatacacgagaaatggatgaaattactgcataacaaactcgtctgtttttttttggaacaaccaaattagacaggtcatctcattggcgaaaagcttaagaacacaaacaaccggagtctcatcggttgcccatattccctaataagccagaataaaaattaatttacagggaaaacttttacatatttgtttatagcgacttaaaagccaacgctaaaaagaaattacgttgaaaatatcctaaaatcaagtttaaaatcaaatttaaaaaaaaataaattttagcttttgttttgacttattaggacaactgatgcggctcgtggtgattttttctggtgtggttggtgtggagaaatcacttcgcagagacaaccacctcgcttttgacatgatcaatcgatgatttgctgatgaaacagtgctggtttttttcccccgaaaggtgatggttaccgttgcaattgtagagtagagatggatacatagccacatggcgtggacaacgattcttcgcgtgatataaaccgcaaactgtcgatatcactccatggtcccttccatggtgaatgtgatgtcgctgccatagtcgatctatttttctctggaaaatctgagtattattgttacaaatgaaagtttttattttaaaaataaaagtgttttatatcttcggctttttaagtatgctttatagtctaattaatcgatttggaaaaatccaaaaaatatcattaacaagatccgatttttaaaaaattgtcatcgatgagtataaattttatgaaatccattgtactgtcctagaaatgccacggtgttatggttccattagcaacctctgttaagtgctataggataaacaatgcatttaatggtacgagatagatggaaccctaatggtgatggtattttgaaacaaaatcgcttgtacaatgatattttatgaaacttgcacccgtcgatggtatttcttgaatttgggtgtttgtcaatgacattttttggattttctcgattgattttgtgacaacatgttctttttagctaacagataacaaataaccacgaacatattttttaacgaatgtgatgatgttttttttaagaaaaactttctttatcaatatttcttcataaactctttgattcgatcttttgatttttctaatatttaactatttatttgcgccatcaagtaattttcataacatagtttcatccttcggcatttcagaacacaacttgagttgttctgatatcttgtttttatcaaaaaccttgctttaaatactttctccatcctgaatatagtaatttctggcatccaaaatttatataaaaaaagtataacaacttatataccaactctctcatcttaacccaccacatccatctctcattaatttatctacatgctttattgtctcagctgatcacaaccataactgatttagtttcacctttctctacaatctcaacgaaaactctaaaaatatcttctctgtcccaaaatagtatagacatgccccacaatcaggttcgtagtattattttgcgtctaatctaacactatatcaatattgttatattttaagacggaagaatacctatattttataatggagagatacattatattttacagcctaacaaaactaaaaaaaacaacttgatttgttgcaataaaaaattctactgtaatttttacaatatattgttaggataaaaaaaaccattttgcaataaatccacttttttgataaaaaccaaaggatgtcatgtcagttaaagctgaattagtaattttctgctgcttacaacagctcaagccaccaagaaaatccccaaaataccctccctctccctctccctctcacgcagctcgctgcctcactctgctgcgtactcctcttgctccgctcggcgcctctcctctcctcgcgtcccctctcctccattctcatccacctcctctctctctctctctctctctctctctctctctctctctctctctctctgcgatccgaggcgcgaattgtgaggagagggggggagcttagctgcggagatggcggcggcggcgatactgccggagctggcggcgcaggtggtgatcccggtggcagcggcggtggggatcgcgttcgcggtgctgcagtgggcgctcgtctccaaggtgaagctcacggcggagccgcggcgcggggaggcggggggcgccgccggggggaagagcgggccgagcgactacctcatcgaggaggaggaggggctcaacgaccacaacgtcgtctccaagtgcgccgagatccagaccgccatctccgaaggtgagcagagcaaccctctctctctctctctctctctctctctctctct

SEQ ID NO: 23352 - DNA, 12883 bp, Oryza sativa
attcctcaggctgcagattctgataagataacaagcagccggtcaagaatctatttatctcttgggatccacatttgcgtttccatagtaatttcaacgagctcaccagaatatttggcatgatgtgagtgtggttcatttagtgatccatgtagacactccacaaggttgttgcattatggaagatacctgctagtaaaatagtttggcttgtgtccccagttaaaaagaaaaaaaaacttagcttgtgggtgtcagcaactcagtaccataccaaaattatttgttagtgtcttagtgatatctgtttgttggaagatagtatgttagtattagctttcattaaatcactatgaaaataactacaaagacgtgtcagatgctgtctctggaaatatcttggcgcacaggctgtgctggctttgttgtgatgttctacatggaagtgactaggagtacttggttagatggagtttccctgcattagtggcaggcatatgattccccgcaaaaaaaaaaaggtggcaggcatatgattggttttacaggacttgccaaatagtttagcattttcatcgcgtcctttgcttggagctcctttcaataggctgagccagagttttgtctctgcagttgttagttttgacggttgtaagttcagtggattatatccggttggttgttgttgcagtgccagttggctgaattattgaatacctctctagatctactagattttagtggataggttttgattggttctcatttaaccaatcgattcatctttttagatgaccttctttgttaccattcgtctgtagttcagggttgtcattggtttgatgtagacacacgcctatgatgctattctgactttgcagcaccaaaagtgggaaatcgaaactgagtaatgcaaaaacttattctaaccttttggatgaactagtaccatttaccttgatataaaacagtatgtttgtatagaatttgttgaccatgctctttgcgatttgggcctacttgtttgtgggtgtcacaaaactttcattagcaaacataagtggtgatatactgatattattcttatgtgacatttgttcatttctcgcatttactttgcaatcatggatacaacctgaactaaactcaccttccatcttttttttcttttttttgttaataggagcgacatctttccttttcactgagtacaagtatgtcggattattcatgagcatcttcgcagttcttattttcctcttccttgggtctgttgagggcttcagcacgaagagccagccttgccactacagcaaggacaagacttgcaagcctgcccttgcaaatgctatctttagcactatagcttttgtgcttggtgcagttacctctctggtatctggttttcttggaatgaagattgcaacttatgcaaatgctcggacgactctggaggccaggaagggtgttggaaaggcttttatcactgctttccggtctggtgccgttatgggtttcctgcttgctgcaagcggtctcttggtcctttacattgcaattaatttgtttggaatttattatggtgatgactgggaaggcctttttgaagctattactggttatggacttggtggttcttctatggctcttttcggccgtgtaggtggtggtatttatacaaaagctgctgatgttggtgctgaccttgttgggaaggtggaaagaaatattcctgaggacgatcccagaaacccagctgtaagaatctttcacttgaattctaaagattcccataaatatactgttaggaaaatctcactttaccaaaactgcaaagtggctaatcttctctctggtcaaaccatcatggtataagaatgacttttgttctgcttgcaggtcattgcagacaatgttggtgacaatgttggagatattgctggaatgggatcagatctttttggttcttatgctgaatcatcgtgtgctgcacttgttgtggcatcaatctcttcttttggaatcaaccatgaatttactcccatggtgtaccctcttcttgtcagctctgtgggaattatagcgtgtctcataaccaccttgtttgcaactgatttctttgagataaaggctgtgagtgaaatagagccagctctcaagaaacagcttataatttccactgcttttatgactgttggcattgcccttgtcagttggttgggccttccttacaccttcaccatctttaactttggtgcccagaagacagtgcaaagctggtacggtgtttttacattcatcattgggctatataattaactttatgattcatcctcattctgctgttaatttatcacttatcaggcaattattcttgtgtgtggcggttggtctttgggctggtctaatcattggatttgttaccgagtattacaccagcaacgcatataggtatttacgatttgctcatttatgtggtgattatttttatgtttattcttcaccttttgacatctctgttgtttaccctttcagccctgtacaagatgttgctgattcttgcagaactggagctgccactaatgtcatttttgggcttgctttgggttacaaatcagtcatcatccctatttttgctattgctttcagcattttcctcagcttcagccttgctgccatgtatggtgttgctgtggctgctcttggaatgctgagcacaattgccacaggtcttgctatcgacgcctatggtcccatcagtgacaatgctggaggaattgctgaaatggccggcatgagccacagaattcgggagagaactgatgctctggatgctgccggaaacacaactgccgcaattggaaaggtacatatctgcctacccatcccattcttaatttccaggtcttgcaccgaacttagtcaattcttcctgatgatctccatgcataactgtagcataggttcacatttagttgaaatttataccaaggtttttatccctcaagatgtcgatcatgcctagaaagtggttgtttctaattatgatgatgatgttataccacttcagtatggtaagcttccttgattaaaagaaaagtttatatcgtaattttgtatttgcagggttttgccatcggctctgcagccttggtgtcacttgcactttttggtgcctttgtgagccgtgcggctatctctacggttgatgttctgacaccaaaagtgttcattgggcttattgttggtgctatgctcccatactggttctcagcaatgactatgaagagtgtaggcagcgcggcgctaaagatggtggaggaagtccgcaggcagttcaacaccatccctggactcatggagggcacaactaagcctgactatgcaacttgtgtcaagatctccactgatgcatccatcaaggagatgatccctcctggtgctcttgttatgctcaccccacttatcgtcggaattctgttcggcgtcgagaccctctctggagtccttgctggtgctctcgtctctggtgttcaggttggtaaccattctgaattctaggattacaattgcatccaatggtccgtgctccttatccgtttcaccttctctcagattgccatctccgcatcaaacactggcggtgcttgggacaatgcaaagaaatacattgaggtacaatatctaccagtatccatttccttttcttttgggttcaatcctgcatgttaccttaactttcttttcattgttctgcataggctggagcttcagagcatgccaggacccttggtcccaaaggttccgatccccacaaggcggccgtcatcggtgacaccatcggagaccctctcaaggacacttcaggaccctctctcaacatcctcatcaagctcatggcggtcgaatccctcgttttcgcccccttcttcgccacccacggtggtatcctcttcaagttgttctaaaccggcgacgttgggtgtaacaaaggccatagttttttggggatgagcaaaatatgtagactattttgtcatgatttgctccttgagttgatgactccattgtctacttgatttcccatttttgttctagttccaggttccaaccttgtgttttgatcccagaattttctctggtcctctttagcttttgtctccagctgcataagtcatcctgtggcacagtgaacaaggagcattggaaaatttgccattttctagcgataaaatgatgaggatgatgatgatgattgatgtcgatgatattgtcttttttttaaaaaaaaaatcttctaattttgcagcaatgggtattgattgacgtgaagcatccaaattgttgcgctgttacaaggttctccccactcattctctcaatgctttcctaaatgtaatttttctttttatatccacaaaatttttctccttttcttccctatttattcttgacaaataaatggcacatcttataaattaaatactattcttacaaatgaattgacttttgaacacaaaacccattcatagtggcaacccaattaatccattcgagcacgaggaacacaagaacgaggctgtcttacttgcattgctgcattattacgtacatccattcatgtctaatgtctggagggtacaacaacaatgtaaaaagggctaagcaaacacaaatcggtagcaaatcagaagagagacatgataaaaaagaatcttttaaatagtacatgcacaactaagtgttcttttttcctgttctcaaactaggctatggctgacgaccgagctaaaacccctacctgctaaccagtaaccagtgaaccactaagcacaggatgaacagagccacgttcttgcttgtaaggtagggctgttactcattgatcatttcctctttttggcaggtggttgcgggacgtcatcgtcgtcatcctcttcctcttcttcctcctcatcctcatcgtcatcctcgccctcgccctcaccctcatcatcgtccccgtcctcatcctcgtcatcgtcatcttctccaccatcgtcgtcatcactccctccttcaccattggcttcagggtccccgtcctcgtcctcatcattcccttcctcttccgaggcatcttcatcaccagcatcatcgtcgccttgattttcagcatcctcgtcatctccctcctcatcgttatcatcatcagactcaccatcatccttgttctcaggaaccgtttcagttttgcttttgctgagaatcctttaggagaagggtcaaaaacaaacctcagctttgagatgagatattaatatgtctacagtcatggatagaatacatgtattcaacactaatgaattcagaactgcagttgcaaaggggtataagacatacctattaatcaaatcccggtctccaccagatgtaatgaagatttcgttttgcaatgacaacatctggataccatagcaaaaaagaaaaggaaggggttaaagctgatgatggaggattggtgtatagcagagttgctcatcagaccaaagcagaggtttttcccaagggtaattattatattacacaagtagcaaacattaaaatgaaagatactacgtggataaacaattcctttttggaatgaaaatgacaaggctatatagagaatattttaacttcaatatggtgttcattccagtttagctccaagaatggagtatcttaatacaaggccattctggtgtgtcgtccaggcacaaatataaggagaaaaacacaaaacactagcttacaatgcatttagtgccaaactctgaaactcttgcaacaaacttacacatcaatagctctaacacaatacatttgtaattttgtatgtgaatagtcagacaaaactcggtctaatccacatcccctagccataaaattatcctacagcaatagctaatgttactccttatatgggtactaatttcatttacatttaccgaatagaacatatgactgacatagtagacagtggtaatatggaaaggccatagggcgcatgacaggccattgttgccatgcggggggctgctaaatgcaccaaacagtgaaatcattagaaacatggaaaccacttgaatatcccagttaaagaattatacaaggcaatctctccgttccacaaagactttaatccagcaattatagggcaaattagaagtgtggtgaaaaggccaaggtgcccctcattaataatcacggttgcaatttctatgctccaattaaatgtacattgggagtaggtataactcagaagttagaaataaaatctttgtgggacaaatggaagcctatttgggatggagggagtttatatagtgatggatgattggtcataaaacaaagaacatagcagccaatacagtacaatagagtaaacacactttacttgctggtctgaaacaccagttcacctggttttctcttcagttaaggagaaaaacaatcccagtaataccttgcagaagacactattggcacagaaaccatgtaaatacatgtatacatcatgcacttttaggccttattctggacaacactcgaaatataaaggttcctaacaagcacgaatttctggaccataggttttcagtgaatggtgctctgaacatagacatgataaatccagcaagggcacgcacaacatcaatgagacccccatgaaccaccaagtaatttactatcatataacaatagagcaccagatgcggaaacttctccaaattcctctgtgcacattacgttatcctattcgtaagaacagtacacaaaagtaactccttaatcctagatacttcctccgtttcacaatgtaagtcattctagcattttcccattcatattaatgttaatgaatacagatagatatatatgtgtagattcattccattcgatatcaatctgggacatgttagcgctccccttacattgtgaaacggagggagtacaacacaatgcaacataagcaaactgaaaagggcgaattaaatctctatgaacaaactgccaagaattccccctagtgcccctagtcgtgagttaattgactccttaatcctacaaatagcacaatgcaacacaataaaatctggaaagtatgaaccgaattccaaattccccaccaacaactaccaacaatttctctagcaagctaaatctacccatcaagttaaacacttcaactcaacagataacctcaaatttgtgtcaccacagtgcgtgaaagagatccaacacagagaatatggcttaatttctcgaaaaagaaaataaataaattggatcagcaactagacgacaaaccgaaaaaaagggagttccaaaagtcgggatggatctccaatctacggcggctcaggctgccaggtacagcgaaggaagagaagaataccttggggtcgagctgggacggggtccagcggaaggcggcgcccgcctcggcgacggagaggaaccgatgggaggcgaccgcggcagccatggcgttggggtggggaggaggaggagagagaggaagggtgagcaggatcgatgagatgagagccaatccagtgaggggtttttttttttttcgcccagagcagcagctgtcctgtgctgcgacagatcaggccgtttggaaggcccaagatggcccatttgcgtatatgggccggcatttcagcaacaggcttttaccatcggataaagtccacttggctccctttaggccgaatataattcgtacccctctaaaaaaacatcggataggacgactctcgaactattgaaaccagtgtgatttgactttcctagcagttttgaaggacggttttgctaatgtggcgttgacatggcggtgttgacctggtgttcatcccatgcgatacttatgtggcattagaatttaaaaaaatatatgtgagacacatctatcattcatacacaaaaatatatcgtaggccccacatgtcattctctatctcaaacccttcttcctcctccctctatgaactttctgactataaaatcacaaggaagtattttcattaactttttcaattataatgtattataacgattttaatattttaatttattgctcatcttcttaataactgttgtattattgagaaaacgtctttacctgttgtaatgctcatacttttttttctaagttaattgtgataagtgtataaataaatgattataaaacttcaacaatatagtagaattacaaccttatttatgagaggagtaacttaaatatgactgaacaaaagctacattcgtggtaactttccgaaccgagtaaagcaaaggaaatctgaaaaaaaaaacaaaaaaggcgttgccaagaaggaatcatcaatcgccatttcggcatctcgttcttccttgaacccgcttgttcgtttcccacgtctccctcttgcggtattggccgtcttcctccgcccaaacaacaaaacagaaaaaaaaaagaaaaacccagtcaaaacgcccccgagaagaggagaccgtcgctaagccaaagccaagccacgcgcgacccaatcccccgatccctcctccccctccctccctccctccctccatggcgtcggagatcgaggtgctcgaggacaccaccgccgccgccgccgccccggccgccaccatcggaggcggagaggtcgcgggcgcgggcgcgggggaggagggggaggcggcggcggatgcggaggcgctcaaggacgacgtgtacacgggcgcggcgtacggggacctcgagaagctgcaccgcctcgtggagcgggagggccggccggtgacggagcccgacgccctcggctaccacgcgctccagtgggccgccctcaacaaccgcgtcgccgccgcccagtacatcctcgaggtatgatccatcgccgtcgcccaatccaatccgccccccgagcttgggtaatgctagtgtgtcctcgagcttgcgcgtttaggaattcggttttcctgccctttccccgatcagcaacggagctccccggtgatgtgttgtttgaggtgcagacgaagtgtagctcctgctgggaatgcgctgtgggggatgggcacgagttgtttagttgttgttgcgaatctcgtttggttttttggttggatcgatgaggagagattttggttcatgtggcttgtaatgacaggaaggtatttcgcttttgctctgagggtagcggttttgagcttagttttggtatgtttgtgtttatgtgttggatggatgttaatgctatgttggttgaatggtggctgttggataggtctaggcagggccaatctgcagctcctttagtgttaggaaaccctgtggaacttgcctcttgccatatcttaccaagcgagcaagcatttccaagaatttcgctgaaccataaatgggatcataggaagtttgttcagttaaatgtcatgtccagctgtttagacaatgaagccaacccctttgaaaccttgcttggattgatttgagtatgcctatgctgactggtctatcccagtcaacatgttatgcattgtgtcttttaaggccattggtttcacggttttatgttgaacagtgtagttatatagtacttcttgagttgcatggttttctttgctgctctatagtatgtcctatccttttcagttgtttgctttggtgggatgacggttctcagcttgttgtctggacagcatggagcagatgtaaatgctatagaccatacagggcaaacagcactccactggagtgcggtacgtggtcatattcaagttgcagaactacttctgaaagaaggagctaaggtggatgccgctgatttatatggatatcaggtttgtctttgacttatctattgcatccatggttccttaacacatatatattctctttctgttgtctaatgtattttgattaattcacctggtgaccaactgtttcttactcaagttatgttgcaatgtctctataatgattatgtggtacataatagtttaccattgctttgctgtataatccctatatcagtcactaagatgcttcaaattgtaatttcatacacattgatgctaggttgtatggcttcctgcaagataatgaaatcttttctctcgtcagataccataaaactattacttcctctagtaccccaaaagcatgttgttctagtaagtggcaaagagattaggaatttgtaacattgccatttttggcctttataataaatttaattacttctatctctaccataataatggttaggttgttaggatgggattaaaatgcacaagtattttacttctgtaatcagatcctatattttatcttttaattcttttagcatacagtcattttgtttttgagtttgagtgatctgcagggtttattaccgccttaagctagtcgccagggttgtcaacaaggtactaagtgaagtaggctatagacaaaacagagtcattacaaggataggtttcgaaaaaaaaaatttggcatattcactttgattcggaattaggtctttaattgaaatgtcagtctgtatttttttcctacatatgcagattagttcaacaataaagtaagatatctgcagtagataaattcccggtttgatcttaaaagttgggcagaaaaagtcaagagtcagtcagttaccttgtatttgaagtatttctgacggaatccatctgttgttataccacagactacacatgttgcagcacagtatggtcaaacatcatatctttatcatattgttgcaaaatggaatgctgatcctgatgtccctgataatgatggaagaagtcctctccactggtttgtacctttcccctgtacattttttttcaaagttcaaacacaagccttgtggtattctttatttttgtcacttaatgtgttgtctaacatggcttcatggtgcccctattgatgattcaatattgttcacatttccagggctgcttataaaggatttgcagattctgtacgcctccttttgtttttgggtgcatatagggggcggcaagataaagaaggcacgtgtttagttagtttttctagctcttcctaaaccctatctttatactgatcatgacaatctaacctacaacaagcatttaagcacgcttcccctgcattagttttgttggatatcaaatattcatttccagctcaaatgcttttcattaggttgcactcctttgcattgggctgctatccgcgggaatttggagtcatgcactgtgctggttcaggctggtaaaaaggaggatcttatggtgcaagacaataccggcttaactccagcccaacttgctgctgataaaaatcatcggcaagttgcctttttccttgtgagtgctatgaatattcaccattttttgtttatcatacatgagaatccttctagcttcccaagagtatccttttagcttcccaagattccatcataccgtaaatgttgccatctgattgggaatttaatagttctgttaatatgctttttggctgcttttccatttgtgccacctatttttggcttgttcttcattgacaattattttttatacctaatacgtagtagtaagcattactctcatgatgaatggatgtgctccacggccctgctatttcccaatagactctgtatattgcctgccacagtgccacttaccgttaattcttttactatatgaattaaaatgttttcttaaaataatatgcattgttaataacatggaggtaacaaagtaaaagtttttggataatcactagcatttgtggattgtgaatgctcttgtacttgttctggatattcttttaactattccccagtatagattatcttgcttaaaggtataaaacatttatcgttagcctcagcatgtaatttattcctggcaaatgctaaggattgatttgatgatttgattgttctatgcaggggaatgctagaagagtacatgagagaggatgtggtgggaacagttattttgggaaactatcaaaattaggactcgcccctcttctttggtgtattattattggcttaatttatatatatgtatattcagttatctcaggtacattactgatataatgtcttttcagaaattttgatctttcatactgtggttgtggattactgaatttgtttccttctattcaggacaatatagcagtaatatgacattactatttgggttattttcatggttgggaattttccttgctactgccggattggttatgttctataagtgtagcaggtaaacattcgattatattgtaccaatattccaaaaactggaggaaacatatagacagatccatgtcaattgtgcctctttagacagctcttttcttaagggcctttttaacaaattaatctcactttgcagaaactaatattttcttcatttgcatctagtcgttccttagaagggttttttaacatattaatctcaccttgcagaaagtaatctttctttgtttgcatgtagcctggaagtacaaggtcactttctttatttttaaagaaaactgtgatttctttgctggaacagagcaatttggctatttatcaattaataccacgttttagtgtgctgtcctgaaacattgaggatcttgttattttgcctacactctttaatgcattatgttctggccttgcacatctatataaaattgtaacatgcccaccacatactacttttatttcacattaaagatatttgattcaatcatttaaaaatttgtttgaagaatggccatactattttgttatgcagaaaagatcctggctacattgacaagaatacaagagatgcccaaaatcaaagagat

SEQ ID NO: 23353 - DNA, 41814 bp, Oryza sativa
  unsure (1)..(41814): unsure at all n locations
aaagactatcgaaagaagagactatctagaacacaacacgagattaattaaaatccagaataaaaaataaaatcagtagtaatacaatttataaacaacaaaatatcaggacggaaaatatggaagtttgtttagaaatagtccatctagaacacaacgataacaaatggcgataaaaaggggagaaacaacaggcccgtaaaggagtagggtggtggctgtttatgggacatctaaaaactataaacaaaaccccaaatagaatcccaatgacgattaagaggagggacgacgggtaggccgttaagcagcatggccatgacggttagcgggacttctagaaagtaaaaaataaaccccaatgttaatcatgctcgttttttaaaatctcaatgataataaagaggggaggctgcaagcgggtcgtagagaagtataatggcggagccgctgacggtttggcgggacttctagaaagtaaaaaaaatgaaccccaacgacaattatgttttgttttttaaatcccaatgatgaagtgaggaggcagcgggcgggccgtagaggagtacaatagcggcgtttgacagggcttctaaaagttgtaaaatgaaagccaatgagacaatgaactctaaaactacaatgtccaatttttaaagattccaagaaggatgagtagaagtcatagtagatcaagcaaacaaataaatgggtgacaaaggagtaaggggtagcgattggcgtgacttaaaaactacaaaattagaaactcggagatgataaggcaatgagatagctatttaacaaaattttaagtaaaatcatatgtaaaaatagataattttgtatgagtgccattgagctagttgtgtttataatagaaaatgattgggcttctgtttgtcccattgagctatactgcaaatgtttttttctcagtccttgcaattatcattccctgcttatatttgggctctatttttaaattacattgtcaatcatttatttcttcttatcccttgcagatatccaggaatttaacaacaaatgagatggcaaatgccatgaggtatagttatctcagaggcccaggtggccgattcagaaatccatttgaccatggggtgcgtaaaaactgttctgacttcttgctgaaagggtacaatgaggatattgagagggtagaacagacattacaacctgatgaggaattgggaatgattcaaatgacaagaagtgcagtctcacagaatggcgagagcatgtcacttcatgctaatggcacagaccatggttgtgctgatccacaagggaactcaaaatcccatcgtcactcgcacggttcatcacaatgttgcagtcacagtaagagacctgacaagacccccttggggctaggattgggccttggtcgtaacaacccatctagccgctacacacgttcacttccttccattcattcggagagtagtgcttatttgcccttgtgattcttttggagaaggcgagctagatcgtatttcaacttgtaggtgtttattgcacaaccacagctttcttttggctatttcttcctgcagtatttgtcgcttggatctggtctcatcgacattgccagggtgtggtatatttggaggcccaatcaaccgactactgaaattgagaatatgaaggagatgcaagttttatgaaggcttcatgaacatccttagcctctcaggaacaccagcgaatgtctgtctaggcgtagcaatattttttgtgcaaaagtgcatctttgtacaatgtctcaacattttgtatgtacaagagggttagctgtccagatactatgatgttttcaagtacagctgtatattggaagaactgtaaatttatatagcgaaaccaaatgctggcaaatgtttgtttctctccattttaattttggcaacattagagtatagtcttggaggacttgcattgtcagcttgatcacaacttgtctttcaaacgtaacttagctatgaccgtatggataatttcgaagttttcgaatgctttaactttcagttccaaaaagaaaaaaaaagcatccgatatgatggatcatgattgtgatttgtagtcacattgtccaactgtgttatcgagttgattatatggggataaataaacttagcaaataaataactttaatcaagtggtgtaagtagaataaaggtttttattttgagcaaagatattttttaagcgtgaaacaaataatctatttcagaccggtgaataagctggaaaaaaacatggccttagttgcgtctctctgaaattgcggccaaaatttaaaatttaatagaacaatacatttttttgaaacaaaaaggacattttttacttgaatcgaactattgcttatggaactcatacaaaatttatgtggaatgtttgcttagtgcatgatctcagcgcccgtaactcgttcagaaaaacaaaggggaccaaaatacaagtcataataactcataagatcaaatggctccgatcgttcgagggcattgccttctcttcggctttgtgttcagtacattatcaaaatcgactgtatcaaattttagtactatcaaatgattcttttattgaaagtactgtcaaatgttaatcttagttttcgtaatgtttaggttttagtaatgtttagggtttattcactttgtagctatttttaacccttctaaaatttattagtgtcaaattttggtatattttaacattaccaaatcttggcagcgttgtatgcttttagtttaaagctttattaaaatttgataaacttttaagagtgaaaacttttagaattggcaaagtttaataaggtgacattggcaagtatatatgtttggtttgttgccttattaaattttggtaatattaaaagtctcatcggttgcctgttttctctaataagccaaaacaacttattaggaataaaaattaatttataggtaaaacttttatatatttgttcgtagcgacttaaaaccaacaccaagaagaaattacattgaaaatatcttaaaatcaatttctaaatcaagctcgaaaatttaaattttagcttttgttttgacttgaccacctgatggggctttaaatcttgataaggttgaaaaaccagtaataaagtgaactataaacccctccaggagtccaggagtcaggactccgtccactgcacctccccgcgattctaaaatagaaaaaaccgcgtgccgccggcgtcgcaaacttgagcgccacgaatcgccgcgggaaacaaatacccccaccccccgcctcgcctctcgatcccaaaacttgcgcgccacgaacccctcctcctcccctcgcctcacgcatttggtcgagcagctcacgcgcgcgcgatggacgaggtgtgcgaggggaaggacttctccttcccggcggaggaggagcgggtcctccgcctctgggaggagctcgacgccttccacgagcagctccgccgcacggcgggcggcgaggagttcgtcttctacgacgggccccccttcgccacgggcctcccgcactacggccacctcctcgcgggcagcatcaaggacgccgtcgcccgccaccacgccatgcgcggccgccacgtcgcccgccgcttcggctgggactgccacggcgtccccgtcgagcgcgccgtcgacgaggcccttcggatcgccacccgcgcccaggtgctcgagatgggggtcgccagctacaacgacgcgtgccgcggcgtcgtcaccaggtacgtcgccgagtgggaggccgtcgtcacgcgcatggggaggtgggtcgatttcgaggacgggtacaagaccatggacatcaagttcatggagagcgtgtggtgggttttcgcgcagctgtgggacaaggaccttgtctacaagagttttaaggtcagtacgtcaggtttttgaaaatcgctaattaatccctatgcctaattcccatttatgcacaatttagattctagaggtctttatgatcgatttagcccctcttctgatctcatcatggtttaggattattatatgggactattgtacgctaattaatcccccatgcctaattcccatttatgcacaatttagattctagaggtctttatgatcgattttagcccctcttctgatctcatcatggtttgggattattagatggctctaccgctaggactttggaaatctgtccgacagaaatgtatatgatcaagttggttactggctcactgctaaggctgcgttcgtaaaacggaacaactcattaacatgattaattaaatatgttagttaaaaagatttaaaaaatcaattaatatgatttttataattttctttaaaagaattagcaagcgtggttatataaaacaagtgagtagaagatgagaggaaggagtatcgagcacagaccgttcttccaattagagtttgggactatggggtttgggttttggtcaatttgacatgcttcggatgcattaatgctggaattatctttagttaataatattatgtgcaaccccccttcccctttttgtgtatttatttccctgtttaaatctctggagctgttctacaggtgatgccttacagcactggcatgaaaacaccattgtcgaactttgaggcaggacagcaccgccaggtcaattgttgttttctctcctctgcacgcccttgtttgacctgctctgttagttgacctgatgtttaattttgatgatgttgtagtttgttccggccgaaacagccatggtgtccttccctgttgttggtgatgtggacaatgcagctcttgttgcatggacaacaacaccctggacgctacctagcaacctagcactctgtcaatgcaaaatttgtttatgccaaggtttatagcgtatttaaatatttttattgctgtgtttgttaatagtacagtctgcatgtatggagtaatttgttggtgattttgggtacgtgaaaaatagtcctgaactacacctaaagcagacagaccatagaaaatggtggacatttgcaatttttttcctgtcatctggtgaacagctggggttatctggacttttaaactaattcacataactcaaaattaattcaagaccaaggctttactcttgccatgcattttgtaattgtttcatttgccacttctgggtacttttactaattgcctacctattctagagtcatgacagaaaacaattactagaattttcaaagatctgctgatctgcagctaatatgcctctgctttcactgcaacttcagattacccttatgtaaactcatactgcatttttttttatctcagatatatatagctgatacttcgattgctttgtaacttacacttgttttatttctgactgtgacttgctctgtttttttaatttatgtttactgtgaaatgatcgcaattttcatacaatcttaccgtgagaaaattatttggttagcttcgaatactaaaaattgtctcttgatcttgttataggtttaggctcatccaagtttatgatatctcatacaaagaaatagtcataaagcattatattttatatttctatagttatactgttcttagcttctatctgaagagctgcactacggtacaaacaggttaaggacaaatcaaatgggagcgtatatattgttgcagaaactaggctagaccaattgccggtcacggtcaaagttactggaaagaagccagggccttcaaaggggagcagtggagctgctaaaaatggactggatactgaatcgtatgaactactcgaaaagattcatggatcatccttggtaggccttaggtcagtgctactgctgttattaattggatcttatgattctttcttccaatatatccggtatcgcattcaaatttacttttaatatctgcaatcacctagtacgaactgatattacaatgctattcgtgtgactagagccaatgggatttcaaatccatccaatgtttcttatccggaaatcttcatcgttttttgagattctaatgcgtccatttccttttgagggttgacaatgttctagacttcataatcttggtttattctttcttttagttactgaatatattattgcagttgtgatcttcagtttattctaagcactcatgttttttgtttccttttgtgatacagatatactcctttgttcgactatttctcagagctgcaggacaccgcatttagagtcgtagcagataactgtgtagctgatgatactggaactggtgttgtacattttgcccctgcttttggtgaagatgattatcgtgtctgtcttgcttcggggatagttgaggtaagaattattcttcttaattcgaagtatagatacattttactcctacacactatcctaagcttaattgcagatgggaaaaatatttggacgtttctctctgtgaaggctaaaactgagatttacctcaatagttattttccttgaatttagcaaatgttgaattttgtcccgagctcatttttcttcttcttgaatattttgttctcaagagtcactttgctttgctatttttgttctacgatacttccattgattttcgccctatgatactttgcactactttatttaccttgatcgggtagaatgaatgtgataacgtttgctctaatcaacaagagtaacagagtacccattggaaattgaattttttttatttataaatttttttattaaaagttttacaaaaataattttccattttgaaaattgacggaagtagtcgcctaccgccctctgggagggcgatttttaaaaatcgccctcccagagggcggcgaaaatgacgtggcagccggccgttcgctctcgggcgacggccgtcaacgaaatttgcaggcggcccccttgccgccctccgctagggcgattttatactgtgcggggccgcgcctgcaaatgggggagggcgattttatactgtgctctatatttttttataaatatcaatagttatcaaatctttttatattgaaaactatacaagattaaaatctccaagactggtaaaatacaattttattattttttagggcatatttggattgttaccgtacaaatattttgttagtgccaaaatataagcaagttttggcactaccaaatatttggtaaggtaaaattgcatttgatcatatttggtttgctgccaaaatgtaaaattgtagtgaagaatgttctacataatctcaaatctagattacgtattaccaatgaataggcttccattttcgtgtgtggtgtgctagtgggaaagaagatatgaagaggttgccttcagattgtcaattatatagcgtcgttttcactgcaatatatgtgaactcaatgagatacattattcattagatgtgacaagacgatcacgcgtgggcgtgaatcactttatgtcaacaggcagcgccgaaagttgatagtgataactcgagctgccgcttttcatgtgtgctgttgtggactgtgcgcgctactggatctgacactaccgtgaagcgccgaaagtgtgttgtcgtgagcataagttgttctagcaccatatgaatgaaaagaactatgtagacgagacaaacacaagtagtactgcagtagtaatagcaaaagtagtactgctttacaagtttgtaagccaaaagaaacggtcacataaggactgaagaggtagaacactactgacgaggccttttacccctgtccctcctaccctgcgccctaatgtgcccctgggagtacgtgagtcggtccgggggtacggcacggccaacccgtcctgcctgtacaggtgtgacctctggctgctcctgagtgtgcgcctctggagctcctccaagctgagaggagcctagtacgtcgtggtggtgtgcaccgtgcaagtcgtcgtcgtagaactggctagtaggaccagtcctaccggcgtgagacgaagaggccccagtaccgaagatcccggctgcaaatcctgctggacaaggaccatcagtttcgtacaagtatttaacagtggtaataaaaagtaaagtaccgtgtgggcgagggatcgacgctccgtgagaggaagagctggcgaacgcgcccgaagaggtggcgaacgcccctgcggagctcgcggaagcgccggtcgtgcctgcgaacgcgctcgaaggcagacgaggtcctgcgatgaggaaacgtgcagttaaaacatggtgacatattcgtgcaaaagctgaaacaaaaatgaactaatatctgggctgaactgtaccgtgcgaaaccggtgctgtaggtcgcactgctccgaagctaggggcactcgaaggcaaacgaggtcctgcgaggatggaacatcaagttacgacggggtgatgttttcgtagaaaaacagaaacaaaacttaagaaacctctgggctgagcagtaccgtgcgaaacaggtgctgtaggtcgaggtcctgctccgacggtaggcgcgcgaggccgtggttgtaccggaccagctggaggtacgacgtccacggcgctgcgacaggagaagacgtgcatgaccgcacgcatcttctcctgcatccggtcgaaggtcaccctctgctcaacgtcagtcaagtgcaaacctctgttcaacctcacttggactgcggtgatatcggcactgatatcccgtgcggcatcagcctatgcaagatggaaataaaaaattcagtagttgtcctatattatgcaagataaatgaaataattgtaagaagtaatacaaattggacgtaccgccacgaagtagtctcggtcacggtgcgtgggatacgcgtccgtgacagcggcaacgtgcggctctagggcgtctggagtgaaggtcacacgcgcacgagtgcgaggaaggtaccagcgaaggtagtcacgatagttctcctccgtgtgtgggaagagctcgttgatcacctcctctgtagctaacacccagtcgtcaacgtactgctgtacacgtggagcccaaagtgcgcctgctagctgtccccgtcgagtcaacctgtgaagagaggtaaattatatggctcgatgaagtaattatcataaaaatttagaaatgaacaatccgaactcacgagtggtcggcagggaggacggtcggctgcacgttgcccggaaacacctgcctaagtccgaactgtctcatcacacgctgcgggcagtgaggctcaacgaaaatgtcgaacaccatcggcaggatggtgagccagtaagcctggtcgcgtgtgcacaaggacgaaagtcctagcggtgctctcgcagcgacggcctcttctgtgtacggctcccagatgacgtcgctcggctggagacggtcaaactcgaacacgaagtccgggtaaccacgtctcacctggacgtgagcgtaacgacgctgcaataaacatgatcggaattagacatgttatgtgaagaaaaaaaaagaagacgactgataaacttataacgcagcgaagttgcactaaccccacgtcgacaccagtaagtccccatcgtgggaccgtcctctggccactgcgcgctgcgaccaaccccgtagggtgcgctgtccaccactggtcgacctatggcaaacctctcggctgcccaaagctgaagcaacatagggcagccagcgatgatcgctcccgcgtcagtcttcgtgcacgcctcacagagggcacggtacgtggctgctagcacggcagaacccctgctccactgcggcacgtcctgtggctgagcatccgcgatggaccgtgcgtagtggaccagccggaagtccacagcgtgcccgtgggtgctagtgaacatcacccacccgaacaaccacaacaggtacgcctcaagggagcgtcggaccgagtaatcatcagggtcagggtgcagaaggtccgcctacaattaagaatgaaattttagtacaaaacactcatccggtcgcaaataagcatgtatgataataacaacttatttacttacagtgaactggagcaaccaagccttgctaggcccgactgtagagtacggaggaagggtgttggccggtcctaggtgtggaaggcgcatcacctgctcgaagcgcgcagtgatatcctccttccacccaaaaacaccgtccacgggaccaactggtgctcccgccagcggtagcccgagcaggtacgacacgtcctgcagtgtcggagccatctccccacagggaaggtggaacgtgtgcgtctcaggtctccagcggtctacaagagcggcaaggagtgaccggtctgcatcccaccgcttcgctgggtcacggtcgtccgccgccgcctcaacaagcctacaaagtggtagaagacctgccgcacgcaacctgtatagagcaaacttcaaacataagtacgacacaaagcaaagttgagttgaaatgtgaacatacgcgtaccaaggaacgtgacgggggtcgacacgcaaccactcgcgcgacgtgcgtggacggaaggtgccgagctgtgcaccctcgactgctgacaggaacgagcggtggttcctgtcaatcccacggttcaacagcgccggtgtgtcgtacgccatacctgcatcaaataggttgatcagaaacatataaataattagttcaacataagtaataaatgttcataagcgaattactaacacatactaaacaagagtacaaacaaacaaaagtgtttagtccgaacactcatcaccaggtggtcacctaccatcacttgcctgtccagatggactagcatctgcgccgcttggaacttctgcattcttcgggcatttcttgtaagtatggccgcgcagatcacacttgctgcagcgtaaagtcctcccacctgcttctgactcatccatatcatttctgatgcgtctagtttggcgtcgaccctttttcacccttaacttagatggatctggaatataaaaaacttgggcactcagcgttgtgtaagatcctgagatcccgaacccatatatctcctcactccatgtatgaaagattgcttctttcctaaaataatttgagacgtacacattgggagatatgccacaatcaccggcagcagcaagaacgtgtgagcaaggaaggtgatgaagcttcggcttcatacaactgcaggtacatccaccatccgccttcaagacacattcctgcacggcttgcttgcgatagatatcacgcctgctcctatcaacacacattatttcataccgatgcacttgtgtgccttgagcaacaactcgatgtctccgtgcctttttgattttatcttccatgtactttgtcactacgttgccaaacactatgttgttatcagccatggacggaccaattttcttgtatcgatccctaaagtacgcttgcgtgccgtgaaggatgaattcaacaatagcaaccaatggaagtacccgaactcctcgcattacccagttgtacacctctgccaaattggttgtcattatgccataccgagatccatcggtgtcgaacaatagagaccacttctccttaggctcattctcaatccactgagtgaaatttctgatggacgaccctgacctccttctcattgttggtgggtcatcatgtaatgcaccaagaggtatgggaggctcgtcaccttcaactagtggtctgcgagattgctcatctgtttgcttcgttgtcaactcatccaacttgtcccacaactcattaaatttcttctcttggttcttgcaccctcaattacctcgttctccttatactcccagggtacatgatcaccctctgatataacaagtccagagaagtcctcatttgcccaatcagtggccattacatcaccttcctcatcggatgatgcgtcgtcgtccgcttcctcattatccgaatcttccctctccatttcatcaacaattataccgactctctccccctcatccgccatgcccatagcctgctcctcccttggttgattttcctcattttgcatcgatggtccaacaacatcccctgcattgataggaccctctacatcttcggtttgcattgaaacatttatatctttctcttgtactgacacaaatataacgaggggccatgaccgttcaaaagccatttccacataccgtctccaagcatcagtgctgtccatcggcattagttcccaaaaataaccttctgttgcacgactcactacaactgacactgacattgtgtagacttcttggtctattctaaatcctctcaacaaccaactataaattgactgaaatgttctctccgcaggcctatcgatgcccttagatgtcattacaaaatctgacagatcaacaccatctggaccaaatctaatatttccttcaccgtgaactatctgaaatgtgaccttacttgacattgtgcctgatgaaaacaataactgcgttaacctcgcatttctgtactacgccctaagttacattctctacaatattgttctctaaatttctaaaattacgttacattctccagatcaaactaaactacatcttacaattaacactactatctatgtctcaattcatactattatattctatgctctggatctacacatatgtgttgtgtgctacagatgtgctaaaatatatggaactaaaactaaaacgcaacatatatactcaaacataacatattagtacaaatgcaaaagatgtatgggagcatacctgtgatgaattgagcgaaccagcagggcttcgccgctccccttctgctgccctcccctctctctctttcgttttttttggatttttagtgaatataatgaaatttcacagaggagggactgggctttataggggggaggcaaaaatcgccctcccccagggcggcaagggggccgcctgcaaaattccatgccccccctcgccgcccatttgcaggcggccccccccacagtacaaaatcgccctagcggagggcggtaagggggccgcctgcaaatttcgttgacggccgtcgcccgagagcgaacggccgtctgccacgtcattttcgccgccctctgagagggcgatttttcccagagggcggtaggggactacttccgtcaattttcaaaatgaaaaattatttttgtaaaacttttaataaaaaaaattataaataaaaaaaattcatggaaatttcatatggtcgtgtagtttttgtttggacttcggcacagggcctagttggctaaaaggcccagggctgacggcccggtccatgtcatggggttttggcctagcccaagcatgacatggtccgactggtgtcaggcccgtgccttggcctttacctcgacacgatgggcaggccggctcggtatggcttggtccaacgatcaaggaggcaaaacagacgagggagccaaaataggcttattctagctctataaggcatggcccaaagagacgagtgattcaaaatagacttactccagccatttaggagacggcccaaatagatgagggaggaaaatagactttttccaaggaggagcatggtggctttcgtgccttcggtccggcccgagtcttattaggccgtgcctaagctattggtgcagtacattggcggcctgccccggtcggcgtgtatgtcgggctggcacggcccgactcttcttgggcctgggtcgggtcgtgtcgggtggcccagtttgccatatggcctagagggcttcaccgagaaagaagtgtttagttcacgttaaaattgaaagtttaattgaaattgaaacgatatgacggaaaagttgaaaatttgtgtgtagaaaaattttaatgtgatagaaaagttggaagtttgaagaaaaagttgggaactaaaccagcaagtctttttttaagggttacatgatgagagagaacactggtggtcgtctggtcgggtgaccggaggacaaagatacgatacatccagtcctcaccccgccgccgccatccaggcgccgacgacctcccatctcggagccggccggtgaccaccgtgccacccttcttccccccacctccaccacgccgccgctccacccccgcagatccagaacgcatcccccgccgccaccagccgccatcccggctttgacgaccaccatccggagcaggtgaccactgaccaccgcgccacgccgcatcccccgccatccaccacctgccctgctcgcgatgtgagctttcctctataaacttcaccttcacctgcccagtccagtggcggctcatcaaagattcacaggaacgatggcagccttcagatgtgttccgccatgcctcgggagcaatatccttgatccgggtaggggttttctttcggacaagtgcttcaactgccgcgaggttggtcatcgggtagcaacgtgtccggttgttcctccccgcccgcagcgtgctcgaccggttgccaccgggaatccaccacgctccttgtcaaagctgcgagggaagtgcttcaattgtctggcagctgatcaccgtgtcgcggcttgcactcatcctccccgttgcctttgttgttggggataaggccatttcgctcggtggtgcccttcttcaggccacttctcctcagcttcacagagggctgtccctgttgcctactcttcacagagtgcagggggataccagtcgatgttgatcacgttcaatgccgacgcgatttctacagctttgatttctcaagctattagcgagaagctttgtatcccacctgccgnnnnnnnnnnnnnnnnnnnnnnnaagatgacaaatgacaatgttggtgccgagtcccgggtggaggttcttccaaagatgacaaatgacaatgttggtgtccccaataaggtggttttggggtgccatttgccagatggtcaggaagtgccctcttctccacccgagggagatttggagaagcttacagcagcgccccttccttcagttgtatcgcccctttctccgagcgcacctaacacagccgtcgcattgactgtttcaacatcccatgggagtgttccttcatctctcaatgaaggacatggggtatctagcaagatagctgcaccaaaggaagagcatgttactccaactatggaccctccatctaggtgtgagcatcttcctcttgaggttgcaccaagcaacctggtgacagataaagcagagctacttgagatcacaaaagctccagcggtgaagaataggttggccaaaagagtgcggcaaaagattatcactgccacctctcgaagaagtgtccctctaccttcaaacatgaagaaaaggcgactcctcattgaccaaatgaaaacatatgtactcatgaagaagctaggcattatcacaaaggatgaggaggtggatgaagacactatggataggtgcattgcgttcctaaaagaggcatacccgggacactatgttcagcttgctgtaatcttatttgggctacacaacgtggctcgtgttccaggaccttaacctagattcatattagtttggtcagatgcgtgacttgtttaggtgttttaggtgttttgggtgctttggtgtgacttgtttaggtgttgggtgttttaggtgttttgggtgctttggtgtttgcaggtgtttagtgtagctttggggaatgtattatagatgttttggctgctttggtgtttgcaggtgtttagtgtagctttggagaatgtattatagatgttttggctgctttggtatttcaggtgtctagtgtagctttgggtaatgatcttgaggtgcttgtaggatggtgttttcagtgggaaccctttcttgggtcgatgtgtatctcttctttatcaatgaaatgaagcagtttctgcctttgtttttttttataaaaaaaagagcataaacttgaaaggcatagggatagccttcacattaaattatgaaatgcataagcattatctatttgctgtagtaaaaagtgataaatatgggccctacaatacttttttttttcaaatgactcttacaatgataggttcatgtgatcttgctgaccatgcacaaggttttagcagaaatattggcagagggtgaaaagtaacaatctaatcagcagttaaggttcgaattgaaaggtttttttactctatatatatatatatgtgtgtgtgtgtgtgtgtgtgtgtgtgtgctgctcatcttggaatatttgtttgttgatgttagtgaactttggcaaaagggggtgttggtgaattctgggggagggatgtgtgggtgggtggggaggtgtgtgcatgtgcgtgtgaaccatctacattactactatgggttgcaaggatatggtctgtgactgagtccaccttgagttgagtatctttaactttagtgcctttttgttttatgttgtgtattgacattgttgccctgctgcattctttttctttccttttctttttgggaaatatgcaaaaggttttgcatatcagcaggttagaaaggttcgcctacaaagatcagatgcttgaaggccgaagccaacaattggaaaaccaatcaaacatgaaagaaattaggtttacactcttgcaacacgaattagcatcctagagagcaaaatctctactgtgcgtattcttctttatatggtgcataatgaaataccttattgtatcatgttactaatttggttagcatgggttatttgatttcaaaatttgcacttgtactctttaacctgaagtatcaaaatggattttaactactctgtgaacaaaaggatggctcctaattcaggttttcattgttgtacccaacaataatcaccatggttttaaatcattagctactgtatgtgctagtaaaactcacttaactgattgtttctttcaaatgcagggtaccgatcttgttgttgctgttgatgatgatggtttcttcaaagacaagatctccgaatttaatggtctacttgtcacagacaaagaaaccaacaaatatgtaatcaatgctgtaaaggtaagtgttttcaaatgttcagttgccggtaacttatgctaactgtaagcagtaaatttgcattcagcttgttcagaaaaaaatcatgcgtttttttacttgatgttttgtatgctgaaattgtatgctacatgtaatattcagaaaaaaggaagacttgttagtcacggaagcgttatacataagtatccatactgttggagatctaatacacctctcatatatcgggcagttccaagctggtaggtattttctgctggtgtaaatttggaccatatactagcacattcttctgctggctttaaattgagctgtagtactctgatattcctgctccaataaaagtttttttttggcatgtttattcttaaaaaaacgccgaatgcttatctgaaggtttttaatttgattgaaaaattgaatatagggctttgaattgaaatatactgatagaaaatacatttccattttttttcacatttgggttacttctcttaccttttgtttataccttttgatgtaactcagaggaatgtagcctaaagatctttgttgtagtgtaggttcatcagagttgaaaggattagagatcagttgctggaatgtaataaggagacatactgggtgcctgattacgttaaggtatgctgaactttgtgttttaatattggctttcattatttgtattgttaacatctttgttatataaatgtgaccaaaggaaaaccctgtagtcaagtgttgtgctactcgagtgggctaccacctttgatgctagcctttctctcatgtaatctgtgtgactcctttcaaccttataaacattggcaggcagttattttccagcccagaaaaaagggtggaagacacgtagcaggaaatcttatattgtaaattctgaaagagctaaaatcaaatattgttcctagcttagcatgcttgttgaacgagttgtttgtccttaattcttaacttggctctttcttggatacagagacaattttcaaaaccacttgctccttcactgatatttccaatgacaatcaattagtagaaaatttcatccaaaacatttttaaaactcaaatttggccttttagccagaatttttatttttttgggtgctgggccctgattactcaaatttaaatgtaaaatgttccatctttttggcaagttagattggactgataaatatttttagaaccaacataaaaaagctaatgctgttttcccctgatgcaaaccatgaagttcagtacttcaatgctcattttcaaaggtgtgtttagttttgctctttgctgatacttggttgatttctattctgatgctttcatggtgtaattctgtagtactaaatttgtaggtacaggacattggttgtgctaacatattatgtatggatggacgctctactgctacttcattcatgcatatgtgcaaccaaatcatttctcatatcagagtttgcacgtgactttttgtcatgcgttttcagattgcacgtttaagactttccatgtggtttcttgccggtgtttatgctgaaatgtttcttgttacttccgagaagctcttgtgagagatttagtttgtagtaactaggaaaccacttaagatttttaataaattgttgcaaattgattttgtgtttcttttacctagatttgtggttcttgacaattcataatgcaggaaaagagattccataactggcttgaaggggctagagactgggctgttagccgaactagattctggggcactcctcttcctctatggatcagtcaagacggagaagaaataattgttatggactctgttgataaactcgaaaagttgtctggtgtcaaggttaattatctttgttatgagagttttttcccctttgctggtcaactaacgccggtccactataattttaatttgagagtagtactatttttttttcatatttcttgagttccaaaatttacatagcacttgacacaaacctgttctaatataaatcctctaaaaatctttaccagattagtgatcttcaccgacaccatatagatggcatcacagttccctctcagagaggggaagagtttggggcgttgaaacgcgttgatgaggtaagttgatcgcaactcataattttacatcaccttgtacctctcaatttccttgagtcttgattcatgtcccaaacagagaaaaaaattatttctctgttcttgtttaagatgtacttttttgatttggattattaggggacactctacctaaaaataattttctaacatagcatatgcaaagagtagagtagtgttcatattgtatgaaaataactgtaggtacatagttccacatcttattgcaaattcatgtttgtagaatgcttttacctaatcttgatcaacaattataaaatgcatctgtaaaatattatgtctaagtttagaaaagtttagattgattattctatttataacatcatagaagttcattgagatagtgtaatatcttaaattattagtaatatcttaaattactaggaaggcatatgaactgtagcgtggccaattcatgttcatcttttttccccttttgtttttcatgcacttttcagttttgagtattaatgtacataatttaaagagaaatcattcatccaagttatattgataattcagcatattgcaggacttacattatgagtctagatttgcttaatgcctgaacggataaatagctattgccgtgtgttttagtggcataaattttaatgctatcgggagtctatagtagaagttgtagcctgcaatatagggtattgaaataagctagcccaattggaagcatggtgcatactaaatttgatgaattcagcttgattactccttgaattatatgcaaatctaggtgttgtgaaatgatttatgtcaatttcatacaagttaaagcagtgatgttggatatcatgtgtataccctgtcttgtcttcactgatgactgttataaattgagaaagtatcttgtgctcaccattcaggtttttgattgctggtttgagagtggatccatgccatatgcctacattcattacccatttgagaatcgcgaactgtttgaaaagaattttcccggagatttcatagccgaagggttggaccaaactcgtggatggtctgttttatctcctgatcttttatttaacagctgttcttttttaatttcccttgatggctcaacattgtaccttttttcggagttcgttctttctgtagattcatgatcataaaacttgatagtattttgtgcatataaaattttaatcgttaatgcaatttaataagaaaaccttgtccagatgtgcttacctgtttacaaatgtgtcgaaggacctattcaacatataaaattttggatcttgcaggttctatactctcatggtcctgtccacagctttgtttgggaaacctgcatttaaaaatcttatatgcaacggtctggtcttggctgaggatggcaagaaaatgagcaaaagtaaaaataattacccttcacccatggaagtcattgataattatggagcggtatgttctagttgaagtcagtgatattggcttatgctgcttatcattttactgatttatgctgcgtctagattttttttatcttgattatacatatgattaattttataacttctgagctgcgattcatacgttcaacatccttttcttttccaggatgccctgaggctatatgtaataaattctcctgtcgtccgtgcggagtccctacgattcaacaaaaatggtgtccatggtgtggtaagtttctttgttccttgcatttatgtaattttatatgtttcattcatagctatattcatatggtcaggctactgatccacatattggttatacttctccagttatgaattatgatagtttttgagaaaaatacttaacattctttgactcaaccaggtgaaagatgtcttcctcccatggtataatgcttatagatttcttgttcaaaatgctaagaggcttgaagttgagggtcttgctgtattttcaccaatcaatcaagctattcttctgaggtcatctaatgtgctagatcactggatacagtccgctactgaaagtctagttagttttgttcgacaggagatggatgcatataggctttacacggttggtcatctttgattgatatttgttctcaacttctgtttcttttcatatttatgttgtgcttgatatataatgataattcattatcttacgttctcaacaggttgtcccttatttagtaaagtacattgacaaccttaccaacatatatgtgcgtttcaatcgcaagcgtctgaaaggtcgtactggagaagatgactgcaggatttctctttcaacactttaccatgtacgcagactttcagtgattttctgcttttgacaacttcagctgaacaggaaaaaatgcaagtcacaacaggatatatttttgggataagatggtggttaatgtttcaatgattatctccttaaatggttaactttgtgtttttgttttcttgattctcattccttcatgtcatggaattatcttgcaccgtttctaatccattttctcatgttcttctatatgactatatatttcattaagctactcctttttgttaatatagcacaataggagactcctttagtcctgttgtagtgctgtttacttgtaaaaaaaaggctactatttttgcttgaattcaacaagataagctgcctaggaatcagaagtttgttcccatggcatgtatttcacttatgtggttccttccagattatgcctagtatgtagaaataaaatttcttgtacttatctaagatattttgatgattaatttaggcgcttgtaacaacttgtgttgtgatggctccgtttactcccttcttcactgaagttctgtaccagaacttaagaaaggtgtccagcaaatcagaaaagagcattcatttctgcaatttcccttcctcaactgggcaggtactttttttaatcagtttaatactcctcttggttatatgctgttctaccagaagtcagaaaattgtatacagtgtgcaacttatttggctctatgatcagatagatgagcgtgttgagcacagtgtcaacaggatgatgaccatcgttgatcttgctcgaaatattcgggagcggcataacagacctttgaaaacaccattaaggcatgctcattatacaactatactatttacacaatttcttgttttatggtgaattgattttatacatatagaattgaccaacagacctagaaacaaaagataaatctgcatcatgaacagttccttcattttttttctttttatgtttgtcactcggtgacttgaatcaatcgacatatctaaaaatgattgcttattatttcttgtttcccaaggcctatctagctcatgtataagctctttaaatatatttaactgagtaactttcttgactttccagggagatggtagttgtgcatcctgacaatgattttcttgaagacataactggaaagctgaaagaggtttacagcgaaactaagattatctattaaaaaactcccagcatcccgttctaaatttatgcaaaattatatctgcgatcagctgatcacttcagaatattctgccttcttttctccatcacatagattttcaatattctgcatgttttcatttttcattctcatcatttggcgactatgatcatatttattgttcaatatttgagttattcctaattatggtaagcattatgtgtttatatattgattccattttctgctttgtagtatgtcaaggaggagatgaatgtcaagatggtcactgcttgtagcgatcccttagtgtattcatctttacgtgctgaacctaacttcaggtaattaatgcctatttgaatgtgcttgaagacttcctttcacatttgtagctgttttctaatattatttgtgtttctgtagtgtgttaggcaaaagattaggaaaagacatgggcaaaatatcaaatgaggtgaagaagatgactcaggatcagatcctaacatttgaggaaagtggcgaaatattttttggcagtcatctcttgacgttggaagatattaaggtaatagtattccttattatggtaaaaatgtacccaagtgtttattttgatcccactgacttgttctgttttcattcaaacaaatgtcagtgttaagggattatgcctgaacattgttgctagaggaaatctttctcccttaattaagtgatctttgacttcatggatatttgtgactgatattaatatagaataatatttatccgttccttcaatttcgttcttaggtttttcgagaattcaagcgccccgcaaatgtgtcagagaaggaaattgatgctgcaggagatggtaccttgcaaacatcttcacatagtttcagcatttatggaaccttttcttacctcacttgatattgttgtaggcgatgttttggttatcttggatctccaagttgatcaatcattgtttgaagctggagttgttcgtgaggtgattcaaaaattatgtcttatcatttggagtatatataatgttccatattgtagatgaatttctttttagttataatgtcaaatactatttggatgtttccttgttcataccaagccgagtagtgctttggaccaaggctggaaaagtccggctttgaaatgccaggcccaagtttggttcccagtcaaaagtatagtttttctatgtgaaatatcaatatttaattatttctgaagatttatgaataaatatcatgcctctagatgatcatgcccaaatttctaacttctcctagctattgccatgataatgtggtattacacatgatctgcaaatattacctgcaaatgtaatttttctacacatggtctgggttttgcgttatttaattacatttaaagttttcatcgctttgtctcttccattatatcttgttcaatttctgattactgtagtctaatgattatgaacatttttaccaggttgtgaacaaaattcagaagttgaaaaagactgctcagctgagactgaccgacccagttgatgtttactacagttcacaggatagcagtgatagctctctcgaaaagattttgcaatcgcaggttagctagttacttaagctaattatatgcgctttcatggtttgctccatgatatgcatatatggtggtgttggttgcaggatcaatatattagagatgcacttggttcccctcttacctcgaaggcacaggcacaacccaatgtggttagtttgaatcaacatactttttacatgacatttcctgcttgccttttgcatgcgtgtgggatatgttacatctgcagtttaaatttgaagttatgtatccaattttttatatacatgtaataaaatgtgagatttgcctgataaacagtacatatttaagaaggatttactattttatatgtttttagaagttatattagttggtataccgtggataaatattgtacggatctccggttgtctcaccatctcagcttttcaccttgctcgcagaattttaaacgtcttaaacatgcgaatattagttatccattgatcatacatattgttatggttttgcaggaagtaatctgtgaggaggcctacaacgtacgtggcatgtctttcgttatctacgtggcaaggtattgccatgtcctttttctgtttatctgaatcttattctgaatgtttgattatctgaagagtgtgtttcacactatcacaccttccgtttactacaggaaacagtgaagcttgttcatccttttatcaaggtatattctgaccgaagtctgtcgtccaagctagaaaactagtttttgcactcttgcattctatcccacataaatatatttcggctatgatatatgatttctcttgttgcttctgtagattgaagatttcccgtgagtagatcccttctttgaatttggaattttattcaaagaaatatgtggttaatgtaattgtagttgtgtggttaactaggaaatagcaccggctattttcgttagtgtccttcccctccctctctttgtaatatactccctccgtttcaaaatatttgacaccgttgatttttttaagtacgtgtttgaccattcgttttattcaaaaattttaagtaattatttattcttttcatatcatttgattcattgttaaatatactttcatgtacacatatagtttaacatatttcacaatattttttgaataagatgaacggtcaaacatgtgctaaaaagtcaatggtgtcaaatattttgaaacggagggagtaaaaggcaacttggcaagtctttgtaaatggggcaattacgtaattaaaataacttcacgagccttgctgtaacatatacaatcagctaagcaggcctgttcaaaatagaatgaaaaagttttcccacaaggattcggagctctgattttctggtcacagtttaaggttaagggagtaggttgtatagcagagtttaaggttaaggagaaactattttaatgccctaaataagtatagttttcttattatccctaaataagtatagctttagttagccagtgacatactaagaataatatgaccattaatatagagagaaatcgagaagaaaagaaagcaaggggggagtattattgattcaatgatttaaggaggaagcactgttgattctatgattaaaaatgagaaaaagatgtactattagggctcctttgatttggaggaaaacataggaattttagaggatttcaatcctataggaaattttttccctatgaagccctttgaaacaaaggattgaatcctatctaatcattcctatggaatggacaatcctatagagattttggaggaaatttagcaagagcttcaacctcttgctaaatttcctttgagtctatatctctcattcaattcctgtgtttttccagtagttcaatcaaacgatcattcctgtgtttttcctgcgttttgcaatcatctgttttacacttatattcctatcaaaatcctatatcgttcctattcctacgttttctcaatcctgcgattcaaaggggcccttaaagagttatagcgaacctctagaactacctatttagatactcctacatgcttgtttaggaatggagtggaggtagcagagaagatgactaacaatgataaatagtggccgggtgaattaaaaaaatatttactctaaaattatttatattgcaaattcttaaccttaaaaaaattccttatataaagaaggaaattgttatgcgtgacttaactttttagataagacgaatggtcaaatgttgagcacggaaacttatggctacacttataatgggacggagggaatactaaattactctcgctattaaagcatgtttaatagagttgttatttttatactcttcaaatgtccatttaaccaccttgaaaagaattcacagactcaaatatatctttcactcgaagaacaaactttattagtcacctggtcacgctcacggccatattcgtctgaaactctgaacaatggtccatgtgcaacaacacaaggatgacccaaactcaatcatatcaacaacaaaaacaatcaaagaaacaaaaaaaaaaaagagagcactcttcactcctcgatgattcctaatctagaagtcctaggatgaaagcacttgatcctattcctaccaccatcctgcctcgacttccgcgacgcccgcgccaggaacgcgcgcgccgccgccatttcttcgccctcctcctcctcctcctcctccgtcgccggcggcggcacgatcgccgccttcgccttcgccgtcgccgccggtgaccggtgcagcctgcaccggaacgagcccgggtgcgtcgtcggcgcgcacaggcagtacttggccaccgccgcgggcgcgccggcgttcttggccggagaagaagaagacgacgacgacgacgaggagttcacggcggcggccatgggtgggtgcagggtgacacttccagccaaccgcagtggcaagcgaggcgagtgattaattttgctactaatcgaagtgaatgtgaattaatgtgatcagttcgtgtgtccatataaaaggttgagaatgtgttcgctttgggacgcaaaatgtttgttggtgttgagcacaactgcctcctcgtttggaggcagaaaaaggctaactgaattggagagagatcctacaaaaaggggcgtactttacgtttatctggatgaaaggataagatgtcgattccagtgaggacaaatataatcgcggtgtaaagcaccgtttgctatcttgaagattgtatgatttgtctttgtgttccttgcactccggtatgttttcttgtgttttttttaaattacatatagaagagacacaccacacccacacagcttaaaaagaggcgaaacacattctccgtgatcctggtagtcgatcagtcgccaaaatggatcacaagacattcgacgtcggggtgatcccagtgacttggtttgtctggaagaaacacaaaagggtgtttgatgaaaaagcctccacgatataacaactttgggtggtcataggagacgaatggaaaaccaacatggaggacggcatgcattgaagagcaggtacaatagcatgctataaaccagctgcaaacatattttaagaagataaataaggagagagaagaacagcgggctacaaacatattttaagaagataaataagaagagagaaaagcagcgggctataaatttgtagacagctgtagcacggactacaaaacacagtgcgtatgataggtgggaccaggtattaatagtgtagtatataactattgtatgaatgagctattagattggctatagatgaattggagctagtagttggctatactattaaacttgctcttagcccgatagtggtggtcggagtgcagttaactagttctctaaagttttagagtgggtacaatagcatgctacaagttagctgtaagcacatgtggaaaagagaagagaagagagagagagcacggactccaatacgttgtatgtatgagaggtaggaccatatattaatggtatagtatatgtttataggtaactattatatgaatgagctattagattgactatagacgaattgaagctgctagttagctatactattaaacttggtcttagggtgtgttcggcatcctgttttcccaactctcccctttcgtttttcgtgcgcacgcttttcaaacggctaaacgatgtgctttttttataaaaagtttttatacgaaagttgtttaaaaaatcatattgatctatttttgaaaaacaaattagctaatacttaattaatcacgcgctaatagaccgtttcgttttccgtgcgtaccgttccttttgggaactggctgcaatgccccttttctcaacccatctctctcatttttcgcgcgcacgcttttcaaactgctaaacagtgtgttttttgcaaaaagtttctaaatgaaagtttcttaaaaaataaaattaatccttttttaaaagaagcaaatacttaattaatcacacgctaatggaccgctccgttttccgtgatcactctttaagatagaaacttgttctagcgaacacagcctaagtagccttgtaaaaatgtggttgtaacagcagtgcattgacgtattgcggaagagcatcgcagcgtccgcttttatatttccttcattttaaaatgcatgacttgttaatatttcatatatcgtttgatctttcatcttattttaaaaacatatatttcatttattttgttgtgacttattttatgatcaaacaaaatataatcttaacctatacttttacatatttatattaaattttgaatgaaacaaatgaacaagttatgtgaaaagtcaacggtgtcgtatattttaaagggaggtaagacattctttctaaactcttaatatactttggccggcgagcggcgagacatttcaaatattccagttagcagaaaagcaaaagtgttttgtgttctaaaaaagagagcaaaagtaagtttctatctgtacatcattctggggctcttcaagagcgctccttcctccaaatgagagtgatgcaccgtgtacggcgacgccgccgccctgagctccacggcgtcgcgccgccgccgcctctccctcgagtgcgccacccacagcaccaccgacgccagcgcggcgacggcgacggcgagcaagccccggtacacctccgcgctgtgcctgccgagccccgggcagtgctcgtcgccgaccacccggaacgcgcgccggacgaacgcgcagtccgccatgtcggcgagcaccggcccgtaccgcgacagcgcgtcgcacgcgctcgccgccgccaccatctgcgcgtacatcgccggcgtgaggcgcccgacggtggcgcacacctccggcgccgccgccgcggcgcgggtggtgcggcacacgcgttcgcgccacgcgcgcggcgcggcggcgaggtcgacctcgccggggtcgcagcgttcgccggggctgcacagcagcggcaccggcgggccggactggttgtagtagagcggcggcgggaggccggcggcggcggcgttggagacgttggcgatgacgccgttgaggacggtgacgaggtggtgcgtcacgtccttgctccgcgccagcgcgtccgcggccgccgccgtgtcgacgcaggggaggatgtcgtcgagcgccgtgcgcgcctgcgggcgctgcacccactcgcccatggcggcgcaggtgtcacccaccacgctgaaacgtcaaggaattcttttgctcagtgtcgagacagcaggtacgtgaggtcgccatggcagcaagcaacggtgaaaatgtagaagaaagtttttaaacaaaacatataccccatcacaaaatatgacttgtatatcatttaaaatttgtctaggaatattttgtctaaaaaaatttacagaaaatctcgacgggatacccttctatgagacaatacctgatacctgatacttgtagtggtactagctgtatggtacccgatacctgtgatacttgttacccggtacctatgatacctagaacctaatacctgtgatactcgtgcaagagaatagttaatatgtctattccgttgcaacaggaccctgttttgtagcagccctcaaaaaatttatcccacaatataacaacttctacacctacatttcattcttaatcaatcataatcttccctcattcaaattgactacccactttctcttcttaaccaattattatttttctccaatttaatatcacttatttttttcttaatatccatgtccagtggtaactttctcttgttcaattctacctgcatccttatattttggaacatatgtatcattttttgagacgtgaagcaaataaaaaatagttttttctagacatggagcaaataatttgtggagtgactaaaaagatcgtagccttacttgtgtagcagaaggaaggtgccacagagcaaaagcgttgctgcaaccagaatccacccaagaaacaccaacctgcatccaaaacaaccgtgtggctcaacaccagtaacagatgaatatttgggaatcttatgccaactagggcaattctttttaattttttgtaatttcagcatgtcaaatgaattagtgaaatcataaaactctaaaggagtgttttcatgcttacacatagacgagtgactccattccgcatattgagaacgctgagaaaaaaagatgcagaaccaaataagtcgcacaaacagattaattacaaaatgtttttgcaatttcaattcttcaaagaggaaaggaacttgttttctcaccgagcccaagaacagctaggatcaacatcgtggcagcaacaacaatcaaaatcttccttctgcaaacagaacaaccgaaataaaagaatttctatgaacatcatcaaggaaaatacttgttatgaacactcataacagcagtatctatactttctatataattggtacccactaactcctaaaactcaacatacaagtgtgtggtatgccacatcatcatccactagcaattactattatttagagtattttagatctcatacaaatatgatatatcatttgtaatttagttgtatttttaaaacttaacacgcaagcaatgtcaaatcaccatcttcacattatttaaacatataaatctatcatttttataatatataacatacattcatctatatatcccgcgctgcggggtgtagtttataaaatatagcaatctataatcgaatgaagcatatcttatcttagtaggacgaatctgaataagagaaatatctatattcgcaaactagaatacgttttttctgattttaagttgctatattttacgacggattaactgtttattttaccattcatcagtaagctttttacccacattgtctccaaggcgtctcggatcttggcggcgttgctcgccatgcgcgccgcgagctcgtcggcggcggagctcatcttgcgcacgacgccgtcgatgctccccttgacgctggccggcagcgacacgggccccacgccggccgccttggccgcctccatggagctcgcgaatcccctcaggctcgccaccgcgtcgccggacttccccgccacgtactccaccgtcgccgccgtgctcccgtcgaaccgcccctgcccgtcgtacagcacgccgcaccccacgctgcaaacaatggcggcggcggcggttagtttagtttactcaccggcggcgaggtgaggtgaccggagaaattatacgtacgcggcggcggcggtgaaggcgaggaggaggacaagggagacgaccagcgccgtgcaggagtacgagccgccgccgccgcggctgctgccggggcagcagcagaagcagcagccggcgaggaagagcgagacgccgaacacgacgaaccagatcgcggccgcggcgaacaccggcgccaccgtgaacccgaccgactgcatgcacgcgtcgtcacgaacgacgagctcagaataaaatcaagaaacggccatggaacaagaatggaggatggacatggatcaagaggaggaggaggaagaagaagaggagctcacggcccagtagtgctcgtcgctgatgttccacccgccggagtagagcctcagcccatcgagaggatccttccgccgcgtccgctccccggcgagcacgaacgtcgtcgtcgacggcgagctcctgccgcctccggccactgccgccgccgccgccaccaatcacatcaaaatttcacacttcttgccgcgataaatcagacaatgcacacgaaatctttacctgcggatgcatcggcggcggcggcggcgagcaatgctgctaagacgacgagagagagcacgatcagcaggaggagaagaggaggagcacgagacgccatgatcacgaacggcattgggcggcgtcaactactacatgttctacctgaatttcaaacgacggcaatggaggagatggcggaagtatcggcaatgaatttgtgagtatttttcggttggttgtttgttggcttcgaaatttgggcacgaacaggtcttcttccttccttccttcctcttgactcttgcaaatttaattccattccagcttgcatagttgcatgcaccgagcgccatggctaatttattttcagtaatgaaatgagttgtatcttatactacaatggtccattaaaaatctgctaatacctctacttttacagaactgtttcattttgaaaaaaaagggattaaattatgctttgacccttaattccatatgatatgttttactacgtcaaaatacagtactacctccgttctaaaatatagctatatagtataggatgtgacattatctgtccagattcatagtactagataatgtcacatcctatattagatatcaacattttgggacagatgaagtatcagatttgacacatccctaatattactatacatttaaacatatgtataatatataccaatattttaattctataaaaatatgttctagtagctgtaaataccaatattttgtgatgaatctgccattaaattttagtacactagatgtatgtataatttggactaatcattgatcaaaatctaacgagacctggtgatgaatttaagaaaatgaacatttcgccatgttcaaaacatagtttcgctagaatgtcatcccaaaacgtgattgataaaatgccaacatgaagcgtatgtctactgccactttgccattttcgccattttatttattttcaaaaagattttctctcctctactagatggtgagataaaattgccccttataaactcagagaacacggtgagagaggagacagagagaaggggcggcaacgctgcttgctgccggccggcgcgccgcctctccccattgtgcgcgtccgccgcggcggccttcgcatgctccgcccggcgatggagcgggtgaccaatgaggagatgatggcgaggaccacatcagcaacctcccggacgaccagctacgtcttgtcctgcgctggctcgacacccgcacggcggtcgccacgggggcgcttctcttttcttctcctcttcctctcggtttctcctctcgttccctttttctctcttccttcttcgcttctttgctcgacgcggcgagggggcgtggctggtgcagcggcaaggctaggtgcgagctggcgaccgggccaaggcgacgacggtcggcccagcacggtggcggcctgagggcggccaggcggcgtcgggtggatggggagagaaggttggcgtggcggcgtcccagcgccgatgaagacggccacgggggcgctcgcgttgctcggccgccaagctcggtctcgccccgtcccacactgccatcgacgccctcgtcagcaacagcgaccacctcgccgcgctcgatcttgatcccctttcagccgatgaggaggggcaatttggtctcatcaagccaaattccagcgaaaatggatttgaaaatgacgaaaatggagaaaatgacaaagtggctgtgatcgcgcgtttcatattggtattttagcgaaacgcgttttcatgatggtattccagcgaaaccgccttttaaaagtagccaaatgttcattttctcgatgaatttagcctgcaacggctgcaatatttgagaccagtggaaagtgaagctgaacttcggttgcatgcacttgcacatttgcgtggctagctgtattgtacgtaacttatgtagccagtcaacaacctagccataaattatactagctgcacaatgtatataccatcaactatacaatgtatatatagctgaaaaaataggcatgttctgatgtactggtacatatacaagcaaatataccgtcaactgtatatataaatgcaaaatagccatgttccatgtgcatgctaccacgttacaggctttgacaatagggcatatcatgcgcttattttggtgggtttcttttattatcgttttaaaagagaccatctatacatttatcaataaatcttctcctaaaaatttatgtgatgtaaatatagtactccctccatctacttttgataatcatattttatcttggcacacagaccaatgataagtaattctacttatcatctatttaaacatgctactagtattcctcgtaaacaagcgattcattaatatttacatttctcaatgaccatatagccaatcatatgtggaagaatggagagtcatgcattaaatccgagaaagtcattaagatgataggttgttggattaaaatatgcctatcaaaaataaatttttcagatttagaaatatgactatcaaaaaatatatggagggagtacaatgtaatttacattgtaacttaagtgtaactacaatgtaactggtatgtaacttttatttaattttgaaacaattagatttactttaagatttgtgcaagcgaaaaaaaaacacaacgcacacataagtgaggggatttggtcccgtgaccccatcctcgtgaaaatagcatgttatcgcaagatcttttaaaattatatacaagttgtatttatattgtagttacatgtaagttatgatgtaattacacaatgatcacattatatttacactatcaaatttttatgagacaatttatagataaatgtatagcaaaaactgctttagaatatagttataagtatttagacatttaaattttacatctactagtgtcatgtgtgtatgtcgcaacggtgttggaagaaatacgaacggatggttttaggggttttttttgcctgagctaatctttattttcatggcatcaattgctagccgactgtaaattatcatcgttgttagtcgcgcgtaattgccagccgactttaggattttcatcatagttcattttttttcccatggcttatcggcttggatctatctgaagacttaaatgaatagccattgctgttcagaatccgataggacacaatcgagcggcgtttgcttttgtttgtttttgtgcagctgagtttaaattcgaccttatcctcggtgaaaatcacaagccgtgccactataactgtatagaagctaatcggccaattaaatctagagagttactatacaactgaatcatgttaggacgtacaactgaatcctattgggataggatgataccggttaggtatcaggacatatatctctaaggtatactttttccgtaaaaaaaaaccaatcctatgtttgaatctagacacatgtattaggtttttttatttttggaacggatggagtatgtcctgatactccagacaccaaagcatcgtcgccagtggtcccattgtccacgtcccacgtcagagctcgtcgccgacggccgcatcctccattgtccacgccacaatggagctcgttgctaacgggccagcaacttggtccatttatatatggcccattcaattattgatctcattggtccagtcgcgttgcccatttcttttctaaatgggctttcacggcccattaattggcctagatgggcctcaactttggctaattggcacgggcaagcagggacacagcccgaaacgcagaacagagtctcctcccatcacatctgcaccgacaaacaaaatgaaaaaatgtcgaatttttttcatttttaaatttttttcttttaatatttacagaaataatctatcggcgcaactagggcggcaagctaacgtggcagacagcagctcgacggcgccgtctgccaaaaagcaatttttgcagccctgaagagcatttggctcgtactttttgcatctgggccccttgccaccctaccagaggacggcaagggacccagatgcaaaaggtaccagccaaaaagtactagtcccgggctagctttttttgcaaagggggggggcggcaagggttttcgtgcaaaaaaaaaaccctccctctcccgtctgccgtcaccgcccgtccctcccccatttgccacgtcagcttgccgctctagtggagggcggcagggtctggattattttttgtaaatattaaaagaaaaaaaatttaaaaatgaaaaaaattcaaaactgtctcgccatgaactccgaattttgcagatggtagtacctaataaatacagaagtagctaccaaattggacgacgaaatcctttgaattttggggctgaccggaaacgatagctgctgcagaagcaagtactaccaacataccttttgcaaatggtactcccttcatcaataagagttacttattttatattttagttttttccaaataagttatttctatttgcagtctctatacatccaacacttaaatgaagagataaattaaatgttttaaattaaatgtttgatcaaaatctgagcagctatcttaatactcattggttgcatgcagatatacactcattgatctttattatatgcaagatgagttaattttttttggttttgatgataataatgtaacttttatggaagaaaggagaacaagataccacattggaggatgaaatcctttaaattgtgcagatggtagtagtacatcaattcagaattgagtgtgatacaaatcgaaaatccaacaagctctcgagttcttcttttcgatgtgtttacacgtccttctcgggatacaacaagaaatagtctactactactcactccttttacaaaatttacacattcttttatcacaagaccaagaaaaaaaaactcatcttgcatttaataaagatcaagaagtatatatatgcatgtgaccgataagtattaagatgatttctcaggttttgatcaaacatttaatttagctttccatttaagttttggatacattaaaagttacaaatagaaataactcacataaaaaataaatatgaaatatatcaacttggagagagtacaaacgaatgagctaattaatcgtcgcattctctagtcccctcaattacgcttaaaatacatgcataaaaccatgctcgagattcgtgttctatagctccggatttcaatacaagactgaccagatctcaaggccttgtaaaaaaaaaaaaaaaactaaaccaaacatagtgcaattaacccctcgccgagccgatcagcaacagcaacagggaggcctacggcgatgaggcggccacacgagatcccatccaacgcgtggcccgacgcgcggcacgtgaccgcgcctccccgcattaacccccccttgtgtcagacccccctcacgtgaccggcaccaccctcatggcccaccgccccgccacgtgtgcgtgccttggattttctacgcaaaggtcgtacgcccacacgtgcgggggcgctgcacatgcgcagcggttgtagcgaaagctaaaaaaggagaaaagtactattataaaaattaaagatgtttttaccgatactttggtacgtcatccgtgtatgagtatatttgtaatttcgttcgcttttagaaatacgtaaggagtcatgtaagaaatctctttaaaaaaaacttgcatattaacgtgagacgattaaactcctaaccacagctcatgattttctcatgtgattcaaatcctaagacttcacccgttaccatgtacgggtattttttctataaaattaaaattaaaaaaaataaaagagaggagttggaagttgggatctcgtggaccatcgaatttttctactgtcaccagttaatcctggccgtacatcaccgaccacggacactggcatctggggccccgagacgtgggcccacttgtcattgggtggcggtaggttgagggtggagggatggaggggttttgggtggcctttgcagtccggtggagagatttgaccgtaagaccgacaaagtgatgtgttagaaccatgaaagattactgcgatttactaaaataatggcatgattataatattataatgagatgtctacttgggtgtagtgtgtgacccaacaagctatagctagtagtaaaaccagatgcatgatcaaataatagggtgacctacaaggaggctacagctagaaacaagaaacaacaacatccattgcttacccattactcatgggggctaattagcagctggtccttaatttgcttagacagattaacaacgtgatttttaggtcaaatcctagtagctggatgctaggggaaattaaaaggttgtaggctttggagctttgctatcacaagaaccgggttgttgttattccatggattattgataggtacatgcatgtatcccattccccaattcatgctttagccttgtcataaaaatataataatgtaaaataaataaaaagctttagcaaattccaatctctctctgaataaagcttcaggtttctttgcattttagaaaggagaatctcgatgtagctttcctatttatgcatgcaccactgatgatatatacagagcattggcaacgtattatgtacctcattcacatgtcatgttctgatgctttctttatctgacactttctcctctaatccccatttcatctgcattcaacaccatcattgtgcagagaaagggagtgatgaaacagctgttcctgaaacaaccaaaattaaatcagatacattcaaaattaaattttaaaacttaattttagagtgattttgatgttatttttccagcattggtttttaagtcgctaagagcacacacataaaagttttaagttttgtcgctgataagcgttacggtttataatcggctttaggcaaaacaataagactctaaagaaactgagaaagaactgtctttctttgtatctggagaccaggtgaacatggaaagattaagagaaaatgcatgaatggtacacaatatcaaaaggtatcagagatgaaaagtttttgcttttgttagagccatgatatatatcacttaatattccgtttgacttccacagttgaaagaccagtcagacattttaaggtgagctgtccatcaactcaccctttcagggacaatgggccaatctctgcaatgcagttcagaatattaggatgcatcgtcagataaatcacatcaggaactctgatccatcggtacagtccagaaaaatgaactctatgcatgatgcaaagttattcttttgcgaaccttgacagaagcacacctgggacagaccattgcagtcctcatcaaatccacacctggaaggctagaagtcaagccaaatcacagctgttagatttaagcagtagtagttatcttttgaaatcaggaaatcttgcatgtataaacaccaaaacagagacaatttatctatttagtgcaaaggagtagtaacttaggccaaaaaggttggatataccatgttagaaaggtctcacagcacaagtacacagtatataccccataaagaaaaagttcaaatctacattgtatttgtacctgtattatctccattgcatagcattcaaatttgtattcaaaacaagaactgttgaagagtaaaacagattgtaggttccaaaaaagtttaatcacagaatgcataacaggtttgagtttttgtagtttaccatttgagatataaaactcaagtaaaacaacagctagcctgtagcaaacacgatggggcaaagcccaaggcagtaatttgttagtggagactggtgatttatattgtatgcatgtgttgcccaagaaaggccatcctctcccccacacataagcctccaaacaaggaatcaaagggcttcttgggcactgcatttgtttaagagtggtgagctctatagccaagactagagattggagctttggtcataagttaaaaagtttggacaaggattgggaaacactagaaacagcatccacgttctcctcacctccccacctccctttctaccctttatataattgtttttgtatgctttgttggctcactatgtacaagtcatgcacattggtccaatccccaagagatgcagcagattttaatgttaaaacaccagacctttccatgttgcaatgccaccagaaatgagcatttgtgaacatttcttgtttattgttggaaaaaagagagacaatatatgttgctgaggagtaatatcccaagtgactaaaattctacataaagcctttacccacataaaccatgttaacagttgattgcacattttatctgtttgaatggtagtctgtcataatttctaaaggagaagatagaatggtaaattaattaataacgcaaacaataatttaccatgtcacctaaattgcatatgaaattgtatgattgcggtcaagcaaatctaaatggggcgaacttgatttatgcttcactagccaatcctgaacagtcttgtaaaatgtaaattctttgaatttcagtactgttttgagttgaacctgacaaaatcatgatagattagttgacttttctctaagaggaaaaaaaaccttttgtggcaatttttctataatctcagagaattttattggaatttttgaatcaactctaacctcttaagataaatggtccaataaaaaactaaattttgtaaaatgtagtatttgattatcataatatcacatccagcacctacaacggcaattccggaacatgttcttaataagatgcacaaagttaactacacatggctatcactaccctttcataaagcaaggtgcattccatgatagtgccagagattaaggagtcaaatgtcaaaagccctagtggtgcaaatatatagccccccgtctatggttgaatctttaatccttcttatcccactaaacaccccctcctctcatccttcataagttgtacgtatcctccttcctcacagcacctcaccctcaccctcacccagccaaaaccacacacaacaccaaaggatttcacatcaacaacacacatgatcatggtgaggattccaaacttcttcatactatcatgaaaattctctctatcaattgaaaatttacttggaatttcgcaacctcagcaggctatgtggaagccagcatggttagaggccctgggctgcaggaat

SEQ ID NO: 23354 - DNA, 879 bp, Oryza sativa
ggaagatttcttaatctttatcccttttcctttgcaggagtagtaggagacccagattctcctgcatcatttggtggatggcttaattattcagccactaaccatccttgggtggtgtcttttgttgtgatggatctctttcttttctttggcgttataactctaactgtagttcaagcatcacaggtatgaaccaagttggtatttgcctcccttttacctgtcattatactatttgaggtctgacacccagattgaatcagtatgtacacaacccatatatgtaactttgtaacttaataacccatatatatacttgcctttagcttgctgttgcattgctcttttggcagtgcatggatgaattattcaatgaaaaccattactcatcaaaagcagtatttggtcatttccattcacactgatgtataattcccttatcatttacatttgcaatctctgatcaaaatccacctaatgacaccatgcttccattttttgttttactcatttctatgtcaatatatttgggtgtgaactgccagccaacctgcatttcttttgtctagtatatgacttcaacacaaatccaatgtgttaacggccctgttaatatgtacacacacttttagagatcgctcttgctacttgtggcatgattcttcatgcaatcattggtcctatctattatattcttaaaacagacttgaaaggagctaccacgttcattgtggatgctagaaattcccacattaatcggagaaaaagaaaagaagagttcgagtagaaatacatttagaaataagtgaaataaaaaattattgaaagaagagtccatgtagaacacaactagagttcgaaatttttaaaaaataaaaa

SEQ ID NO: 23355 - DNA, 1950 bp, Oryza sativa
aatagcctgatgtaaaaggggaaaaacggaagagtagtaatacaccaaggaaatggaagtcttaagaagaagaaatatcaatatgttcataatttgttggcatcattcactaaatcatagaaaaggcataaaatatttgtggggtggggtgcagtgaggggaataaaatccaggaaatttgagaaatttggatgcagaaaactgctgtgtttaaggttcaaatcttaggatgaagcatgaaactcaatgtttcaaaaataccacagtagtacctacaactattaatttaaaagagattatagttctaacaaggtgcggaatataagaacacctatttcactttttggtgaatcatcctagaaaatgatgtatcaagtgagaactagattctaaagcagcacagtttggacattcgatctcgtctgacttagtggaacttcggtactcagcattgagaagtctgagagagaatatgttgagtacagaagattcaaaaatgtaaggtgcaaagttgttcctttttttttagcagagaaatttctctattctacatatctaactgagatatctgacatctaataagatctcagattgtgagtccataagctcttattttagatgaattctgacgtgataaaccataaattgttcaatgcatagagatattcatattaacccacacattttcctttttaatgaaaacctcataagctgtaatttttggacattcaagtcttagagctagtttatggtctatgctcttcaatttcctctatatagttccagtaaaacagtgcattatcccttttccttacatccctgaaatgaaaaattaagtacccaaaatcaattaagaatttatgcaagcagaaaacagtagtattgtaatgtaactcctatcaagtccatgagcaacactccatcattgacagaagtgtctatgcatagagcatctgaacccaataagtactcagtgtgccctttctcagacagcacagatatatgggtgacacttcacaataggtgaagtcaaccacatgaactactgaaggacagccatgctaatcacctcaaacagtcaaccaaattaagaaatatcatcattttatgtttttggggatgctcggtcaatacagtacaaattaccaaatagtaaaggatgagttgaaacctgatttgtgaagatctccagatatgttgactgcagacatggtaggtggtaggtacacaatagagccgacatattctgaatagtataaccaggttggtaaattattttcctctactgattagccatgaatcacaccagatctggcattaaattaatataatctctcgtctgatttgctattttcaggtaatgatgaagattaatattcattactaattagttttgccatttccaggttgtacgaagcagggcctggcaaaatgaaagtagcaataggtcaggaagctggcaaccacatttacaagataggactggtcccagaaagctgactgactcagatgttaggggtgtgtttagatagggttctctttgaaagttatggtagttttaagtcctactccacctttaactggagcaatgatccctgcatttttcattgaaaggaaacaatgtcctagaatgatctatagattgcctagaagacaaagaaataatgatgaaaagggtaacttgctaccagaggtagagctaaataaagctaataagtgttattagaaacaatggttagttatgcattagctacaattatgaacaacagacatgtttacaaaatgatgaataatgtgagaaaccatttgtatcacgtgctaatttatgaaaaataaatgacatatcagagtattttattgatatggatcacgatatcacatactatcaggctgctactcgtagagtactgtacaatattgcataaatattttgaagtatatttaggaacc

SEQ ID NO: 23356 - DNA, 7415 bp, Oryza sativa
ttttactgtgaaagtataaagctgaatagttctgaggctacagcttcagtatatggatacaagagaatgaccaatagcatttacatttttctcagtccaagatgagaacatatcttcttagtctgtaataaaggtctagatgatcatacctggttgattaatctgcaagatgagttatgctaaactagaatagcagacactagactaacacggaaaaatagcatgaagatacctgtctcagcttctcagggaccacaatgctttgaatggaaaagtatttactcatcaactatttgctgcactttgaatactgaactcagaactacgaattactaacctggaacatgcatgaagtcaatggttcaatcagccttttaaccaaagtccgcacatgccaaatgagacacaaatttcaacctagagggctaggcccaatgggacagcccataattgcatatagatgatccatagtgtgatggtacgcggcagacacgaacacatgatatttgattaaagccctaccagctgagagtgagatagctttcctgtaaagttacacaacaaaaatgtgaatactcaaacattaattaaatcatattcaagctaaatccgcacctaagataagaaaaataaaatccacgcggaagatgaaaataggacatttgcagtgtgaattcgcctaagccaaagtaactcagtactaagttggtacgttccccaaactgtaagccatcaccccaaaatactacaaagatttcatatatcggtacaatgcatcaaaatttcagcactgaagttgcacctcgcgggaacacaccgccgtagcaaaccccgcatccggcacccgcgagaacgacgatctgtacagtttgcactgcatcccggcgcgacattacgtcgaacacccggcgggcgagcaaccaattctcgaacgctctcaccactggcctctcccctatctccccaccgcgatctcctcgcatcaacctcagagaaagagctgcgccgaaccgtcacgaggcggcggctggggttgccggcggcgggcgccaccggaggagccactacgccgccggtgatcgatcgctcgctcgcttcctcttccgttgcgagttgcgatcgaccatccacggctcggctctgtcactgacaggtgggtcccacaccgtcagcagtaggacataaaagtgaaattttcagaaatcccatgaaacctcaagtatataactggtggcataaatgtatcacaaaaccttatctccatttcggcaaacattactaagatttttaaaatatagattgtatttgaaacttttagttgttgacatcttacttaaggttgttggatcaactcttcccttcttcaacaagcattgtttcagatatgccaaaattaatttaaatttgaaaagggtgaagttttgtactccaaaacatttaaatcataaaacacgtgattatacgccaaaatcatactgacgtgggttttatgtatttgaccataaaacgagatttgatgaaatttactcgacacaaaacaactctagactcttctcgaggaagcaacgcctcccttgggaaaggaagagagagattttctcttcctctcgccgccgccgccgccgccgccgcggcgccggccatggcgacctccggcggcgaggacccatccggctctgcctcgtcgtccgccagcgcgctcgactccctgcccttctcctccgggaacccacgcatcgaggagacccgcggcgtcgtcctcctccaccccgaaccacccgccgcctcgtcctcgtcccttctcccggtaagccaccccctcctccccttcgatggccctcgtaatcgccttctcaatgttctcgttcgcgcgcttgtcttgccaggtggggaggaagccgcgggtgtgcgtgcctggcgtgcccaaccacctgacctacgccgacttcggccgcttctgcgcatcctgggcctcccacatcctcgagacgcgcatcatcaggtatcgtcgggtctcgattctcagttgggtgaaagcttcgctgatgataattctccgtagtagtagtagtagtagtagtagtagtagtagtagtagtagacatgggctcattgcgcgtttcgtcagacctcaaacattggccaattttggtgtgcatgagtggttctgatgtatgtgtgaattggagtgttaattggtgggtatgtttgtaggattgatggggtggaggatcagtacggcgttcttataaaattcgacactcagagcttcacggatagcttctacatgagctttaacgggaatcggttctcatcactggaggtgctggattgctttggttctgccgagcacttcgatcttctgccgctctgagtaaatgtgtgctgtgctgattgatttggggctgatgtgctgcagggtaatgtttgccgtgttcgttttgtggaagacgttcactacactcaattgattgagcacgcacatagctcagttacaagctcagctgaacaacctacatgcccagtatgtcttggtatgtggaagtcttttgagttactctagaaatttaccaaattttcatgatgtagtgttctttcagtctgttcagggaaatttggaatacctcagcagctttcagtattgtattttttaagttaaaagttagagatgttcacccacctgctttttaaaaatatcattactccctctagccacaagtacatatgccactttggacttacatgtagtcaaccttcgaaattttgagtaatggtatgccattattttttattttgatacatgaaaaccatgtgtgtatctgtctcaaagattactttcataatgttataattttatcaggtttataaatggattacaatagatattactggtcgaagtgtatattgagagttatgctgatacccaaagcatgtctatgcaaccaggagtagttttctatatttactatcttatttaagcccaaagtatagctttcgaactcacattgatcacaccatttatttgtttttattgtcaatagaacgacttgaccaagatcctggaggcattcttacaacaatatgcaaccattctttccactattcgtgcatgtcaaagtgggcagactcttcgtgcccagtaagatcttaagacaactcacttactacaggtgttttttatatatatatattagtttactaagggcatcatcatactgttctatcaacataacttttgctgtcaccaagtttctggtatctcaaatttatggcaatcaactacattattttttaaaataatacttactaggagattggttggcattctataatttgaattcattgcttctttgttttatcctggctttagaaacaaatctatgtgtgtttacagaaagtgttgtgcaggtttgcaggtattgtcaacaagaaccagagaaatccagctgttcagtttgtggaacatcagaaaatctttggatttgtgtaatctgtggccatgttggatgtggaaggtatttcatgttaattctggaagatgtgaattttactaagtaaacaacttatttgattgattggggattaacgttctcaaaggtacaaaggtggtcatgctattgaacactggaaagaaacgcaacattgttattcacttgaattagaaacacagaaggtttgggattatgctggggacaactatgtgcatcgtttgattcaatcgaaaacagatgggaatctggttgagtacaatttctatggtgatcattcagttgatggtatgtgttcaacatgcaatggtgatgcggggatcagtgaagctctgctcgacagtaaaatggaagctgtaatgtattgagtacataaagtttgtagatcactagccataccatcgtagtacattttgttttccatctcttacaactgcgcgctttccctgcttttagattgttgaggagtacaatgatctcgtcacgtctcagcttgaaaaacaaagaaatgtaagtttaaatgcattgtgctttatttcgtttgtctagttgatgtttctttatcacctaggtaacgcttttatcacttgctgctggtatctactcccactgtcccacaaaaaagtccaatcccggggatgaatctggactcgtccctaggattggactttttgggggacaaagggagtatgttccaaggaattattggtgtcagatcattaacatggaatatttggccatgtaagttttggttttagtactaatgtacattctgattttggtgctaatgtagtattacgaatcactcctgctagaagtcaaagaggataatgagaaagaaattgctgctgctaccgagaaagcagtgggcataaaagtacaaaagttacaagcaaagcttgataagtgcatggaagagaccgggtttcttaatgatgtaagctcttgcctatttgttaagatcaaatctgaaactgtagctctagaattactgccttcagggaactttatgacttacgtactcataattattttgatatattttagattcatgaaaatcttgtaaaaaacatggagatgtggagggagagaattcaaaaagtaaaagaaaggtattttctctgatatctttcaaattatcacaggaacgacttatgaatcaattcttgtttacaatcatgtcctattccagctaggtaacttagtagaatatgcatatgttttcattgcctctcatatgctgtaacgagtgaccaaagtggatatttggtcattttataattcccttgcagttgttgaaattggacagaaattgcgttaatttagaatttgagttgatctcaatttatagtttctgttttactgatgatcaaaaatcggtttgattttattatagggaacaagctgccattagattgaaagatgaaaaaattgagaagctggaggaggaggtcagtatgtttcgtaactgttgttttttagcaagttttatgcttctcttctcatgatattgcgtgccttttatctcggataagtcggatatgtaactgatgttaccacatgttagcaactcagaacctccagcgtgcagagttgttccttagtgctgtcttgtttagacttgttagtggatatcacacttgcttgataagaccgtactataatcaaatagtttagtcccttgtttgcataaagtttaagttatgttatgcacataacataagtgaatcccctgtagcattgtatctcatgatcacgaggtaccttttgtgttgcaaatagatgctgtctgacatctccaaagaacaaaaaagagaaagctatgcattggtctttggtcacgttgtttatgattgcaatcttctgcataatgtttacagtatgcatagttttaccattgtcttattagaaggcttattactgacccatcatcctcttgtgacagctaagggatttgatagcccattttgagcgccaaaataccgtggcagaagcttcagagtcaatgtcaagcgatataaacggtagcacaattctctcggtaccatctgaatcatctgcaagcagcaacagcagcatcagaaattaggattgagatttgttaccgtaagctgtatttcagcatcagaaattagtctgttactggccttaccgtacattctttgctcccttattatctaataatgacagttatgtgttaccatggttatatacttgttggcttctcaaatgcatagtacaaatcaagcctttgtacagtgtgtttttctggacaattttccttgcctgtccatgtcaaaatttgacatttttccaaagaaaattctctcagaagatgctggattccctatctgcccctacccccaaccaccccaaccacacattgctgctctaacatgcatgcccatttccgtctttttccaagatcatatctactacttaatcaccattaaacctgcctggttactgctaatcacaggcggtttgaccgtattaccactcattttgcttactacttgatctgagccgcttagctcggtaagaagtaggtgagtagccttcatggagacggaggcctcgccgccgtcgccgatgagctcgctgcgtgacaggctgagggccacggtgtgctgctgcttcggctacggcggcggcggcggcggaggtggcctcggcgacacggtggcgcagtggcgccgccgcgtcggctcgccgggggagttccggtatgatcccctcagctacgcgctcaacttcgacgagggcgccgccgacgacgaagacgacgactacgaggccggcgacaaccaccgtgccgacggccttctctaccggagcttctcaccgccggcggcggccatcgccgccgtgtaagcctccggcgaccggaagcttcgatcggttgcagaggatatgcgagtatatatatatttagccatgcacatattaagaagcaatagttcagagtgtgtagcacgtatggttgcatgtaaaaacttgattatatgtacgaatgatcagtgtttgatttggacttttggaggtttcgcgagttcgaattacaacgcaaaattttttctattcttgtaggcatcgaacgttttcattcatcacattcatgcgttaccagtgatgactacgattgatcaacatcgaaattcttggagatgaacgtacgataaatgattctcaagttcttgatatttctgcaacgattacagctggacgcacaactaaattgtcctaggtaatttggcgtcgtttggcgattaattattgaacctgctatcctaggccaacccaagctttgattagctgcattgacgttgacagcgagccgtagaaaaatatcaagcaaagacaaatatttcgctcttggtgtttggttcaagccttcaaggctacatggacacatggcttggactttgcgtgccggctacttgcgatttagaccaattctaggaataattaaggctcgtttgtcttaggaattagtaggaaattaggaatgtgcaggctgcagctgcttcactggcctgtctagccgtagccatcaccacaccagaagccagtttgcatcgccagcagaatgtgccagatacagctgcttaattacaagtttctctccccttaatattatcataatccagggacttaagcttgagttacacgtaatagatttgttacggatgaactatgtagactcaaagttagaaatgctaaaagggataaagataaacatcatactatcgaaggcacagtgcctgcatgcttgccttgctagtatagaaaagcttacgcacatatactccgatattttatacacagtgaattaccaaaacatgttacacctcaacactgcatcgtgcatcaaaacagagaacatatccaatccgaatcttaaagctcctaatatcatatatatat

SEQ ID NO: 23357 - DNA, 639 bp, Oryza sativa
gctacaatttcagatgacttctttgcccagtgattacgcctatgatcgcaattcccttgtgaatgggccggtctccagattttgtcacaccagagcacgagagaatgtactacactcttcacaataaaaggtactgtttacatctagtttcatgttgaaccaatctaccacgattgctcagcaccaccatcacctgtaacgtttcttttttacatgcatgaacagggtagaattgataaacacaatgttgcgagcttgttacggaacaatgaacaatgaggcataattttcctataagttaccttttcttcttggtcttttcaccagaggatgctgggttgctatgccagtttcgtttgcgttggttaatgaaccaattgttgatttgcttcagttgtaaccccgtttcctgcaccaggcgggccttgtcgtcttcctgaatatgtgtagaaagaattgctcgtcatgacccacaattgataccataataataaagttacggaaatggaatgttggtgccacgtacagttgggtatggccacttagaatgagcttgccaccaagcttttagtatagatgcagtatcaccaggaagtttaccagctctccgcttgcgaaggatctcttccctaatatcca

SEQ ID NO: 23358 - DNA, 2736 bp, Oryza sativa
cgagacgtgtggcttggctgatgcctctgggcttcccgtttcgcttgtccgaagtgacgatggaataaagagaagaggcgatccacgcaggctcgagacgaagggggtatgatgttaggcaggccggaatcatccgctagagcctcaggctgggcctgtttatggaaggccacatgggccatggcccagcttgaagccacccatctcagcatatttggcagaaaatctaattataacgcattttctagagataaactttaggtttttctttggaagggagtgttgagttgtgatccaaattcatttgcacttaataaaaaccagcttctgctagagcgaagtggaggccctgccggatcgtatcgtaatcccttttaaggtcccacctcatatatatacctcttgtaaatcgtcgtgcggcgttgtaaccttaccctgatatagtgaagatattttgctggctggtacccatggttttttctctccttctttaggagggttttccacgttaaatatcgtgtcatctatgattgatctattgttctttatcgtttgtttgcctatcgtttcctaacatggaggatcttcaaaacgaattcatgggagatgaactctgaaagtcttatgaaattatgtgtttcagaggattttacgtgtcttcgtggccttcaagaggaagatttgggttagcaaaacaaacccttatctacttatggaattggatcccgatgcatttttactctattatacgttatataagaaataggccaaccctaacccgtagggtgattgggtctgtgtctgttctttggccacccatactcatcatataggggtgtaccaatgtatatcttcttgagtgcacatgattctaaatagattgtccttctcgaactgatttatgcctatgttactcagtaattgaatcattagcatgtaatagaaccacacgtaatatttgttttgggtttgtcaccacctgttaactcatgggtaaaaacatccttaaccctagccccaaaaagttcaagtggtctaagcaactagcagtctagcactaaaaatccaaaacctagtatagaaccatcctactcggacatgctcaaccctagatgtattttctactgccacacataccgcacttgtatctagggagacaacaaggagggttcaacgagtcacgctcacgacaaacctctactctccgttgtatcgttgcctctcgtcctatccctatctcattcgaccgtgggtacaggttagggaaaaattttgcatccaagatttagagtggaaagatttagtttgtacaggtgggaatgaggcacgagaatctgacctgttaactcatatctactaatatcttaatatcttgtgtagtctcaccgtgcatgtttatttttttattttgtaaaacttttctttatttttaattaaaaataaataatattagaacttattttaaaatctaaaccttttaggtgcgccaaaaataaacattgtcagtgttatcttagcttgaaaaatgctttaggtttgaaaataagttttaggatgttttacttttaaaaataaaaattgaaaaggtttttaaaaacagaaaacctagacagtttcctgttggaacaagatacccttctatgagaccgtacctgatacatgatacctgttgtggtaccagctgcatggtacccgatatctgtgatacatgttacccggtacctgtgatatctaggatctgatacctgtaatatttgtgcaagagaatagttaatatgtctgttgtaacgggatcccattttataacagccgtctttaaaaaaaattgtaaatcccagaaataccagagtcaaccggtgactgcccatcttattattggggattggtggttttagccaatggccgtctcctctcctcacggagaactgactcgaaaccgctgagaggcaacagagaaaccgcacggactgaacgaggcggcggaaataaaacaactcgaggctggaggctggctggcttccttgccgctgcccggctgaaaaagcccccgaagcagaggcttccggttgaagcaaagcaagagcgcgagggcgccgtcgggcatggggatcgtggagacgtggatgcgggagaagcccatccgcaccttcctcgcccagctctccacccgccgggcggcggcgggggccgcggccctgctcgcttcctcctccgccgccgcggcgtccgccgacggcgagcccggcgaccggagcatcccgcagctctcctccatcgccaactccgtcgtctcccgctgctccaggtacgccgttatccggttccggggcgacgaatctgttgttctctactccactcggggtttggggttgggggatggaggttgatccaatccatttagtgactgttttgcttttgctcatccgcaacgacggcagcgcttagctcggccgatctgggtgctctcgatcggtgtgggttgcattactctaccccgcatgatcacgctgaaatagtactgaactgccagagattgcataggacccaaacttaactcgtatatttgctggtttgctcagcggatgctaaaatcagtgtatgctaatccatcattgcttattaggtaaattgatttggtttaccaatagaagagtagcgtgcttctatagttatattctcaaggccgatagacttgatttcaatgtactggcatactctccataggatcaatattgt

SEQ ID NO: 23359 - DNA, 3531 bp, Oryza sativa
accaaaatatatgtacttaagtgctaagtatcaaagtgtgtgtggttttatgcaacttggactacaaaacgtgtagttttgtgaaatttactctttatttctggacacttggccattgtgagcatgtgatccctatatatatatagggcctgtttggttggtgacctgagtattgtgcctgagaaaattgcatgcctgagtttcacatgagttttgatgattatgcctgacagaaacttatttgattgctgacccgtgcctaagagatctagaaactatgattatctacattatttattcttaaacactaaattaaccatggattatttattcttcaactttgaatcaaccatagattatttactattaaactctgaattaatcttgttcagccaacactctacttatctaaagcaaacaggtctgaaggaggtcaacagaacacaaacaaataaaggcaacaacctgtagcgttgcaggatggttaattaatgcaataatcactgatcaagcactcatgctaacttgttaaggggagtactgagaatcatatgctagccacaattggatcaacttccatagcttactattgtctattgtagttatctttaatttttaaatacactgacatgatcatgtttctgctttgtttgaccactcttatatgatttaagttgtaatttcttgttatgcctgacaaacttctaacaagtttcttctcaaattaacattttcagggttcttgctcttgcaaccgaaaccttgcagcaaaactttgaagttgactatcccgatagttgtaaggagtctaatacatatgcaaaggaatttttagagtactgctgccacaaagctctccatgaagtaactacacgtccagatcatttggctgataagaatcttcgccgtttaatgtttgatatgatgcttgcgtgggaacacccggtgctgttgttgaggatgaattatcagaaaatgtgagaaacatttctttctgtagtttgttgtaatattcttacttcttcgttttatcaaaatgtttatatttcagcaaaagggaaaaatattgccaaatctgcatttttagtgtaaaactttcacaatgtatgagtttactctacgatgttcagcagtcattctaattgtgctatgatggtcagcattctgctttgcgtacaactgtggatattgaagatgatgacgagggatcaattttttatgcaaattccacaagattggcggttcaagttagttctgtttacaaactacattgctttttctaacctggaaataattcttcactgtgcacacacatgatcaattgcggtccattttcaggtcaatgacaagaagacagttggcttaggtgcttttgcacgaatagcaccttcatgccctataatagctgacttggttactgtccacaatctgttcgatgcactcacatgttcatctggtggccgcttgcactttttcgtgtttgacaagtatatcaaaagtttagacaagtaaggaatacaacttattagattattgcgctctcaaaattcattttcacttctgtttgtcaatgtcttctgaatctgtgcatagttatcttgtaatgaccgttgaaaacttgaaagagtgattgtgttgagttgaactatccgtgttctaactctgcatatggagtttcacagcagtaggtcttctgttgtaaaatggatcttctttccggaacataactggtcatttattatagataattgaattgctggttgggcaaaactggtgaatgtttcacatgtatcttggatattagtgacaaaatacgtggggagggggttctagatttttggtagttctttctgcttcaaatctatcgttgtgattgagtcaataaagacactgagaggagtattattgctattcttacgtacagggtattcagatctgtcaaaggtatattgcagtcaccgcttgcttcaagttttcatcttgatgctggggaatgtatcttagctatggatggagacaggcctattcatcctgtttttcaacacattggaatatcagcatggccaggtgaattagttaaatttgcatttgatttctcaatttgcaaccgtgcttcattttggcaagttactgatgttttcattctttttcgcaggaagattgattcttacaactcatgctctttactttcagagtatcaaagtgggttatggtgacaagattgttaaatatgatttagcaacagattctgatcaggttatcaagcgtgattttactgggccattgggtgttcgcctgtttgataaggctgtgatgtacaaatcaagcactttgtaagtattgaaaggggaatgattctccaataggaccaatttctgttttgctaagtattgattatacttctatgggttgccatcagaactaacaatacattatttgcagaacagagccaatttattttgacttccctgaattaggaggtccctcacgaagagactattggttagcaatcgctcgtgaagtattgcaggtgaataaattcatcaggaagttcaatcttgaaaacgttcagagagcggaagcactctcaaaagctatcctgggcatcttgagatactctgctgtgaaagaagcttttcatatttctccttctcactttaagacaacactcacttttagcttagcagaaaaacttccaaaaggagacatggtcttaaaagccttgtatgctaactactttcaactgttggacacttcgttgagtcatttggtgactgagtcacccgttgacaataggctgcagaaccattcattaccattttcattatatgctctctctagaatgggatttatattactgaagagaaaagatgaagctcaaagtgagataagcttttgtgctgtttgctttggtgtaacaaaatctctagaggctgctttggaagagtcaatttgttactctgagagaatagatgcagcacgtgcaactatagatcaagtaaaggtggaaggtgtggatgcaaatcttgccctcatgcaggtactttggtgataaatcaacttaaattgttcttattggtttgggattgaatggtttctagagtgcagcaagaaaagatagcacgtttcactagttatttggtgcaatttcatgaactttagtgtcacccagatgtctactacaatatcatgcacctttgttgtgacttgagttctgatggatcgcgcttatattccaggagttacttttcccattcactcaagtagtcaaactcacttactcattgaccaagtgggaagatcctctgaaatcatttctgttcttagcttttaccctgtatgttattcaaaggtaatttctttgtgacttttggatcttagaaagtatgcttagaaatatctcattgcctaacatattcctttttgttatgtaggggatttattgcttacatgttgccctcattttttttggcatttgctgttgttatgctctggcataagtacaatggaagggagcaattattgggagtg

SEQ ID NO: 23360 - DNA, 3537 bp, Oryza sativa
atgcagacaactgaaatggtcgcagtggcatttcttgctgcatctgcatttcttatctttgtaccttggagacatctgctcctgattgcagtcctggaggtgtacacaagagagatgccgctaaggaaacagaacactgaaaagttccgccggcggattagagagtggtgggcccgcattccagccgctcctgtgcagatgatcaaacccaacgaaagcaagaaaaagagatgacaatgtgctccgtgctgttgcaaagagctcacaattttccctgtttcccattcctatttttcacctgaccagctaacctgtacatatctcaaaccctcttgcctcattgttacagagatattcttactgatcaaagctagccaaactagtaatcaattcaatgcatagtgccattgctatgagtgtacactgtacaaatatatgatcgaaaacaaattaatgctgtattttctttcgttgattgtgtaactttttgctgtgcatgcaagttcctgagttctgtgaacaaatctgggtgataaacatggacataatcagtttaaaaaggaaaaaaaatgaagttaatcttattgtattgatcatgaattaatgatgcgtccttcagtattgatattacaatccaatcttaagtgataaaaaagtggtgctgctttggttcatctggataggggaacactctggatgctaaattgctggtttccaagtgatctccaggtgctctggagaagccattgcacaatgatgttacagaggctgttttgagtcttcacaatgctggcgggtagcaactgtggtaggtagtgggagttcctacctacccctccctgtcttcctactaatttggtggtgcgcatcatgggttcaaggagcaatccggcggtttgacttctccgtccgcacctactctagcctttgttcagtggtacgaggcgccgcgcgagcctgccggaatggccgcggcgtcgtctccggcggcggccatcacctgccgaggtacgtacgagccccccctcggccgagttactccctgctccgttgcgtggttttgtggtggtgattttggtggatgggatatgcctgcgttgcgtgcagcggcggtggcgtgggcgcccggtcaggcgctggtgatggaggaggtggaggtggcgccgccggaggccatggagatccgcgtcaaggtcgtctccacctccatctgccgcagtgacgtcacccagtggcaatccacggtacgccggcctctctagctctgcttccatccagcccgatactcctgatgcgctcatcgattttgctgctgtttccgaaacgcaggctcaaaccgatctgttccccagaattttcgggcacgaagcatccgggtctgtatagtctatatatactgatctagcagtctcttttgctgttgccgccatgtctcgcaagttgctcggaacactgacattggaacgatctgatgtgtagtgtggttgagagtgttggtgaaggtgtgaccgagttcgaagtgggagaccatgtgctcaccgtcttcatcggagagtgcatgagctgcaagcactgcgtttcagggaagagcaacatgtgccagaagctcggcctggagaggaggggtgtcatgcacagcgatcagaagacccgcttctcgctcagggggaaacctgtgtaccattactgtgcagtgtcaagcttcagcgagtacacggttgtgcactccggttgcgcggtgaaggtcggcccaaccgtgccgatggacaggatatgcctgctgagctgtggtgtatctgcaggtgaattttaagggctcagatggcatcagtgtttttactttatcttccacgcctttctgtagcttatacttggtttactgatgctaagaattaggtgtgctatgttgttctgcacttctgcgcattttaaccgtgtctctgatcattcatgtcttcgttcatttctgtatttcactagggcttggtgcagcctggaaggttgctgatatctcgaaggggtcgagtgtggttatatttggccttggaactgtagggctttctgtaagtttctacagaggctatgctattagttaatgaaagcatattaggaaatgtaatatttatactcatatcttcctgacttaggttgctcaaggtgctaagctgcgcggggcttctataattatcggtgttgatactaatcctgaaaagcaagaaaagggtattttgcaaacttgcaatttcaatctaaacttcaattatgactttttcccatatacttacttttgttcatggcacagggaaagcttttggtgtcacagattttattaatccagaagaattgaatgaacctgttcagcaggtacatcatcatgtttgctgagaaaactgaactgctgatcactcgcagtttacaattttatctaaactgcatatttggtgttggtattccttttgcacaaactgttgtgctaaatcatagattgtgaactagaaatggaatcgtgataaataaatcaagaccttagaagtcatttgttcaggccttaaatagtaggattagaatatggcactgtgttgaacagacagattttgaatacatgcttttgccagtacgctcttataattacatgtttcatgacccaatttttgagggaaaataagtcaacagctcctgttgcactggtgtccaattggtagtttctaaaatcttgatcatatccctgatatacacagcataaagacattgttttcatactttcaggtggtgaagcggctgaccaatggaggtgcagattactcttttgagtgcgtgggtgatacaggagtagtgtcgactgcactgcaatcatgttctgatgtaatttttattcctttccattgcactacaattccacctattctgcccagatatattatcttctcatgttttggtcttcttagggttgggggctgactgtaactcttggtgtgccaaaagcaaagccagaggtttctgctcattatgcactacttctgtctggaagaacattgaaggggtctttgtttggaggatggagacctaaatctgatctacctttgttagtggacaagtatgcaaacaaggtacggagacaatgtgttgtagaagcaaacatcctaataaaactgaattctattttcagttaaaaatattaaattaagaagctgaacttcatcatatgtaattgtgtgaatggattatcctttactgtggtgcgaagtggttatcacaatcgaacataatagcatttatgtacaagatgtcatatttgatgtttggtcaatgatcacatagcaatatatttagttaatgtgatacatacaaaaaataccttgtttgtttttccaatatataggtctttcaccttttctgatatcaaatattgtttgggtagaatgttgactgatatcatgttacttcttctcaggaaatccaagtcgatgaccttgttacacatgatttgtcattcgattacatcaacaaggcacttgaactgatgctagaaaacaagtg

SEQ ID NO: 23361 - DNA, 7270 bp, Oryza sativa
tacggccatccgttccgggctccggccgtagcccgcagcccgcacggcaacgcgcgctcgcgtcgatttgacctttaccggtgcctgtctgtccttgcctagccttgatgtgttccacaggggacccggccttctgcattcttgcatgtgccgccgctcttgcagatctgctcaacttcttggaattcttctcctcaatcaagtgccacttgatctcttgatctcgaacggagatgagtttttgttccttgagtgaaaagatgtttggtttgctcctaaagtttaccaaagattaccacatcttaggttagtcaagtttgaccaagttagcctattatttggtttatagccacacttgtggcaagattacttctcatctatttgggtcccacatgtcatcaactcatcaaagtgtggtacaatttaattttactagctaagttgtggctcgcaagcgtggcataaaaagtacggtgaattgtgacaaacttagtatagcatccacttgtgcatgtaatttcaaaatcaattattttttttaaaaaataatacaataatcatattatatgattgttactacctccatccagaatataacaattcaaatattttctatatatagtatttctatacatctaaagtttatacacctaaaattacccgattcaaatttgaatttgaattcaaatttgaatttgaattcaaatttgaatttgaattcaaattttttatacataaatttttctaactttttattcttttaaaaaaaatttggtgtactgtaataggaagagaagaaggggaggaggaagaggagaagggagcgggggcagggggggtggaccgatcgctgggcgatcgccctggcgatcgatcgtccattaggcccccttggcatgctagtcatcaaattccatctctcttcttccttctctaccctactctctctctcccccatgttttttcactggctggcccggcctctcgtgcccagggtttcccaaaccgtcgggggcggggttattgcgctccggcggtaagcacggttaccgcgcggtaaccgcgaaaaaccgtacgaaaccgtacaaaatttatcaaaaattcaaattattttttaaatttatttaaatttaaggaggttaccgtggtatttatattaccgtacccccgcggtaaggctaataaccgtggtacggtaagtcgtaccctgctcgtgcctcttctacgcagcggcggcggtggcatgacagtgaggaggaacgggcccattgcaggcagcgagcacggaggaggcctagcactcggtgcgatcagaagcacaaggagagaggggttcaccgtggcaagcgagagtacagcgagggagaccaccggtgcttggtccacagtggaggaaggtgttcacctcatccacgaagaccctcaccccccaaagctcatcaccatcgatcccacgatgcgcagatccatctcgcgcgcgcgtgctcatcctgcgcgatcaaacgatcgatccaactgtttgcattcgtcgtaggcacaagcaaagccatttctctagctccggttgcaagtcagcaaatggcacggtgtgtatgaatacagcaaccgtctcggaggagggacaataataccgaggcccgagcgtttgtaacgttgctgagaaaaacaaatgcttctcttgtacaacatctgaagactgaacactgaagtgagtacgtgaccctgtagaaagaaagagtaacagcaaagattccactatggcactgtcgtgttggtccctgacctttttcacctgctgtgctgtttggtaggaacacgaagaccatgcacagaatgaagggtctgaacacgccaaattgttcaaaactaccaccgctttaactttttcttaatagaacttctttcagtttaacctagtttataataaaatataacatatttttttaaaaaaaatatactatcgaaatatattaaattttagttatagtaaaactttggtgttatagaagttactaaaattttctataaacttgatcatacttagttcgattagaaaaaaaattaaaacaatttataatatgaaacgtgtagataatatgggtccgggatacttcgtacgggggaaaaaggccgcctcaaacccacgtggcgctttctgacctgagaagggttgcacccggggctggtgtgttggttgtaccccacgaaaggggtcgggccgccccgaccccctccatgcacggccacgcgtgcatggtttgggcgggcgtgtccaacgccaacccactgcatttattagaggagttggcgcgacaggtcgcattaaatgcggcatgtaggcgcactactcgcccgcccaaagtcggaatgattgatgtgatcgcgggcagagcgcctcgcgcgtgcgcctactgctgtcagggagcatggcctgcgccatgctccgtctaaattgccattaatgatgggctttttgtcttaagtttggatccagaccaaatcccctcgtaccggtccattcaaagtggtcatggctgaccggtgggaacggacgggaggaagtcgtcgttagtcaaagaaggaatgatgcgggtgtccgcccgtgtcgttcggtgtggtgggacgtgcccatactgcggtaaggcgcgcatggttctgcacgtccgaagacaagttacgcattaattgtctataaagaatgttttccttactcttaaagctaggttttgggtctttgtggtaaccccttaagatataaaaggagatccatgcccagtggagtgggggacgaatcccaaaaaaacaaaaaactcttgtattccttccaccaagatcaaccacatacagaaacggcccgaatatgtctaaaccatctgcattttccatcactcctgaggggcccgatcctcctgaggggcccgatccccctctcttttcctcattgatcctcgatctttcacccgtgtccccggtccgaaccggaaaggggctccacggtccctcgtttgaggagttcaccctccgacaaaacggaaggaaacggagggagtacgagggatgggctccaagcacgagtatacataacatgccgttctacaatagtaagtatgctagtagacactagtacagtacagtacagacacagtacatacgcaagtttaccatgggagtataagtatggcgtgcatggatcgtgtgaccttaagagcaggtacaatagcagtctataagccagctgcaaatatattttaagaagataaatgagaagagagaagggcagcgggctacagatttgtagctagctgtagcacgaattccaagatacagtgtgtatgacagatgagaccagatattaatagtgtaatatgtaactattgtataaatgagctattagtttagctatactattgaacttgctctaaccgatagcgtcccattttctttacatgccttttctggcgaaggaaaaagaagctcaatcaacgagggccatggcccatggatatgattgatgatgagctgatctactgcactccacagtccacagcttggtaggagtaggaccgttggaatccataggccatggccgaggaggactggacggaggagtcatcggcatgtctggggttggggcgcgggtcgttggatggaagggcgcgctagatctcggggtggatttgggcggtggagccgaagtgcatccaaaacgtctcgtagactagtactagaactctaccctttccgtttaaaaagaaaataactagtctattattactgtccaaaaaattttaaatctacaataaatctaaacacacatgtatctttgttgtctaaatttatttttagagctagatatttttaaagatataactctatctaaaatgaatctaaatagagtccttgtttaaattaaaaaaaaattgactaaaaacgtcacatcaaatagttgaacacatgaataaaatattaaatgtggggaaaaaaaccaattacacaatttatatgtaaattgcgagacgaatcttttgaaccaatgtgatgctacattaaatatttgctaatgacaaattaattaaacttaataaatttgtcttgcagtttacatgtatgatctataatttattttgttattagtctacgtttaatacttcgaatgtatgtccatatatttaaaaaaaactaaacacaccaaattttttttgaaccaacggggttggtcccagagcgctcccccaccctcaccctagcagtagcaggagtgcaggacagccaatgtcaccacctacggccatccgctccgggctccggccgtagcccgcagcccgcacggcaacgcgcgctcgcgtcgatttgacctttaccggtgcctgtctgtccttgcctagccttgatgtgttccacaggggacccggccttctgcattcttgcatgtgccgccgctcttgcagatctgctcaacttcttggaattcttctcctcaatcaagtgccacttgatctcttgatctcgaacggagatgagtttttgttccttgagtgaaaagatgtttggtttgctcctaaagtttaccaaagattaccacatcttaggttagtcaagtttgaccaagttagcctattatttggtttatagccacacttgtggcaagattacttctcatctatttgggtcccacatgtcatcaactcatcaaagtgtggtacaatttaattttactagctaagttgtggctcgcaagcgtggcataaaaagtacggtgaattgtgacaaacttagtatagcatccacttgtgcatgtaatttcaaaatcaattattttttttaaaaaataatacaataatcatattatatgattgttactacctccatccagaatataacaatttttagctatgaatctggacgcacaattatccagattcatagctaaaaatgtttatattttgagacggaagtagtattctagcctcatcgtttgctctatggcttataagccaaagccaaaatttgaattttaaaacataattttgaatttgattctctttcaacatagttttttttaaactttagcttttcaatcactaggaacatatatacaaaagttttactcacttatcatttttttaatcgctaataagccgttatggcttataataagactagaccaaccgacggggtccatataatttcgaattcaagtttgacttatataattagaaaacaaataataaatttaaccctaaattatgagttctattttatttatttttttacaattttatcattttttttacttgtgtaagttaaattttaatttgcatatgtaaagtaacgtatcagatagtgatattatgatatttttttttacttttaagtgacgtaaaaaatgagcggacattcctggagccacgccctttttaatagtctatgttaaactatcttcataattaaattaaactagcacggtggtccgcgcagattgcgctgctagcatcattatattttctcttatataatagcatatatgttttctcattatattattaaaatatattacaataacaatataattttaaattacgaaactactaatgtgtaatattcatattgtattttatataagtgttagttattaattatttttaatatccagtttttgttatttgtaaattatatatattcctatatggactctagaattgtattttaatattttttttaattctgattttttattatttctaattgtatttgtatgtggactttaaactcatctttcaatattctttaattttaaatttaaaatttaaaatttcagttacttctaaattgtattactatattgactttaaacacttcttcccatgtttttcttaatttagaattttagttatttgtaaattgtatttttatacgaactctaaaccctacttttaattttattatgtttattctgaattttagttagttttaaattcatatatggactttatactctacttgtaatatttcttattttttaattctgaatttctatatggactttatactctacttctaatattccttatttttaattccaaatttatattatttccttattgtatttctatatggactctagtctcttcttctaatattccttatttttaattctgaatttcagttatttcctaattgtatttctatgtggactctagtatcctcttctaatattccttattttttaattccgaatttaagctatttctaaattgtatttctatatggactctagtatcctcttctaatattcctaatttattttatttcctaattgtatttctatatggactctagtctcctcttctaatattccttatttttaattccgaatttcagttatttcctaattgtatttctatgtggactctagtatcctcttctaatattccttattttttaattctgaatttaagttatttctaaattgtatttctatatggactctagtatcctcttctaatattacttattttttaattccgaatttaagctatttctaaattgtatttctatatgaactctgcttttttttttctccgattaatatgagaatttctatatggactctagtctcctcttctaatattccttatttttaattccgaatttcagttatttcctaattgtatttctatgtggactctagtatcctcttctaatattccttattttttaattctgaatttaagttatttctaaattgtatttctatatggactttagtatcctcttctaatattacttattttttaattccgaatttaagctatttctaaattgtatttctatatgaactctgttttttttttctccgattaatgtgggaatttctagaccataagagcaaatgtggaggctcttttttctattcctttaataatataataataatagattttgatagtaagttacgtattcatctactactagttaatgttatgcttatgccgtgtctatccatatcttgccctgcttaccaacctagaagtatgactgtttcaagttgcacgggcagcagcatatatatttgttcttggcccttccaagccactcgtttatccattagcgagggacaggaacatgatccttccaccataaaaaaggttcgagtactaaggccgccagggataagatcgtttatcatgtgttctccaaaagcatctcaattgatccgtgcttttttccaaacgatccgatgttaaaagacgggctaaaatcagacaga

SEQ ID NO: 23362 - DNA, 39532 bp, Oryza sativa
gctcttcctgtgatcaagacatatgaacacctcaatctgattggtgaatgcaacacagtagctccccagaaacacaaaagccgcactggggttaattgggcatgcaggcatacgtccaaattaccagcagtaagtaatactccaccattctgtagcaaaactctatgcaaacagacaacactaccactaatttgagtatcttctcacaataatctggcagcaacgccgtacggccggttcaattctttagggcttgtttagattatagccaaaataaagcttactaaaatttggtaatgctaaaattttgataatttgataatattgctaaaattttaacgggatttcttatgtatttaccaaatttagcaacaaactaaacgtagatatttttttaacaactttaaaaaaatgatgcggtaaaaaatgacatcaatataaacatccccttaatcttgctaaaaccaaatttggtacgattcgggcgatctcaaccagtggctgtggagagaacagagaattcaagcagcagtagtacttactgtgagcgggcgaccgtgatctgcgcctcgagcgtcatcaacttcccaatctgctctgctaatcaatacggagtactacactacaccgtcacacaaaagtgcacatgcaaatgcaattcgatttcactgccgcccccggttcttcaatcgtaagctgtccccggctctgccagtcctaggcaattaaggggaagaactgtggcagtactcctccactgggacactactagagctagtgtggcctactcaacctaactagaaaggttatatttttaggttattttttttacggagtgagtgtctttatttaggccatgtttaaatctcatcctaaaatttttcacctcgtcacattgaacatttgaacatatgtatgaagtattaaagataagcttaaaaattaattaattacacatattgcgactagtttgcgagacgaatttgtttttttagataatggaataaatattccggcctttactcattagagctacagccagttattacaaggaatcatacaaacaacgaatgaagttcaaataaaattaaacacacccaacaataaaaaaaccaaactaagaaaatgagcacacatttattcaagtctatttgtgaatctccatccatggttcgcaaatatttgcataaccgtcgtctccagtttacggcatgcaacattcgtaaactctccatcatcttcacgcttttgcagctttacctaaaatcggagccaatatgttgccttcaatattacctgcatatatgagatagatggtgatttgtcaaaaactatatcatttctactcatgctccaacaagtatgagtttactcattttcttgtcaaccccaaaaaccaaccatcaaacatatcttagatatggtaatagggaggtttaaaccaaaagaaaactgtactattctccaaacaaattttgcataatgacagtcaagaaaaagatgttgaatggtctcattttttatacagaaacaacatcttaaactgccattccagttccgtcttgccaaattgtccttagttagcaccacccctttaagtaagtaccacataaagatcttaatcttaagtagcgagatgaatctgttaagcctaattgctccatgatttgacaatgtggtgctacagtaaacatttactaataacgggttaattaggcttgataaattcgtctcatggtttactaacgtattttataattattttatttattagtgcttaaacaccctatacgacaccctatataatatctgatataacacactaaaatcttacaccattcgatctaaacaccagtacaacttctatggcaggaatgcaggatgccactattgctgaggacgacgtaaaaatagcccaggaatccaagccgcagctctctctcggctcggagcccaagaaattctcgccaatccacacccgccactacaccgtcgcagcgcacccacgtgacacgcagccacagtccatcccccgttgtcccgaatccaacgcccggtcccgctgcatgttcctgcgctcagtccagctacaaccgcagctgaagcagcctacactcgccaacaaaagtactaccacctcacgagatcgatgtttgttctcggactctagtagtcgtaggcgtactccactgacgtgaggagtagtacacggagtgctcattctgtcttaaaataaaatcaatttttaaagtttgatttttgtcttaatttgtatcggaattttgactctgaacgatcacaccctagtttagtttgttcagtgtactgtattatcccaggggagtaggagtagattttagaacattcctgtttcttttagtcgcacagtgcaacgccagctcgcactagggcagcgaagttcagcgcttagtacgactgtactactacgagactactactacgacgacgagtacaccatttcctgtcccacggcattaaccgagcgagacacaggcgttgaaaaagcgttgaaaaaaggtaaaggaggcatcgtttttttatatacgctttcccaagctccgcccggccaccatatcctctgcccactctgcctgcccaaacctaccacttcacactgccgccacagcccgcagccacagcgatcgagcccctctccctccgcgagccgtgtgcagcgggcgacgggataactaacaaaaatggcggccgtggtggcggcggtggaggcgggggtggtcgcggtggcgcgcgggcggggcagcggcaggctgctccggggaatctactggaggctccgagccgggatccggcggatgcagtcggagcgcgggaggtggcgcggcggcaggcgtgaccacgcccggttcagcttccactacgacgcgctcagctacgccctcaacttcgacgacggccgcgccgccgcggacttcgtcctagtatgagtccgacgcgacatggccggcgtttagccgcgcagtatgcaggtggtgtgtgtgtttgtctgcgtgttagtgcgtttctgcttagaggcccgtgtaattaacggaagctggcggtgtgtttgggtggttagtgtggccgcgtactctgctcttcttggtttaactaggagctagtactactatttttggtgaatgggaaggcagattctgtactattatttctaacaccacgatttgcaagggggaaagagtgcttctttgccgttttggtgcttgctttcatgttcttcctctcgttggcgttcagcgttgagtggcaaagagtgccgatgcctgtcataagtgcaactcgagtcgagtgtatgcgcagcgaaattagtgaattagtgtgaagtggttagtactgaatcgaaagcttacgagacataagagcaagtttaacagtataagccaactaccagctccaattcatctatagccaatctaatagcttattcatacaatagttatatactactccctccgtctcaaaaaaagacaaaccctgatttccgtgtccaacgtttgaacgtccgtcttatttgaaaaaattatgaaaaaaattaaaaagacaagtcatgcataaaatattaattatgttttatcatctaacaacaataaaaatacgaattataaaaaaatttcatataagacggacagtcaaagttggacacggaaacccagcgtttgcctttttttgacggagggagtacactattaatatttggtcccacctgtcatacacacactgcgtcttagagtccgtactacaactgactataaatctgtagcccgctgctcttctctttccttatttatcttcttaaaatatatttacagctggcttatagcctgctattgtaactgctctaatattcccatcctcttttactccataccacgatgaaaagaaaaccgacaaaagagtatgccgaccagctacagtcgacctagttggcttgatgcactgcaagaattcgagaaactgtaattttttcaggcactggtttatgctgggatggaagttttgaagtcagtatatctgttttctctgcaatcctactccagtggtatcatttttttcttttctttctactgcgttcgagagaacttcaattcttcaaaaaatacacctatcgttcaatcatgaaggaaacacaccaaccgcgctcgaagaaaagatggtaatgcggttaccgggcttggaagaaagttgaagcggagttggtctgaattctgaaaccgagctaaagcatgaaggccctttccacaggggagttgataggggcggcgactgaagtcacaaatcactttgggcgaaaggcaagacaggaagaggacatgaacccacaacccaccgggttgttactgcagagaaagcgaaggaatctgccttcccatcaatccattcctctccgtaagctctgaccttcctgacgtcaaaaatcatgaatgccgatgtgcaacggctgtagtatagtccaatcgttcttggcagggctacgatcgagctgatcagctgagaaagttgacggtactctgctcggactgaaacattactgctaggtcaactctaattctatgccctttttcctaggactaaatatttttgtaaagaattcctaaatggagtcctcctagaaaattttccattccttaccgaaaggctcgaactttgcagaactcgtttttgtcgggcagaaagcaaatcccggcagtaattgcagccatgccactgagaggctgacaggtgatctccatgtaatgtaagaatatgaggcgtgatcctacgtacgttgctcgcatcgcatctcgcacgctgccatcgtcaaccgcgaaagcaacgttgcttgttcggccatgccctgacggcatgaaggctgccatccgaaacgggcccaattgaattggcctatcgttcgcaatgattcacgaatcttgttggggtgcaacggcgacgatctgtcacgctcatgcacgataccagttctggacagtggacactcgtgaacatgcatggagcagcagattcagctcaaacacaaccaaagcgatcatgaaaatggtccgacatcatgaaaatgggccgactggaggagcccaaggagtccagcaagtgtcttctcaaaggtaaggagtgctcctttcagcaaagcccatcgtatctcttagtattatattacggaataataggatgtgtactatccaatcttagattatattttagaataaaaaagtatttaagattcggcttaattaatttatttaggattatatgcaaaataaccatattggttgtccgttggcgttcgcttcatgaacaaataatgtcagtgttcgttcgaccaagtgacgttgttctcgcgtggtcctcgttgccggtggcgcggaggccgagcgcatcctagacgcctggggacgcggcgatggtgttggggctgcatggcagcaggtagccggtccctaagttgcagccgttccgagagtcgcactcatcgatgaccaaggctgccacaatgttgtcgttgttgtagatttggatatacttgtggaagcaccacagtggtcatactccctccccctgagagcgcaaccacgaaacccccgggattgaatctgttgttgcactctctcatgtccacaatatgtacatcgtggcgctaggcggtcaaagtcgtgtagtgtcaccactcgcttggtcctagacagtggcggatccagtatggaggcggcggggtctcgagcccctactatactaagattataagagaccccacgaagacctcactaaaattttttaccatatgtagatgggaggggggactgtaactctatctagtttgctcagacccactgctatttatttctggatccgccactggtcctagaggtcgacctcggcggtgagcagtcgtacgttgggtaggtctggcttattcggcttcagctcctccgtgccacgcgatcggcatgcactcgtcggctgccacagctcgtgcccgcggcgagggttgatcgacgacatgagacaggctagggagggagacaaacatgaggcctacgattgcaagtgcaaaggaggcaattcaaacacacgctacccctccctctcccctatagatggctatatggcctgagtcccgatgacccggcccaaggcacggcaatttggcccgccccaatcacggtcgtgccttaggctactccctcggcacggtgagcctgcacaaccaaagaaaaaaaagttgagggatccatcaaagacttgattcggccatttgaggtacaacccaaagactggaggtatacaaaatagacttattccagtcatataagacacatcccaaagatagagggaataaaaatagacttatttaatagagaagcacaatgggctatcgtgccttcgtgcaggcccggcacaacccgagtcttgttgggccgtgtctgggctgggggcacagcctagcccggcgtgttggtcgggccgtgttagtctgactagcttcggcccacgcccgaacatgccaggccgggcggtccatttggccatctatactcccccccaccccccggcctgcacacacccgcatgcgcgactggacacgtggcatgcgtggaaaggggggctggacggtgcacttttcccttatttctttttttctttccccgtttcttttcgggtttttttctttcccatttattttgtggttttttaatacgtatgaataactttgtatagtaagtttatattcttgatcccgttctctctccttcacataatttaatttatagttagcttatactttatggattagccaactataaattcacgtgaaaagtgccaaatctttttcaaagtgtaacaacaataaccataaagttagctagtctgatgtgaaaagattgcattagtgacgatccaaatgaacaaacggctggtttgagaaggccttaggcccaacagctcgagcaagatatcataagctggatttatttaccttttggtcccttacaaaacttattttataaaataaactcctagaaaaaacttatttagaaatgaatctttttatgacgtcaatgtcatcgatgccgtggtccagcataatggtgtcattccctacccgcggaagccaagtaactaatatgaaggaatatatttatatttttttgaaaaatgacatatttgtaataaaaatatttataggcaggtacttagggtgtgtttggttgagctgtggcttttgaaaaagtagctgttggctgtagctttttgaaaagtagttatggaatatggactgtggcttttgaaaaagctagtttgctttaacacctgtggcttttaaaataactagtcccgctgacaagtgggccccgcatgtcatacatagaaaataaggggatggagatggcaacggcggcgtcgtcggcctcggcggcggcagcggctcggtgaggaggagcggcggcggtttggcgaggaggagcggcgacaacggcggttcggcgaggaggaggacacgcggcggtgacgccgccgctgtcaaccacctcaccaccttcgtctcccgcctccacggccggcgaacgaaggggtggcggcgggcggtgtctggcggcgccggtcggggatgggcaagagcggcgccgttgggttgggtggcggagtcggcctcgagcggcggcggggagcggcagtgcgcgcagcggcggaggagtcctcggcggcagcggctgcggttcggcgaggaggaggacgcgcggcggtgacgccgccgccgtcggccacctcaccaccttcgtctcccacctccacggccggcgaacgaaggggcggcaacaggcagcgtctggcggcgctggctcaggttgggcagcggagtcggcctcggcagcggtggattcggcctcgagcggcggcgaggagcggtagtgaggaaaccaactcaacttactgaatgaatatgtcttaaaatgatagtgagacttgactatagaatctaatggtgcatagcactccccttcttgaatattgtcatcgatcttcaaaacaaggttaggtaaatttatcccaatagcatcaacgttgtacgatccatttggttctcatatttttccatatttaaaggaggattcatatctaaacatatataaacacgatgcaccatataacatcctctattattatatttaccaatgacatgataattgttccaagaataacatggaaaatcataaattttcttctctaaggcatttagatcacaaagaacatcaaattcgatataacccaaagtacataaagaagacaataatttcagctcttcttggtcatcagcaataacaaagacacgtttattttgagtggtaaccaaatattcaaaaatataagtaacgtgttttttcactagttgtggcatgtgtataagtgaagcagtgcgcaactcttcttcattacaagcattatcaatatcaacacaatctgaatttttagcttgtgataaaagcaaattagaaatctgttccactagaggttgctctaatatagcataattagtggacaattgtagcatagcacaatctttcttaccttggtccagttgaccatcacttaaattacctgaaacgctctcttgacataatttaggtgcttcattgttcttctcttcaaaattgtttttaccttcctgcatgatattagataaaatagaaggagcaagaaaattctcatgtatcataggcatttttgtttctttctcaatctgactttcaatatcgcaagcatgcaaaagtaattgaaaaagatggctatgtgttttattctcaagcctatgctgaatttttaaattaagcccatgtaaaaatcttttaattgtatctcctctagactactctataacaccgtacaacatacaaattttaaactcccggtggtactctctcacggttctattcccttgtttcaaattttgcattttcttttgtaaatcacgaatataataatcaagtacaaatctagctctcatcattgtttttaagtcattccaagaataaggtttattaccgacaagacaaatatcactccaccaaagagatgcaaaagaagtaaaagaacttattgctgccttaactttttgttcctcagacaattcataatattcaagttcatcttccacttctaactcccaatcaatatagtccctaggattaaacttaccaacaaatgaaggcaacaatatcttattttcataaacctcatcatgtacctgttcttgatgtgaaagccaatgttttatatgctcaatcctgttctctttatacacacctgtcattgtcagtagcaaacaaggaaaataaacagatgcatgtaacttcttattaacaacaaattttgcttgtggggttgcaagtcactcaacactcaagcatataccaaattcttataatgttctcaaagaatgcaaagcaagtcaatcaccgtggctggttcgtggcacaatgacacgcttgatgagtggagcgattgtaaagccggacctgtaaaggttagtagtatgtgtatcttggtaggcttaactatatcacaacgaatagcaaaaatcaaacagatttgcgaaattgaataatagtccaaagtactagtcaaaattgctggcgtagcctagactcaatcctagcttaagcaagcaaatgatcatacttggacaaaacacaactcgctatatcaagcaactctctccaagattcgaaaaaaaattccacactttcttttcctgcatttttttcttttttctgattttttttgtgcggcactctttttttttttgcaccttctgccctttctctatttcttttcttcttcttcttcttttttttaaagtaattaactcaagcacatatacacgattgtgttgcatgcatgcctcggtcagaggagaaaaggatggatacctcctatttttgtggaacaaggaatatgggaatgataatttatatactttctatttgtgcgtggcagctcaaaagaaagaaatactgggaattgctattttttggcacatgcacttcggatagagacataagaactaactacgagataaccaagattaggttcctgatttgacgtgttttttacttggtaacgtaccagaattccacggcatgcatgcactaacacaggatgataaaaaatgatcagatctaatgttttcttctccttcaaccgagctcgaacgcaggggcggagctgggcctagggcaacttgggcccgggccctactcgtgaaaaaaaaaattaatacctataccttgtgatttttccgattttttcatatattcttggcccagccccactcgtatgcaggccggccctacactcggccttccaaaaaaaacgccttctccaccgaacagcccacgaaatagcaaacgccgaagcccattagcccactaaccagtgaaaaccctagcctgcagtgccgagtgccgactgaatccgaatcatgctctctctctctttgcctctctccgtctcttggtctctcttcgatctctccctacaggaggcgcggcgacgctcgatagggcggcggatggcggggaggcgcgaggcgacgtgcggcggcgggggcgcggctgcgcgaggcggcggcctgcaggctgcagcgtgcgggccgtgtggcggcggcgtgcggcgtggctgcgcgaggtggcggcctgcaggctgcaggcgtacgggtcgtgcggcggcggcggcggcgtgcgggcttgtggtggcggcggcgaacggagggtggcgacgtgcgggcttgtggtggcggcggcgtgcgggcgtgtggtggcggcgaacggcgtgcggcggtggcttgcggtcgtgcgggagtggaaggtcagtggttttttttttgttctctttcttcttcctttctcagttctcgaatctgaaatctcaaacctatagctttactgctttagtacatcacattactcaattagatttggtttgaattcatagatgaagagaagtaggacaataaaatcattctatcaagtccagtcctcaaatgaatccactccggcaactcaggaaacggaagaaaccaatgactccatcccaatgcctaattcagcagaaaccatggctagtaacaataagcaagatcgtattgtgctagaaccaaatgtggttgttgcacatttgtcatggcaagttttagcctttaatttgggccctagtcgtccgaagatcctggttccgccactgctcgaacgcacaggcaatgcacaaccaagatgcaaaactcaaaccaagacgaaactagaactaaaaccagcacttgacacaacagtggaccaaaactcaataaagcaaaattgaataacaattgcaaggctcaaaactaatgtttggtgaaggaaaaagtggtgtggcaatttgtagataatgggtagggaaaataaatatataaaactaaaatcctcaccaggcaaccgatactctgataccatctgataccaactgatgacgctctctcttgtggcccgatcttctggtgaggggataactctcgctttgattgagtgcgacgtttacgacgtggctaccaaccagaacaagtccaggacgccatgcaatcgctacaccacaaacgatgtcgtaccaaccatgacgcgcgggtgatgatccctgcaatgcaaacgagagaacattgcaagaacaagataagatgcaatctaaatattgcgaataggtaattagcacaaagaaatagttgcgattgaagtggtagatctaatcgacccggcaaatcaacacaccaactattgggggctctgaatcaatagtcgccgactaatcgaacgaggactagagacaaggtgaatggcacttggtaaaattcaactaaacaaaacccaaatgtttttgaggatgtacaaagctatttatagaggaaaataaagctagggttaagtgctaattcgtggaggtggagggagacacttccgagatgggcctagtctattacaaggcccaaggcccaagttcggtttcggtaataacactgtcttgttttggcgattcccgttgactcaagatgaatttggacatgagaccggatgcgtttgaaaggtaacgagataagctttccacgaagtctaagatcacccaaatcggagttggcatgaaggcgctaggtccgtttgaagtcagtgctgtctccgaaggccgaactggattccaaaactcattgaattttgatatcttgtagatcctccattcactcgatgaattctttggtcatgttttatatttctcatgcttggatgcatgcatatgcttgatggtcacatcagcggtggcggagaagtcctcggcggcggcagaggggaggttgacacgggcggtggtgtagtcggcctcaggcggcggcggggacaccggcacctcgtccttcatttcctcctccccttcgtactcctcttcctcctcctcctacacctcctcgtcggcggatctgggccagcgcaggacgagagtagcggcggcggcggcggcgacgtctcgtcgaggaggagcggcggcggcagggcgaggaggagtgacggcgacggcgaagtgaggaggaggaggagctatgccgatgggagaaagaaaaaaaaacaagcgaatcgtttttgtgtaatggcaaaggtgggtaattttttctctcaaaagcagctgaaagcaaggggagggctgcttttgatttgtactacaccaaaagctggctttgggtaaaagcagcagtgacttttggaccctttggttgatttttggcttttgcaaaagcaaaagtttgttgaaaagcccaaccaaacacacccttagtgttagtgtcattggtattgaggatatatttgtagatatttttaattaaaattagatcatttttaatttttttacttataggttcttaccgccaatgtaattttttttacagataggcccttagcgccattgacattggtgccgacctccttcatgttagtgacttagcttctggtcttgtgcggtctgcaggggtgcgagggggataacgccaacatcattagcactgttaggttggactatgacaccaatgacgctggcatcatgaaaatgtttcattcatggaatatgttttttcaagagtttgcttgtaaataaatttttaaaaaagacctcaaaggtaaaaaaaaaataatccagtaatcttaaggctgaaatgtgtggacaccctagtgcacggtggtgcttctcggaagtccatggtagggctctttttgtagcaatgcccatgtcctttattaaacgttgtaatatttattcctttcggatgtgaccgtactcgttattaagactttaatccacccgagtacgctacacgatctcttcgtcgatgatatgatgaaaaagtttggatttggaacagtatcacggaccggtcgatctcatgcgtccgaccaagtgatatcgtactcgccgacgtcttcgccggtgatgcggagcgcgtcccacacggcctgcgacgcgtcgacgacgttggggcggcacggcggctggtaggcgtgctccttgtcgcagccgtgcagggagtcgcactcgtcgacgaccttggcgagcacggacctgccgttggcgttgatccggatgttcttgttgcagcgcctgccgttggcgtaccaccccgtggacagcgccaccacgcgctccgtgttcttgtggaacttgccgtcgcactccgacgggtcgccgccgtcgccgccggcttcgaagtcgttcagcgtcatcaccgccttggtgctcccggtggtcgccggggagcaagcgtacgtcgggtaggaccggccggccttgcagcagtcctggcacgagtggctcctgctcgggcggagcgtgccgctcgggttgcacccgcccgccagctcgcggccgcggcgagcgtcgacgtcgccgcgcgagagtcctgggagggagacaagcacgaggcccgcgattgcgagcgcgaggaggcaattcgtcgtcgccatcgatcttgcgatatgttgttgtgtgtaagccagcggagagacgtcgtgtatttatagacccgtatttttgctgactactgtttgatccttgttgccgtggcatggaaagtcgtgcaagcatagtcaccttgtccttgtgaacgcaaagaagcggcatatcttaacttacgagaagaagtcaaggaatgaagagggacgtacgtgttgtactgcacattcacatggtgacattgtgtgataactgattgatcattagtttaggcgattcgtgagagagatgtcagtgttatgacaagataagcgtacagtacagatggaccgcgaggattagcgattagagcgggtgcaccgtgcacgcagggcgtcgatgacgataacagtatttttcaggggcgagcgatgtgatccacgtgatccgggtcacaatgtttgacgaagatttctgcctgttggaacgcggcaatccctaattcaggctcaaactattcatgccttagcacaggtacaacaatctttattagtggtctctctattaccatataagtaaatttgatgatataaaagaaagataaaggagtatggttgttatgcatgacaacagctcagagtcgactcttagcatttattagaacaaattttgttgcatggtggtgaaagaaaggaaagaagagtaagaaaaaatatttagatacattaatgattagagaccatattatctctaactattgtaggatactagtgtctacatgatatagagcttctatttgactctacctttgtacatgcccttattgaaacgggaaagtagtgaaagtacagccatcaactgttcatggcatattaaaacgggaaagcacagataataagagataaaaacagatgcgaaagggaaaaagaaaaactgaattggagatgcgggggatcgaaccccgtgcctctcgcatgcaaagcgagcgctctaccatttgagctacatccccacttgaactttatccaaaaatcatatgatctttacaaaattgtccagtacctgtggtcggatcagatgagcctttacgtaaagaacgtgtaccattttctgtagactctgaagtttgatccagttgcaaatgctttgcttggtttcatcgacataacgaaactgacgtcacaattcacctagtcacctctccgtcggtccaggctgtgcaaccaacgacccgcggcgttacacgcccacgcccgcggcgtcggggagtgacgcactggtcgttccttgcggcctcgaagcagccggatgcgactcctaggtcctcgcggccgcaacgaacttggcggccggtccatgattttaattggaataagttcaccaaccgttaatccactttacatacatcgagtctgtatgatatccctaatctctaatattagaaatctatatccctaaactatataaaatcatataaaaataagatcctataacagtatagatgtctaattttactgacgtggcattctagtcaacatatcttctagattatgggactcacatgtaagcgagtaacgtggggtctacatatcttctttcttctattttcttctcttctcttctcattttcaatgagctgggaggacaggggcggcgggggagaggcggccggcgagcgagagagggggaggcgtccagcgagcccgcctcgagaggccccatcgccgcctcaagcctgtgtaggccaacatcatctccggtgcgctcgtggagatcctggcttcgcgcgtgagcgccgccgtcgtgctccacgagcttgcctcctccggcgactgccatgccctagaggccatcctgaaatcccacagcatgtgcggtgcgctcgtcggcctcgtcagagcctcatctcctcgcaaagccaccaaggcctccctgttcacggcctactacctcgtccgccgagcttggcaccaagggagaggcggccgcccatgttcaccgctgccgccacacccgacgacgcacatgtgctaaagcccaggctcgccggcctcctttttctcctctcccaccagtacggccagccgcctctccctcccaggttcacggcgacgtcgactcggatctgagtctggatcgacgcaggtagcagccttgacagcggacgccagtggactagtggaggcggggctggggaagagtgcactggtggcctagggaggagcgcagcggatgagcccggtggtggggcgccgtgtcggcgaagttgagacccctggtggcgggatggtgccgatggacgatggtgtagagcaaaggatggcaccggcggacgtcgatgacagtcagagaggagctgaaggtggctgacgttgtgggggcgaccggtggcggacggtgcgtcgggccttgaggtcgtcgggcggcgtgggcctcatccccctgacggtagcaatggcggatggggatgccccaggatccagggggaggcccactggaggagacggtgctaggcaggcggttggggttcggaccggtcggcggcgggatccaatcggagaagagaagagagaagaaagatatgcgaaccccacattactcacttacatgtggatcccatattttttttattttgctgactagtatgccacgtcagtaaaaccagatatctatattcctataggatctcatttgtatggttttatatagtttaggggtggagatttatggtattggggattaggcatgtcatacatactcagatgcaaagttgagggatgctcgatgaacttattccattttaattcgacgtggggattgatggtggctgggcctactggaggcggagaatcactgagcctactgtccgccacttctggcccagtagaaccaacggtggcgattcgatcgacgggatcgggaacaatcctacgtggctacgctaagatcgtactccttctagaacctggttcaaacaccaccccgagtcacgtcagtttcgttatgtcgaaccacatcaccactgaaacaccatgcagcccccgcggtcgaacaaaaccagcgatcatgcgaatggcaaacatctggcactgatacctggacgtcgtgcacgcaaagcaggttaaattcggttcttcttcgtgcaggtcaaggcaggaacctgcactccaattctggacggcaaaaatcccaggtgtcacaacgcgaggcaacgcacacctaaacaccgcaagatccagaatcgccagcccgaacaattgggggagcacagtctagttgggagcttttccaaccgaacttggctgcctgatctgatttgttccctagcctgctggtgcactcggtgtatttctgctgtacgatgtcaccaaacacccttgagagccggtacaatagtagactataagccagctataaacatattttaaagagataaaagaagagagagaagaagagcgggctatagatctatagccagctgtagcacggactttaagacgtaatgtgtgtatgacaggtgggaccatatattaataatgtagtaagcaactattgtatgaattaactattacgttgactatagaaaatttggagctagtagttggctatactattaaacttacttgctctgacagaactagcacacaagttatctgctgattcctgcgacttttcgtgcactccaaactccgaaatacgaggaaggccgtgctagaattttgctactgcaacgtatacgagtcattttcaacccaagacagcgttaaaccaatagttttggccatttgttatgtcgaacactaccaacctcagttttagttttggacccttttcatgtcccggccagtagatggtagtctgtcttcatccgacagtaacgcgatgtctaagtatatatgattgatacagaaaagatatgtagatatgttttcgttgagtggttggccaagatcggaggtttggggccatactagattcgcaacctattcagagttgcaaaacccctactggattggcctatgccctgagtccctgatttgtatatggcgcccagtcagagctctcacactgaaaaggccaagactgcaggaactgccggtcgccgtctcaccccccgacataatcacgcagtttgcttagcagcggcagagcgatctagacactggacctgctagagcgtgcgctgcatgtggacgagtcatgagcgagcgaacgatcagcaaaggctagatcacacataaagcaaaaaataactaaactaaactaaaaatgcacagctcagttttgtagctgaatcagcagtgacacaaacggcaacgggggagttcagccgggaccagagcccaccatgacctgtcggcaatttgcaataatcttttgcactgtctcgatgctaattggcagcagggagcagccatgcacgcacatcctttccactggaacgcacaaacctacccaaaaagcttgcgtttttgttaatcacagacaccattatgctacaccaatgtacagaaatccatccttatctggagcaggggtggagcccgttctacttaaaatctatataagtgatcgtatctctcctgctttctgccgtgctttgagccgctttacaacaagcacaagccccttttgccatcagactgcaaccgtggaagtcagtggaggtcaatttcaaaagcttcttctttagatcgatcacctgcacgtacacgagcatttggatgcagggaattgaaaagcatccagccaggccgaccggtttaggggtttgatgccaccaatggctttgtatggatcacttgcacctcctgattaaggaaagaacagtgcaaaaggatggtcagtgttcctaggggttcccatgggtcattgtgtttcctagattacttactactactggttgctgattgataagttggtcactttatcttgaaagtgccaatctctagctagtagtagtatatagctttatatgagttattgggaattatatacttggttacatattagaatattgccccaaaaaatgattgcttagctctgaactgaaattgagccaccagtttctgaataaaaggcttcttcagtgaactggtagtggggatcgaaccctgatcttggccaatggatggattgttcacgaccgtgaccatgtgttgattctgtgtaagcttcttgcgtagttgacttgtattcctttaaagttcaacctgatgatttagactttcagatgtcttcaaattcctacatgtacctttaatcgtagtgcataccgtcacggcttcgttggttaatctttctgcccattggtatgtgattccttggttgaaagatgcagcaaggaactattgagtgtgcctcaagcttccatgctctgcattcctcgattcttttcccatttctttcagcttacggccaacatggtacagcaacaaaacaagttcacgttgaccctttcaagtttcaaccgccaaagatgtgtagctctacattcttcctacgcaacacgcaatagccaataagccaataaatataataagttcgtaactctagagtataccagtaaacagcaaataaaaaaaaaagatccgatcaagcactctagaacatcatgttatttttggcattctcccaattagtaaaccaaatccaaaagtcacgcacatttcattcacggcaagttgcattgttaccttagttataccctgaaactttaaaaatatataatgcaactatgcaagtacatccaccaataaacatcgagcttttatacaagaacaaaaaagcatcctttgagagaaggacaataaaagagattaaagtaaaaaaaaacaaacaaaagaagcaaggcaagttggttgagccaaccagagcaacgtacgcagcgctgtcaatagaaaaccttccaaatgggcgggtgactcggacgcgacgctgactagagctagtggcggtggcctccgtggccatagagcaaaggggctcggagaggaacgagcgaccgaaccggtgacggtgtcccttccaaatgttcgtgccaggtaggctccgctgcctcgtcaggggcacgtgtcgtcgtctccggcccgtggctttctgacggcggggacgacatggattgggagccaagattttgattcgatgccgatctcgctgtggccagtcgatcgaccggtttatttggaggaatgcaaaaggagtacttcctccgttctaaaatgaagtcatttttaaggttggcacggatattaagaaagtagatgagaatgattagaggaagtgtgtgattggttgaaaagagaaagtatgtgagaagaatggttgtgattggttgagaggaggaggtaggtgaagaaatagccttattttaggacaagacactgtgctaaaaatagctacattttgggacggagagagtacttattagtctgtgtttgcaagtcaagtttccaacctcctcattcactcgcttttcacgcgcacgaataccaaaatattaaatgagatgttttttttaaaaaaaacaatttataggaaatgtgctgaaaaaaatcatattaacgtatttttaagtttattaagttaaaacttaattattcagtgctaacaagtaatatgttttccatgcacaagaggttaccaccctctactcctaaacacagggtatgtacgtcctcataggcggataggcctagtttgattgtcccagatattatgctttgtgatgatatttgagattacaaacgaatgaactaactatattaaaagtcaaaacattgatttataaaagatattctactcaatctatataaacatggctttaataatagccccatcgtttgacctaaacagccaaagaataagccaaaatttgaatttttgaatttgatttggaagttgattttgaaatgcttttaacgtaatttttgttaatgttggcttttaagtcgctacaaacaaatctacaaaagttttacttataaattaattttaattttttaataagccaaataagccattttgaccaaatgggcaaccgatgggagcctaagtcgtattgtttataagcttgggaattttgtccatgacaatcagtccaaatgtaaggttgtgttggcactcccggcacggaaaacgaagcagcgattagcacgtgattaattaagtatttgatttttttttcaaaaatagattaatatgatttttaagcaacttttatatagaaactatttgaaaaaaaacacaccgtttagcagtttaaaaagcgtgcgcgcggataacgagtgtggggagttgggaaccccccgctaaagaacgcaaccagtataattagtcgtccctttgtttcagattatttatcattctatcattcatttttttaaaaaaataaaatatttatcattctcacgtcccatattattttttctagagatgatcttccatctcaacctttaattaatgcgggtatgcacatttgttaattagagttaatgctacttccggtaatagttgagatgtagttagtgaggaactaaggataataatgttgtcagagtataaaatatgtcatatcacttctgtcatggttatggataccacatatatttaatagtaatcgaataagttcggcggaacccaccatataccaagtcttacacgaaatcatacctcgtatatagaaggagttccggataagaaaggataagtagagttctatatggaaactataagtactactcggattgtatccatattggtctccctagttctacttggataatgggacttttatatatacaagaccccataagaggaggggggatagacagatcaacacacaagacagaatagacaccaacacacgccgccaaacattgacatcagagataagcctagacaaacccaatatggtgcctacggaggccgacaagagagatctagcaccatctctaatcttgatgagttcgtactcgaggaggaagactaccatgtcgtcgactacgtgttagttatctatgccgcaaagtcgacgacagctagatatgttatcccaaatattttacttgtgcaatttagatgaataaaggggggtgctaatgcgcgtgtacgcgccagcaatttagttggcgcacgcttttgttttttatttcgccgtttcttttcaattctttttcaatttttcacacacctctttataaatgtagaattgaaagttttaaattttgacgtgaaagatttcaaatcttgacttgaaagttttcaaattttgtgttgaaaatttttaaatctgggttgaatgttttcaaatctgggctgaaagttttcaaatttaggttaaattttttcaaatcagggttgaaagtttttcaaatttaggttaaaagttttcaattcagggttgagagtttttaaatctaggttgaaaattttcaaatttaggttaaatgttttcaaatctgggttgattgttttcaaatccggattgaaagttttaaatttgagttgaaattttttcaaatttgagatgaaaagtttaatgttttcaaaatttgacttcaaaaaattcaaattttgagttgaaagttttcaaattttgatttcacgtatagatttcttttcaatttgctacttaaaaaaatcttaaaaaaaagacaaatctacaaatcttaccttaattatggttattatcgaaaactaattggattaggtacgcatcaccgaaaaaaatccaaaaagaaaaaagaaacagcaccaaaaaaatcccaaaaaaattaatccctccgtgtgcgcgccgcctacgcgcgcgcgagttagctttctcgtgaataaagagcaacaccggcttcagccaacaggagtagagctattacctgtttgataagggatccaaacctgtataaaaatacttgtctccatctctttttctttaatctcgcatataccctggtaccgacgatcttcatatcatgcaaataccgtagttgaaacctcaaacgtcgacaacttcgatattggaaaatgttaaacgatcgtataaaacacttaggctgcgttctagaggatcccggcacgtaaaataaagcacgtattattgcatgattaattaagtattaacatttttttaagaaaatggattaatatgattttttaaaacaattttcgtatagaatttttttttcaaaaagaacacagcctttaacgtccattggaagattattccaagttaggaatcatatttcgatccgataagaagatctatacctaatttgaaaaacctacgctgctacggaacatctagactattactcctactaaactggagactaccaataatgtctctatgagtactcgaatacaacgagacataaggtataaatatactccctccgtcccaaaataattgtagttttacactattcatgtttaacgtttgaccgtccgtcttatttgaaaattttttatgattagtatttttattgctattagatgataaaacatgaatagtactttatatgtgactaaatgtttttaattttttcacaaaattttcaaataagacggacggtcaaacgttgaacgtgaatagtgtaaaactgcacttattttggaacggaggtagtactactttcagagggagcttaatagagacaacaaataaaaagagataacaacaccgaaccttcatcaaaccctaccaggattaattcctagatccgtacagtgcctaaggtgtttgactcccaatcatccgaccaccgtctcactgtaatttctaaagagaccaaaagataggtataggacaatgtcgaaggccgtgtaataaaattgtatatctaatatttcaggactaagggaaagagtatagaagtccatggagattttttggttataaaagtggcctgaattttgatctaactatactactagcattttggtcttaggccttagccataaagtaccttcgaccaacaattcggcttccacgttccaaatggcttgcaggcaacaaagcagagctgtaccagcccttgcacattttcttcctgctcatgcggtcaagccgttctgttatggtaccatctcatgatcgaatttcgccggacaccgaaaacctaatccgtctctgcatgcagagcacaaaataaatatgcacttgcgctaaacaagctcgataaatacagcgactttcacaaaaggctccacacacaaatacaaaaaagcatgacacacgaaaagctatgcgagggacccacgccctcgcgaaaattaggtagccaccagagcttttttttaacgcaaagcactctatcatgatgagaagatgagggctgttccatccattccaaattccaaagtgcggaattagagatagccaccgagacgccttggatctttctgggtgaaaagatgggcaccaaccctataaaagaagctttccctcttggcatttggaacctgagcctaccagggacagacaaccaccgcaaattggagggaacggagcagaaggtagcgaagcgaaccaagaagtcttcagtattccttccttgcaagcatcgttaatggaggggtcaacgagtcaagaccatgtgattgggatcccggtgagcaacaccgcctatggcatagaggagccggacttcgcagcggaggagacgaccacccctgatcatgccggtttcgttgttggttccttccaattcaacaacggtaagagttcgtttctgcttcatctgttcaagtgaaacttgatacgaatacagaacatgtttttgatgatcctatcgtttctgtgttatttcagatgcgaatagcccgacgacgacgacgacgacaaccgatcgggcgagcaaatatggcaggaagggggacaagattgcacagggcatcaaagaacatggtaagagcaatcatctttgattttttcaacacggaagaatataaattttgacgtgtttggaaaagtaagactgatgaactcgtcgttgttccaatggcttacagtgaccctcgggccgaagctatcggaaacggtcaaggggaagctcacgctgggcgcccggatcctccaggccggcggcgtggagaaggtgttccggcagtggttctccgtggacaagaacgagaagctgctcagggcgtcgcagtgctacctgtcgacgacggccgggccgatcgccggcatgctgttcgtgtcgacggagcgggtcgcgttccgcagcgaccggccgctggcggtgtccgccccgggcggcgacaaggtgcgcgtcccgtacaaggtgaccatcccgctgcggaaggtgaaggccgccaagccgagcgagaacaagcacaagcccgagcagaagtacatcgaggtcgtcaccaacgacggcttcgagttctggttcatgggcttcgtcagctaccaccgctcgctgcaccacctggagcaggccgtcgcgcaggcgcggcgatgacacgcacgaagcgcgcaagcgcgcgcacccatgtcgtggcggagctcgctctcgatcggatcggtctcttcgtgtcgtacgcttgtgtgtgtgcgtgcgtgcatctgtgtcactctagcttggtgatgcttagatgggttaggatttgtgtatgcgtagggttgatcgatcacaacatgtcgttgtgtgttgggtcgccatggctggcctgctggtggattgatcgatcggcatgcagttttgcaattgcatccagcaggttagatataggcggcttgattagggcatgcgatggcatgtgatgttttgtggggcgtgtgcggaattgaaattcatgaagaagttggatgagaaatggtttcggctgcaaatcggcaaatggcaaaagccccatcataagtgcatcgcgaatttctgataagatatgccaaaaatggaagtttcgcgataatcttcgtgttcttgttcatgttccctgttctggtgatgatggtgatgacatacatatgcaattcatctgcttaattccaaattcacaccgtgcagtgaggtgctggcaagattcagatatcttttgacatcaacatgcatttcatatactgtactcatgtaaggctaggatttcatcattacatagtttctgacataaactggaatatccaggacgatatcgaggtgatttcttaagattatttattgatttgatttgatgtccggccaattccgacattcttttggtaggacgaactgttcaattctgaccgaaagaatcaggtgtgttcatgacatttactgttgaagtagcacttatacaccatctctacagttggtacatatctgactgaaagagattgaattcaattctccgctttctttgcaaacctagcctgactcaggtcattaaattgctgtacacaatatacagtccagcctgcaaaattggagaaattcaattatctgctttctttgaaaacctagcctgagtcaggtcattaaattgttgtagacaacattcagaaaaataggagaacattcttccaggtaggacaatctcatgtcagacatacaaacaaatcatcagacacatcgccgacctgcacaatatattactaacttgcaaactaagttttcatcatcagtaccaaatctccttctcgattttttttaaacttttgtgacgagattctcctccacttagatacattaattcatatttcagggctttctgaacaagaaataaactacgggcagctgaatccgtcaagttggagcactgactttggctaagccggcaatgccaatacatccgcagcagcgttcaaatacttgaaggcttagcaacgaagcgcccaatggcagtgtcttgtttcggggccaagcagggggatatgcactttggcttttacagatgcatttgatccgtcccttttctttcagttatctcaacgttccatctttagctgaaccatttcctttgccctgtcggattggaccatcgggcgatcctcttttggaatcttcgcactgctaccgcttatcggatcagatgggctttcgatcagctcacaccctttcatggttttcaccccactatgaggcaaaagctacgacgaatcagtttatctcttgcctccgaagttatcggctcggctaccactacagtgaggaccggaggagcaccagcgccagtgggataggatataggaacactcacttcacaacttcagaagaacagactgaaaattcagagataaatatacaggctttggatattcaggacacagaaaattcaggcaacaaaaaaagagcagggaaaaaaatatggaaattcagctctgattcatcaaaaatgaatgattggaacaacttgtgtcttgtggtgccatcagagtactactgacagtctggaagagaaggccatggcacttgattttaacacctttttgttgaaaggacggccatttatgtatcgaaatggttccactccggatattccgaacatgtactgcactgaattgtatcacaaggactgaaaaaaaaatgcactactcctgctacttctcgaaaccgatcgaaacgcagaaaaagaaaaataagaggaggaacgcaactgatggaccgcggacaaggacggcagtgcgtccgtgccactcactcgatcacttgccctgtcagtctatcacacaccgtatcgcacgcgtgcatccatccgagagcgagatgcacgggcgcgcagtcgcgcacgcagccaagcggagcggagcggacgggcgagcgagagcgagagcgagcggccgtgctgactcggtgccgcgcgggcctcgacgcggatgcgcgcgcgcgcggtgactagcgcgcgacggttgggcggaatggtaggcgatcgatgggagtggatggagacttcgattgggagggaaaactggatggaaaaggagaccatatgcaccggtctacgatgactgttgcgcacttggggttgcgcgcgtccctggaaaaatctgagatgagattgtccagtttttttttttttgggctagctggaaaggtcgttgttttacacgttggatcatcttgcgtccacatcacccgcggggcctcactgtgtgatccgcagcaggccaggggagaaatctaaaatctgtgtgatcgatctgaacatgatctctttgacagacgcagttgatatttggactatcataattcataaatcatcgtatacgcgcttgtccagtagatttgtgtaggcgagacatctaaatcatatactagacgattttgatatctaataaatcgtataggataacacgccttcaattacacttggatactgaagctagtttttatttccagggaaaaaaaacgaacgttacgtaaaaaataaaaagaaaaaaagagaaccgtccattcatctattgatcattgtatcattccgtatgtaacccgttgccatgttcatataagaacactaccaactacttcagttttctgagacccaaaaaagggttcctggaaaagcctactggcaggtactctacagactacagaaaaaataaaaaggactaacgaccgatcaatcgatccaaaactcaatatgtttaagatccctgggcctggatccctggcgcccccacctccttttttcccataacccggagcaacaagattgtgcgagcacatgggctgccccttccaaagtggcaatgccaagccatccaccaccaccaccatgcatcaccacgtagacaaattcaatcaaccggctaccctcccggctgccgaaagagagaatatcctgcgcctcgctcgcggttcggttctccggttgggcgccggtcgatcggtcgcgcgcacgatcgggaagcggaagacacagccccacgcacgtaaagcagagcaagctctctcaagctcgggcacttttggcgaacgtggaccgcttgcttttccgggcgccgatcagcaggtgctgactccgcgcggggacgaatccgctgccctttccgctaaagatttcgtcacctcgccggctataaaacccgctcgctgcgcctccgctatccctccccccttctcctccttccgctctctctctctcgcccgcgttacagcttacgggctaaggaagcgagcttagctgtaagcgcggtgccgcggagagagagctagccatgacgaagtcgagctgcgcccatgtggtcggagtgcccgtcacctccaaggcgtacgccatcgaggaggcgacgacggcgagggacggtggcaagaaggtcgacggcgaccgcctcgccgtctcgttgacgcacccgagcccgtacacgtctttcggctacaagcacagtacgttattacctcctttgatctctcaagattatagtttaccgtcatgactgcacgtatgtactatatgtttgctaacgatcgggtttcaaattttgtgtttcgcaggcagtaagctccaggtgatccactgggtgaacaagctgggcagacgggctcagggtttcagggatcatggtgagttatcatgcatgcatgcaacctgaatgtttaaatttcaggctttgagcgatcaaaaacatgtgcgtgagcacgttgctaacctatgctctgtttcgccatgcgtgtgtgcagtgaccttggggccgaagctgtcggagacggtgagggggaagctgagcctgggcgcgaggatcctgcaggccggcggcgtggagcgcgtgttccggcaggccttctcggcggagaagggagagcggctggtgaaggccctccagtgctacctctacaccaccggcggccccatcgccgggatgctcttcgtctccaaccgcaagatcgccttccgcagcgaccggtcactcgccgtcacctccccggctggcgacgtcgtcgcccgggtgccctacaaggtggtggtgcccctgaggaggatcaagagggtgcggccgagcgagaacgccgacaagccggagcagaagtacatacacgtggccaccgtcgacgggttcgagttctggttcatgggattcgtgagctaccagagatgctgcaagtacatgcagcaggtgatctcagagctgtaatatgcttatatatgtagtacggtgcacgcatgtggtatttggctggccggcctcctaccttgtgggtggcactatatagtactaaaagcaaagtgtatgggctactgcacggcaacctcttgttggaacgtacgtacgtagacctgaactgctctaccaatttttgatgagagcgcgttccttcctcttgcgatttggcagatcgacgtgtggcctttgcaagtacaagtactctatgtttgtaacattgatgaaccaaggaacttggttttactgaatgaaaaatatcttaattcttctctcgacgagcatcgacaacgaattgaaacattgcattttcggccttgaaaaataacttacctaattcaagtcactgtcttgctcatcgagattagttgatataggctagctagaatagctagcttgctccccatttatactcgatgtgagagaaccctagatcaaacatataagctggagtacgactattaccaaccttaaggtccgaactattataaaatcgctttcttatgttctcttatttggtgttcatgtatacatttgtatcagtcgtcataccctgcattccttaaatatcattagtgcatttcatgtgtgagctatggtcacggaaggaggagtactgggtggaagggatcgcatggcagataatagagagagttcgtcggggcgagtgtgttcgggtgtggctctagctggaggacgatgctagagggggagaggagatcgtgggaacataacacgatttttggggacgtgaatccgatgcgattcgagggagcatctgaccatgtgtgtgcgaggaggggccgggggaggggtgaatggtcatgatgaatgatgttgctgcattaattatagggtacattacttaaaaaaattatattatgttaaccctcataagtggacatatcgatttcatattaattgtttgttcttaagttttttcatttattacatgtcaaaaagtttttctcatttattatgcgccaaatggatttttcatttatgtaccacaaacatatatgccttttaaatgttcctacatgcaagaataaggttccattgcatttatgtggagaacacataataaatgttagcaactatatcattgtccatataaacccatgccattgaggcctttgcaacaactccttcgaaaacatatcgtttgatccatgggtctagccatgaaacatcttttcctcctccttctgccgcttatcatgatcttcctcccatgcatcgcttgcgatgcaccccaactggtgtatgatgctggaggcgaggagctaagtagcgaacacaaatactacatcttcctggtaaataataggtctggtgggggtgccctctccatcatctatgctggcaatacacattgtgagcattttgtgttccataggaccgatgaggctctctagggcgcaaaagtgagattcacatcattgcacaattcaacagtcagtgatgcagtccgcttgtcgaccgatgtccagattgactttgtggacatcatctggttgtgcaaccgcccctcgacatggtacatctctaatttccaactgaaattgttaccaatgccaccatcatcgtcaacatctaagttgcaatatgtcgtggccaacacaaatatagagcctaactacccatcatcggctaaagtgttccgcattgagaggtacagtgatgatgacaatatgacgtacaagctattgacgtgcattacccatgggaagccttgcaaatatctagggtttcaggtcttcggggataataaattcctagtggcaacggacgagccattagcagttcaaatcgtcaaggaatacacatgatttatgcaagtgcttatgcttatgttatattctagcatgtacttgtagtttatataatgtgcgccatataatctatttgtgatggatcaatcttaagctgttatttcttttgatgtgcgaaatgttgaaactttgtgactcttaagctgttattctatcaatgaataagggagaatagctactttagtccctaaagtttctctataggatcagtttagtccctaaccttttaaatggtccaaaaaaatccttaacctttgtcataaggcctagaatagtccttgggtccaccaaaatcatcatatggatatgccatgtcatcattcatgcaaaatctatgatgaattgtccaatttacccttacgtatatcatagaaaaataaatataagggtgaattagacataaccataggaaaaaaatacttctttttttcacccttttgaggtatatttttgctcttacaaataccatatattttttaaactttttccttttgttttttatttttctgtgcgtaagggtaaattggacaaatcatatagattttgcataggaaggtgacatggcatgtccatgtggcattttggtgggaccaaggactatattagcccacatgacaaatttaaaggacttgtttggacaatataaaagattactgactagaatgacccatgagcgaaactttagggaccatattagctattctcccaatgaataatatctttagaagttctaatttcaattactaatcatgaaaaatatatacaagtatgtcaatgcttttggctgtgaaaaaaatatattaatatattttaaattttggcaagcaaattcatcttttcaaatccaacaacaaacatttgaaagcaatcaaaaggagttaaaggcagcagcggccaagtacaatccactcttcaggtcaggcataatgccaactggtgtgaatgatacaactattgtgcttataccaaagattgatcagccgatggagctccgagacgaggtctgtgtaatgtaatctataaagtggtatcaaaatgcttggtaaatagattgagaccctttctagatgagctggtgtctggtaatcagagtgcttttgtcccaggacgcctgattaccgataatgctttattagcttttgaatgcttccactttattcagaagaacaagaatcagggaaaggctgcctgtgcttacaaactggatttgtcgaaggcttacgaccgcgtggactggcgatttttggagcaggctatgtataaattgggatttgctcaccgatgggttagttggattatgacttgcataacctcggtgagatactcggtcaaatttaatggatcccttttgaatacatttgctcagtcgcgtggtttgcgtcagggcgacccgctttcaccgttcctattcttgtttgttgcggatggcatgtccctacttctagaggagaaagttgctcagggtgagctatcaccggtgtatgtgtgccgccgagctccttgtatttcgcatttgctgtttgcagatgatacattgcttttcttcaaagcaaacagattacaagcccgggtgattcacggcattttgggtgattatgctgcagccactggacagttgattaatccggcaaaatgttcgatcatgtttggagatgtctctccgacagagatcaaggatgacatcaggaatatcctgcaaatcggtagtaatgcttttgaggacagatatctgggtttcccaactccggaaggtcgaatgaataaaggtaaattccagccgttgcatgacaaattgtggaagagactaatccaatggggggagaattatttgtcggtgggaggtaaggaaattcttattaaagcggtcattcaagctattcctatttacgtgatgggtttgtttaagcttcccgactctgtctgcgacgacttgacaaatcttacccgcaatttctggtggggagctgggaaaggagaaagaaagacccattggaaagcttgggatcatctaacccgacctaaactttgtggtggcctgggtttcagagactatcggttgttcaatcaagccctcttagctagacaagcctggcgtttaattcagtcaccggagagtttgtgtgcacgggtgctaaaagcgaaatattatccaaatggctctttggtggatacatgttttgcgagcagtgcctcccccggatggaggggaattgaatatggccttaaattgttgaagaaaggaattatttggagaattggaaatggtcgatctatccgtgtctggagagacccatgggtgcctcgcaattttaccagaaggccaatcactgggaaacgtaattgcagaattaagtgggtttctgaacttttgacagaaaatggcgcttgggatgctataaaggtgaaccaaaatttcctccccattgatgctgaggtaatcttacagatgctgatttcttctagagatgaggaggatttcattgcttggcattctgataaattcggaaggttttctgttagaagcgcatacaagttagcacagtcgttggagcaaatggaggagagagctagttcaagtgctgcatccacaactatcccttgtaacctaatttggaaatgtaatatccctcagaaggttaaaatctttgcatggaaggcagctactaactgtttagcaactatggagaataaaaagaaaaggaagatgtaatcttcagatatctgtgttatatgtggcagggagaaggaggatacaagacatgcgctcaccaggtgcccacttgctcgtgctcttttgcaggctttgtaggaggatcactgtttcatttccgacaatttagctcctactgattatggccattggttgtttgattgcctggagaacctggcggattcagggcgttctctgctcctgatggtgctgtggcggaactggtttagtcgtaatgaaatcatgcatgggaagtctgcacccacgattgaagcgtctaagaatttcctgctgagttatgtcaatactcttggaaatcaaacagcatccccaggttaatcagatgaagggcaaacatgtgatcaattactggggtttgaagaaggatagtcagcaaagactgtacaatggaagcactaccgactgggagaagccgcagcaaggttggatgaaggttaatgttgatgggtcatatgatgcacaaacggggactggaggtatcgaagtggtgcttagggactcggaagtagggatggcaatcgggcgcgacgggcacgggtagtgcctacccatacccatgcccgtgagattatttgtgcccgtgggtatacccattactacatgacgggtaagaatggttgcccatgcccattgcccgcgggcgccttatgcccgcgggcgtgcccgtttacccgccacaacaaaagcagtggaacaaaaagtctacaagctactaagttcgaatcgaacttaaaacatcaaatattctccgcctcggtgtcgtgtctctcctctggcggcgatagagtaagaggagagaaataataagggaaataaaagggaaaccgtagaaaacaaagaacgtggcttatgtattctagtggattttgctcctagcctacatgtaagttagatttcgcgggtaaacgggcaaagcgggcatgtgtagtgattacccatacccatgcccattacccatcgggcatagcttttgacccaataagatatccatgggtataaaatagagaacaaacccaaccctaatagggtttttacccgcgggtaaatgggcaaacgggcacaattgccatccctactcggaaggaaatgtgattgctgcttcctgtaagcagctggccagttgccggaacgcacttgaggcggaactccttgcttgcaaagaaggagctgtccttgcgttacaatggactttcctgccgtttgtgctcgaaacggattgtttggtggcaatacaaatgatccagtccaaggagaaggatatctctgaattagcgtatcttataagagaggtgaaagagcttcttggcagtaatagaaagtcaagatctgtaaggctctgcgtagccaaaaccgggttggccatagtttagcgaataaagtccggtgtgattctttgtccggtctgtggactgggaatggctgtaatttcatttcacggttggtctgtgaagacgccgtgtctaagtaatatatgccttttccccgaaaaaaaaaatccactcctcacacttcctcagtcacgcggcctcatcctgcttctgctcacgaaaagagaaaaatcggaggaggagagagagagaagaggggaggggcagaggagagggaggctctctactcctagcactgcccatgtcggcggcatcgtcgagcggcgccggcggcgccctcatcaacgacgtgctcaccgacgacgtgctccgcgcggtgctggcgcggctggtgcccgaggcggagcgggacgcgttcgggctcgtgtgccgccgctggctccggatccagagctccgatcggcggcgcctgcgcgcgcgcgccggcccggccatgctgcgccgcctcgctgcgcgcttccccgggatcctcgagctggacctctcccagtcgccgtcccgctcgttctaccccggcgtcatcgacgacgacctggacgtcgtcgccgggggcttccgcaatctgcgcgtcctcgctctgcagaattgcaaaggtgcgaccttaatctctgtacgactgtagccgtctgtcaacgctgcttgtccgtctcgattaacaaacagcaattgggaattcggatcagaaaaagggtactgaatagtaggatttatggcttaccggttctttccatctgctagatggcagaaaggtaaaacttttttttgttccttttttttcttgtctctgctaagcttgttggaatcgagatcgactgttcttctttcttctcaaccttcatgcttttcattcttttccaacatggcattgtgctgatgtcttgcttgtatcatttcagttttgtgaattcagaactgtttgcatacatgggaaaaaaaactctgcaacgttgtaaaccacatctgatgcatagctgcatatggttcgctcccggaccagatgtagatagtaatgaactaatgatccttggttttgttcgccgaagaacatgccgcccattgtgaagaggaacgccacctttaactaccttacagcctccgttggttcatttctggaaaaaaatagcctgaacttttgaaaaaggttaaaagcagcactgatgatcatctctagttttgctagttttcattctatttgaatagagactagggaaagctgagagctatataattccccactaggtgtgtttttgtataacaatattattcatctaagaatgtgatcctttctaatgttccctgagaggctgagatagtacttaatatatgctagttttctatgacttgaatgtacgattgctgcatgaagctgctgtcctaggttttgatgcataatgcaatgatactcagaagcgaaatcaacatcttctcaatgttcttttggctttaggcatataatttagagaatggactgaagcctttggtgtttatcttttctcgaatctagatggatgttcgaaattacatgtaatgcatagttaagatttgagattttggtactatgtttgataaattacccatctattagtcataccagtggctttgttttgtactccaattaaaaacaagcaaactctgcttaggtctgaaactactgtttttattatcccttgatatgatgataaatccactgatatttggaccgctcttgtgtctcgtaggtgtaactgatgttggaatggcaaaaataggagatagactgccctctctgcaatccatagatgtttcccactgcagaaagcttagtgacaaaggtctaaaggcagttttactggggtgtcaaaacttgaggcagctggtcattgctggttgcagattaataactgataatttgttgattgctctatcaaaaagttgcatacatttggaagatcttgtggctgcaggatgtaacaacataacagatgcagggatctcaggtctagctgatggttgtcacaagatgaagtcactagacatgagcaaatgcaataaagtcggggatcctggagtctgtaaatttgctgaggtctcttcatcgtcattggtatcattaaaactgttggattgcaacaaagtgggtgataagtccatacatgcactagctaagttctgccataacctggagacactcgtcattggtggatgtcgtgatgttactgatgcgtccatagaagcactggcttttgcctgctatagcagactaaagtgcttaagaatggattggtgcttgaagataacagactcctcactgagaagtctattgtctaactgtaaacttcttgtggctattgatgtggggtgctgtgaccaaattacagatgcagcatttcaggatatggatgcaaatggatttcaatctgcactgagacttctgaagatcagcagctgtgttaggatcacagttgcaggagtcaggaatgtgatcgaatcctgtatggcccttgagcacctagatgttcggtcatgccctcaggtcacaaggcagagctgtgagcaagctgggctgcaatttcctggtagctgcaaggtaaactttgaaggcagcttatctgagtctgatccatctgttgctatattcttttaggacgatcaatagcgtcccataattcttttctagatttcgccgaagaacttgagaactcatcatgtcaaaatgtacctgatattgtggttggttttgggcgtgtgttgcacaatttgaggtagaactggatgatgccgtggatgaaaaaatgtgcaggtgtgcactgttcaattctcatgtgctgtacctgtagtcctgtactatgtagaaagtagcacactacagattcttggaatctgttggttagtacttagtagttagcttttgagaatatagagaaactggcttctagttcatgattctacaactacattttcttagaatttaggcgacaatctggatttctttgggtgagccgaatattccatgagaaactgcagaagcttctcaaactagacctataagttgtgcgctgtacatgcacgttatagggaaatgctgcttgaggttgatatatactctgatttatttattcgtacacattgtggatttgtggtgccatggctttttcggctgtcaacactctgttagatcagagtaaatttgcaaaaaaacggagaaccatcgaggttttttttttcagcctttatcgtcttcttgcaaggctgacgcctgacggtcgccatcgacgcgctccgacgaccggcgccgcctctcctccgtgctttgtcgccggcgctgctccaccgccgccacacagtccgcttcggttccccgtttccgcctgtgccgtggccaccgagaagaatttcagctgctaaggaacagaacaatatgctaccaaccacgtaaacaaatgtgaaaaaagttagttttgagatgcaacgtcgtatttgaggtttgaaacctcgggaa

SEQ ID NO: 23363 - DNA, 1013 bp, Oryza sativa
tagagtgtactctagaactagaagtgagtcaactcgattgatgccatgcgaccacagacagacttcttgtgtctttctttgtttaactatgcatgttggaaattctacagtttatatgatccagttgtttgattctttgcacagccaagagcatcccctcgggaatttgtgatattagttggaaggaaggatatttggctgtggtaaaactggtattgataaatagagcacagatgcggctaactgttggccaagtgcatcgacatgtacttgcattggcatcttctcggtcatgcttcgtccttggtgatcaccttccattcagaatgctttcacttccacgagtggtaagatttcaccaaaccgcttggcatgatattcaaactgtggaagataagagtggtccgctaactctagctagtcttgaagtgcaaaacaaagttgaatatgttaagaaagaaagagcaacacgtactggaggcataaagccatcttcaagggcttcagctcttaatatgaaaccaaaagtttcttcattcaatgccaaaccagtaaagagtgccttgccgaaatcagcagtactgaagaagactctgaagatagatgaatctcttttttctgcaaaatcatttgaagaactcggtttgccacctttgcttatagataggttgaacaaggaaggtcttactgctccaactgaggtccagtctgctgctattcctatcatttcacaaaagcacgatgcagttatccaatcatatactggctcagggaagacacttgcttatcttctccctattctttctgaaataggccctctgaagaggcctacagaacaagacagttctgataagagatcaggtgtagaggcagttattgttgctccttctagagaattaggaatgcaaatagtgcgagaagtggagaagatattgggccctaatgataagagacttgtccaacaacttgttggtggtgctaatcgttcgaggcaagaagaagcattgaagaag

SEQ ID NO: 23364 - DNA, 934 bp, Oryza sativa
tggaactccaagatcttcctgaacgtgacggcggcggcgtgggggttccgctccgtgacgagccagcacgggtcgccccccgcctcgccgtcgtcgtcgtcgtcggcggcggcggcggcggcggcgacggcggcttggccgatctggatgcctgcgttgcggggcctcttgggcctactcggcttgacgcccttgtccttgtcgacgtcgtgggcgggctggctgatctggaggaggtcggcggcgcgtggctttacggtcctgatcggcttgacggcgtcggctgcgaacgtgttagcggcggcggcggcggcgcgtttgcgcttccacgacgacgggccgggacctgcacccgggtcctccgcaaactccggcggcgggcccttcgggaggaactcggcggagcagcggagcaggtctcggcgtgccggaccaaacactttctcgagctgtgcgtacacctgatgagcgtccatccatctcttcttgtgcaagtcggaaagcttgacgacgaccctgtcgtaaagcttctcgtcctccgccttcacccgctccaagaatcgcttggcctcgagcggcgacacgtctcccttgccttggggctttgccgttgccgcagcgggaaggtgatcggcggggagctcgatcttgtactccggacggacgaaggtgttgaactccgcgatgaggtcggggtggtcgccgaggagcaccgccgcgccgtccaccaccagggaggtggacgcgttcgcgtacttgccgtactcggtgaggatggtctcgagccccttgtagacgcacggcttcaaccagaagcggcttctcaccttcctcaggaaggcgagagccgcgcgggtcagctcttctcggttcgccggcgccggcggcgacgccatggccggctttctcggaacagagaagctaggcgcgcggt

SEQ ID NO: 23365 - DNA, 934 bp, Oryza sativa
tttgtgggggcattccagatcttcacttgcctacatgttctcttaagatttccaagagaaggcatagagttccagggttggcgattgttgttccccttgttgctacaacaatatgtatcctttcattgctccttttcttccatgcttggtataagaacagattaacaaaaagtccttcaacaatgtccatgcgagcccatcaacttgtctcctaccagcagttggtacatgcaacagatggcttctcgacgaccaatttgttgggtactgggagctatggatcagtctatagaggtaaattgttcgatgaaactggtgagaatgaaaatcttatcgctgtaaaagtattgaaacttcagacacctggggctcttaagagtttcacggcggaatgtgaagcgatgaagaacttaagacaccggaaccttgttaagatagttacagcatgctcaagcatggacttcaatggaaacgacttcaaagcaattgtgttcgacttcatgcccaatggttgcctagaagagtggctccatcctcagatagataaccaattggaagagaggcacttgaatcttgtccacagagtaggtatactctttgatgtggcttgtgcattggattatcttcatttccatggcactacacctgttgtgcactgcgatcttaaaccaagtaatgtgcttcttgatgctgatatggtagcacatgttggagattttgggctagccaagatactgtcttctcaaccctcaacgagctcgatgggatttagagggacaattggttatgctccacctggttagtttatcattctttttatttgcatctatcgatttatttaacacaagaaaatttacttgaaaacattacgacctttcaatcgtcaaatctctttcaccatagacatagcattatcatttacccagtttactta

SEQ ID NO: 23366 - DNA, 1121 bp, Oryza sativa
gcggccttaattttcctttttttagatggttgattttttgttcaccattttttacttctatataatacatggacaaaaaatcgtatctaatctaatattctgatctgacaaaaaaaaacaaaaaaaaaaggggaagaactcaagtcggtttctccaattaggccgacaccaagctgtcggttcggcccaaaacctcgcagccacaggagagagaagaatcgcgaaggaagaaggccggagaagcggaagcgagagcgcacggcggaggcgaggagggtttcatggagcccgagaaatccaaagaggcggcgagccagccgatggaagcggacgccggcggccccgtcgatccccgagaactaggtagctctcccaatcccccccttgctttagatggctaaaatctttcatgcgaaccccttttgcttcctcctccaagaaccggaagtatatataaatcgtgcaggaaatgggagatgcctgacgtgtcctgactgatgcacctgatttcccctcttttggttttgtgttacctctgaatttgttagtgtccagcgacgatgagatagattactccgtggagcccgagttctacgatcccgacctggatgatgtcgatgagcggtgggtgagcaagcagaggaaagggaggacttctgacgccgtgctcagctgccccgcgtgcttcactaccttgtgcctggattgccagaggttgtctttccttactgcttcgaactctgtgaggaggcttctggattccaatatgcatgtttattaagcagtcactagttctttttagattagtcgatttactatttttagttcttggattggcacgatgcttttcctgatgatgaagaaactatcaggattgtggtgctgctgcctgtatagggtagatgctatcaataattttgtttggagaagttggtgtatgttagaccatgaggagtatatctatacatgtgagcaaatcttttgcatacaatcgacatccatgctcacaatgatcaaattggttgatttaagtggctggaagaaataatggaacttcttaataaatggtttatgctaggattagttgttcctgaatttttagtttgattttgcggggtgca

SEQ ID NO: 23367 - DNA, 11487 bp, Oryza sativa
tttggtttgaaactaaaataaaacctgcttggaacttgtgttggtaaccatatattgtgcttgatcattttcctctccagaatatgcaattatatcacttgattgtactgagcatgtccaattttttaatacaaaattgagaaatctagatttgtgggaaaaaaaatctggaggcaagtttatgtgacctatttgcaattctttcagtaatcattttatatcgtgaaacattatgctgttgttttcatttgcacaatgttcagaaactcctgaagttcttactttgaatgcttcaaatcttcagacaattattaactgtagtggctttctttgatgttcaggcatgagacgtatgtaaatcagtaccgtgcaatgttcgttcgcaactgcaaggtcaagactgatcagattctacgggaggggaaaggcaaacggaaaaaccgcaagggaaaggctgctgattcttctactacatcagaaggtgaaaagaagggtgcagtttatcaccctgtttgttgtgaggtttgctcaactgaggttggagtgtttgatgaagatgaagtttaccacttctttaatgtcattcctagcaactcctgaaacttgttcttctgaatgtgtagtttgttgatccgtagccactgatgagatctgtacttgctttggcgttctactgttaaatcaatctacattcaattcagtcaggtgcatttgccatacttttttttttcatttctgttgctaggagttcttcagtctaaaattataatttatagctgtattctggtatggggcctgatgaatttcaccaagaatgttggcaagttcctggaatattggaattgcaacattaattacttcaatgtgtgtttttttgtgctgtgcagaattgctgaataaattaatgattcgtgagaattattcgagggtacaaatgaacgaatgaattattataaagataaaaatggatttaagacagtattataagaaatcatagcatttaggaattcgggaaagtgtgcccatttatccattcattcgttaagcagagatgtcctagtatggtagtggaccagaacgacaatgggttgtgaatagctacagtcctgtttggaccagaacacaggaaattttgctgggggtagaatcgaattgtttctcgtgaaattcacagctcatatcctgtgcaagaacatcaaaactgagaggagcagaagaggttgtagcttcagtgtaaagatacgaacagtgcacagtgtttcacttccgcggtgagaatagagagagagaaaagattgcgttaaaatcaggtggcgggagaggtcgccgacatgctctttttgagccaacgaagccatgaagcctttgccgggtggggctccaattatacgctgaaagcgagtaggcgaccaacgccatatgcatatccaaaactaggaaggctggtagccggtccattcgccttccctttcaacacaggtcatcatcatcgcttcatcgcccctgtaccccccctcgcttctctgccctctcctccctctctcgacgtctttctccagtcatcttttgttgaaaaaaacgctctcacaacctcccgcaaagtcaactaatcaacgcagtttttggcatcttcatgtgcgtattgcgattgctacttggttgtacgggctaactatagtattaaaaatcacggatggctaagtggtgctggtgtgtacctagttcatcagagttcaagttttagatttagtttagctgtccaatgtttttaggagtgcttatgcatgtatgctaggttaatacgtggtgtcctcgctacagggggtgggtgtttgatgcctccaacattaacttaaaacatgtgtacaggacttacaaatgtttgtgcgtgcaagtggtggtatgcaaacacacaacccaaattattgggaagtggcaaatcctctaaagaaaaaaaataaaaacatgaataaaatgatttactcttattgtggtgggattagctcatcggaattcaagtttctagacttaccgcagatgctcgtatttacgattaattattcttagtggtatatgacatccgttgacagcgagatgtttatagttacgtcgttaatctcaatatatgtcatccagtttttgaaggtgtttattatagagttaatgcgtgcacatgtgagcgcgttatagggatgattgtgtacgtgtgttttgtgcctgtttttgtaaggtgtctttcaaaaaatgatattatactacttttttttcgaggaaacgatattaggctcttgtctcgtacaacatccagtggaacacatggttttgcatgatctcacaacaataatcagttcaatctccatagatatcctcgaaaattcctgcttttgcaaacaaccaaccctaaacgccaagccatggatcgcatccccctcatccatctcattctcaccgtacgtttccttcgtcccgggtgatgatcgatcgatcgatccagctgccgccgtccatccaagctttgggcccccagagcagcagcacccacgcccccacagctcatggctgcaaaaactgtacgctacagcgttgtacaatgtacatgtccacgtccatacagtcgcagcttggacgacggaaacctgtacacagtctcgtgcatgaccacatgataacgattttttagtaggccaaagaccaaagttttttttttctttttcctgcacatccccagcagtagcccccatcatccagtgtccaccgaatcgtcaccgagcttttggttcgaaaacgatcgatttcctcgcgcgaaacccccacgaatccgtccgtttttgttgctgctgctgctgccgccgccgcgaaattccgagatctccctgtctcggcagccagcgtctctcaggtcgctgtgcctgcacagtttgggttctttcacacgtccagttcagcacccacggggataagatattgtaatgagctcgagccgtcgactattaaactaatcctcgccgtgatgtgatacggtggtagattaggcttaagctatgtagcgtttgctgctgctactatttgtaaaagaccctgcagattccagcaaagtgtgagagctactggacccagattcccatgtgccctgccccccctatggtggtacagtactactgctgcgaccacactgcctcttgccctcttctgctcctcccatttctcctcctctccttccctcctgatcaaggtcaggtctctctggtgacccagataattagcgctcgcatttactacgttgcacacacgagtaaaataccttgaatagtatattccgtattgccatttcgctacgaacatgtagcgtgtagtgcatggctgcatgcattagaatccagacaaaaatgtgctggtattgttgtatagtagtaataatgttgattactgtttcctcaatcatgaaataagtttatttaagccatcatttgcattagaggctgtgaaaatataagataaatacattaacaatagataaagagggagataataattgcattaggatttgatcaagtattggatattctagttttttcgattgtattggtatatgaaatgaattacaattaatttattttgagacgaaagtagcaacatgtactactactagtacttcatgagaagaaattttgtagaaaaaagtaagtggggggggggaagtgaagtactatggtaaaatacgcagaaaaaggccctgtatagatgggactaaaacttttaagtccctatcacatcggatgtttgaaaattaattataaatattaaatatagactattaataaaacccatccataatcttggactaatttgcaagacgaatctaatgagcctaattaatccatgattagcctatgtgatgctacagtaaacattctctaattatagattaattaggcttaaaaaatttgtctcgtgaattagcttttatttatgtaattagttttgtaagtagtctatatttaatactctaaattagtgtctaaagacagggactaaagttaagtccctggatctaaacaccacctaaagacgagcaagtctacatcaagtccattataaatctatccggcgtgtccctctccccatcacctcaaaacctctcaaaccccacaggcaccggaccaccaccaccattggcaccacctcgcatcacactctctcgctcgccatgagctcccgcgacgccgccgccacgttccatgtctaccagcccgtgcagatcccgacggccacggtggcgcccgctgcggcagtgtcggcggcgccggcagaggccgtcgcccagctggtcccggcgccgagcaagaaggcggccggcgcggcgggtgggaaggaccggcacagcaaggtgaacgggcgcgggcggcgcgtgcggatgccgatcgtgtgcgcggcgcgggtgttccagctcacgcgggagctggggctcaagtccgacggccagaccatcgagtggctgctccgccaggccgagccgtccatcctcgccgccacggggaccggcaccaccccggccgccttcgtctcctcctccgcgccgtccacctcctcctcgcaccagcacaccctcctcggcaagcgccagcgccaggagtccgccgccgccgacgccgtctccgtcgccggcgccgcgtccgcgttctgggcggcgctgcccgcaccaggccggcccgacgcctggggcttctccccgctggacgcgcagccgacgtacgtgccgatggcgcaggcgcaccaccaccacctcaacctcctcgccgcgctctccggcgccgccaggcgcgccgaggaggagtcccggtgaatcacgcacagcagcatgcatcttccgagctctgacacgtctttcgctcaattcaccgacgcgtactgcactggcgtccgtacgccttgttcttgggacagttcttgattggagtgtgcttcttctctctaccccgtggatcgatcgttttgccttcttcctgtgcggttcatcaattgctcaagatgaaattaattgttgctgtggtgtttaagctcaaaactgtaaatacgagtccttagatctcatcttactcctacaaattccagcgccgcatgtgtttgtgtgtttgccacttgtttccagctcttgtgctatgattccatggaacttgtttcagtttagcttcatctacatcgttgtcagaccaaatcatttgacagttacagaaacatgttgcattgagctgctattccttgtgtgcatttcctatctcagcagtctatccaggattatagcgtgcacatcaatcacaatcttccattgcttcttttttgaaaaagaggaaaaaacaatgtttcattctttttttgttaaacgaatcggcgcttatagcgtgctaactttattgaatatagcaggagaaaaacaatctttgattgctcatggaaatgttcttgagctcatttcgatcgtaagtaggaggagggatgtaaaacaaagcaattgttgttcaactaggcgtaggagaaggcattcgagcaagtctgagaatttcctcggttaccccatccatggctgcagattacaccaatgataacgctggctgggaagatgcccgttctcctgtatactcctctggtttcttttctctcaaaaaattcgcctttttttcccctgctcttcttctgcaagtgcaagctatagctccgagcggggggaaggaaaaggaggaaaggctgcggcgctgcagcggcatgcagtgctgcacagtgcgcgctgctgctgcggccgctgccgctgcctgaagcttttgcccatggtgaaaggttgaggccgttgtgcatgtatagggctcgtcgttgcgtgtcaaagctggacgcaacctctcggcctctgaactgtaaagatgccctacctttcgtacaacgtcctgcatgctgccatgtcccgtgctagctactactctctcttgcaattgcaacacagcggactactcctaccggctagaggttgacttggcatggcaggccggttactctcttgttgcactgtacatatattgcacattgctatatatactgcccctctagggaatgtaattaaggaggcatggttgaacgtatcaggtaaaacaaatggagggtcacagggcatgttactacatgatactcctagtacttgacaatcttatttttggatgatctatagtttgactgtgttagtatagtgtgagaacaagaatttcctgctagcagtactctacgcagtattagaagcgccgggcggaaggatgcaaatttggggtcgctgtaaattcctggtcaaaatggtcaggagatcccaataagagagacgctagtacaatgtcggttggtagtctgacctgtcaccacgtactccgccatgcagcgtgtcagtagtataaacttggacaaggtagtaggagtagtacgtgcgtgcgtaccatagctatcccagtacgtacgcgcgtactagtaccacacatccctactgctttgcttttgcagcgatgcaatactggtgttccgagttctctttgctctcaacattttggaccgctcattcagtgattcagactttcactgtagctagataggagtatactagtagtactaatgatcttgttatgcatgtaagcgaacaaaagtgtgtgtcaaggccggcttgaccgagaaaaattgtccgtccaagccgtcctggctcatggctgttcgcatgcacggatctctcagaggcacggggagcctgatgtttctgatcggccgcagactgggacggtccgtccctttgccgcctggttttggttggtggcggccagctgctgctgctgccgctgccgctgctgcagctctgcatattcctcctttgcgattggccggtacaaagcacatgtcgcggcccgcgggcgtggctgcgcgcgactgtgttcgtgacagtgtgactacgtactgtgtcgtagtcgtcgtcgtctactctgccgcgcgctacgtactcttactccgagaggcgagagagtgaggagaggtgtggtcgccgacggcgagacactggcatgcaccaccgaggccggtggaagctccccggcagatttggctgaaaatgtgacaccatacctatgaccggatgatacatcttgtttctatgaatttctatctagatttatcttatccagtcttacactcttcatcaaaaagaaaaagctaaaatcctaattgcacattttcatattcataatcaggatttaattttcttttaaaatatataaaaatatgttgctacattgtgagatggagagactacttttaagcaataccgtacctgtggtcctgactctttgtcctctttgtcttgcctcaagagcaacacgtagagaggtggcagcaggtaatactgatagagtacttgtaagggcatcagcaatcaaagatactctatgggtgtcctcactaaccgaagctactctatgggacacccatctcacaatggaggatactcgtagctggattctttaaaatcttaggcaactttatagggctactgcagcccacaacgggtgtcccgactcaaagtagcccagtaagaaatgaggatttttacggtactctatactgcaagtatatacttatagtataaacaatccaacggtgtagatttatctgatcttcctctaaattaatttgcagtataaatttaaaagggtatatttgtctttccatcttttttacgtggggatatttttgtattttcgcgttttctttttgtccgatctggctcgagagaaatccactccagagaattatgtttgctttccttcgtcccatgctctatcgacgccgccgacaaccaaaactctgcaagcgcctgagccaaactcggtgccatcggcgacggcgcgccccagcctctcgttcgcccagtcaccagccctagcaccattgagaaattgcactgatagccaatcgttgttttcattttgcataactgtctcctggtgccgcctccatgcagggattgatagatctggcaaatcatcccgtcataaactaattgaacaagaaatatactgagaacttgatatgtctggcaaaaaaaaaaatgaactagtcatctatcaatttcatggatcatgcatggctatgcatgtcaaaacttaacagtgctgatatatatttttagatgcaagtgcaaccaaaaaagtgtctactaccgatggaaaattactcccgatgacaaatctcaatttcaaatgactaaacagccatttttagattttttaacaaataccaaacctacccttctatatactgtaagtatatacttgcagtagaatgtaccgtaaaaatcctctaaaaaattccacccatacccctcccaccagcccagtaaaccgtctaaacttctcatctcttcctctcctttctcgtctcctctgctcgcgcccttctttcttctcgcctccgccacctccctacgccgccactagatctggtggccaccaccagctcctccaccacctctccgagtccgattcctccccaacgccggccaagggtgaaaggggaaatttctggtgggggaaccgtgtccacaagagacgacatcgtccaacgcgaaacctcaagcgagtggctcaggaaaaagggagttgaggaggctgggggtgcgttcccctcgtgggggtcgcacctccctgttgagacacggctcatggacggggggcgaacggcgtgagcgaggctacggtccaggggcacccattgctgatgctctaagagcaggtataatagctggctataagccagctataaagatgttttaaagagataaaggaagagagagaagagcagcgggctatagatctgtagccagctgcagtacggactccaagacgtaatatgtgtatgacatgtcggatcagatattaatggtatagtaagcaattattgtatgaattgactattatattggctataaatgatttagtacgttggatatataatattaaacttgctctaataaggtggttgctgggtcaaaacttgacttcgatcggcgcacgaacgctttgaacggcccccgtgcttcgcttcgtgagcggccagtgcgcatatacagcggggtttcggggcttctggctggcgctgatcaactagctcctttctggcgcgccgtgccgtgtggccggcgcatcgccgcctgcgcctgcgcggccctgcgtgcagcagtggataagtcttggccattccgtgaggttctctccgtgtgacaaaacaggtcgcccccgagaaacacaacggcacacgtacggcaaataactgtgatccatactgtgtagtacacctgtagagcctgaattttatcttgtctgacgaatggccgagttgctgcaattttatcgtctggcaggacgtgattttcttgtaatctgtggaacgggttttgcttcgggcactcccagactcccagtagtagtaggagagatccgagtcttgcatgggatccagcttcaacgcgaaacctaaccagaaagactccaccgtttaaaaataaatttactccctccatctaaaaatatttgacgcggttgactttttaaaaaatgtttgaccgttcgtcttattcaaaaaatttaagtaattattaattctttttctatcatttgatttattgttaaatatacttttatgtatatatatagttttacacattttacaaaattttttgtataagacgaacggtcaaacatatttaaaaaaaatcaacggtgtcaaacatttagaaaaggagggagtatatccttaccttctatcttcaacttaaccaatcataccatccttcatttaatttttaacctactttctcttcctaactactccctttagcttgataattctcgttgttttggacaagataatggacaaacttcaaaggctttgattataaataacatctaaaataattatcttacaaatatgaaaaccatgtgtatagataagtcttgaaaagtactttaataaaatcatatatttaataatatttatatacatattataataaaaaaaatagtgaacaaagttgtttttttaaagactgtccttattcaaaataacaagtattatcaatatagagggagtactttttaacgctcatgctcaactaaggaatccttacgttttaggacggagagagtaccatttaagtattcatatagtttcttaacattaattgattaaaatgggatttaggtaaaataatttgaaattgattagatagatccaaacacaaacactgggcatttggttctttctaggtgttttagttggatataatatgaaccacttagttcacttactataatactccctccgtcccataatataagggattttaagtttttgtttgcactgtttgaccactcgtcttattaaaaaaaatttagaattatttttttttgacttactttattatccaaagtactttaagcacaacttttcgttttttatatttgcataaattttctaaataagacgattggtcaaataatgcaaataaaaactcaaaatcccttatattatgggacggaggacggagggagtagtatctacttcactgtcccaaaataaatcaattcctaaagtttaaactttatcctaaaataaatcaatttcgactttcttatcttttatcgatccaagaattgaaaagtttttttcccttcaatacccttactgatccacctatcaatactacattctattgatgagggacaatgtagtcttttttttccttagtactaattttgtctgggaatgcgagggtgcaatttggcttattttgaaacgaatggagtacttcaagtatctaaaattagaataggcacgggaaatggagtattatttaattaatggcattctcttatccaatgtttgcaattttggttcgaaattcctaaaatcatttcacttgaaaattcccatatcattttttaatttagcaaaaaaaattcaagtcggtcaaaactgttcaaattaaattacaagaaaaaaaatcatgccgaatatcctaaatgcgcagaacgtaattaccaaccctgctctacctcggtcagcaaaaagaaataatgggattcatgtactaattaaaaaaacactgtacaacaagctgaataaggaaaacgaaccacacgaacgtgcacttgagcgctgatctgtgactgatcatggcagatcgatcaatcgtcggcatgaatgaatgaataaccgaagctcctccgatcggcacggcgcacgcagcagcgggtgatcgtattcgatcgtacgtacgtgcacggtgcacccacgtcggaataacttcgaacaatcaactgagcagttgccacatactcctacaatttttgttcatgcgcgtactctgcccatcaagcttcacgccattttgcacggacgccgcgcgtactacgg

SEQ ID NO: 23368 - DNA, 949 bp, Oryza sativa
tgctagttgatgattggaagcttctcgatggcagctttgattaggctaacaacagacctggtgatgctattgttcatatcttgttctggatcataaataccatcagagcaaatgttgccccaaataccgatcttgactttggtaagggcggagaggtgctggatgccgaaatcagaagcaccattcaggcaatccattccatgtaaacggaattccacttggaagttatcaagctttggcattgattctggttcaaactctagcaaggtcccacatctcttgattcgtaatgagaaatatgtcagacttctgaatcctttgttgctacatatgatgatccttccattgatgccacacatagttttaagtttgagaaaacacaagctgggtattgcgccaaggatctcaatatcattcggtcccattctatggatccagagttgtaattcagtgaggcttccaagcgagctcatccagtttgggaccttacggatgtaacagcctatgatatgaagcttccggatgatgcaaggactaggagggtaccacttctccatgatcagtgggccaccggtcaaatatagatgatgaaggttgctagatagcaaagctgacacgtaattttgacactcctcagcatctgaccaccaaaaaagatgaactttcaacgtcctaagctttgatagctgactgaatccttgcagagacttgcctagttcacatgacacgccaaattcctctagttctaccaggctatgcatcttaccaattaatctgtccggaaatctagtccctcttccaacatatagattggccaggcactcaagttttgcaatacttagcggcagttctagaatttcagtataagatatgtccagtgtttctagacagttcacttgtccaatctttcttgggagcttagttattaatgttgaccggagagataaat

SEQ ID NO: 23369 - DNA, 22572 bp, Oryza sativa
ctattcatattatttaaaaaattatataaaattacatttttacttgttttattattaaagaaattttaggtatgacttatactttagcatatatatttacactaaatttttaatttttaaataagataagtggttaaacgttattctaaaaatcaacgccgttatttatttagaaaatagaggttatacactccaacattattgattaatcatcataatctctgtatgtggagtgtgctcaactcgtcaattcccatcgtcgtcaagccatgagcccatgactgcatgcctagtgtgaacacataagatgaacgacgacccgatcagatcacttctctcccgcggggaccggggtcccagtccaacttgcacatgtacactacacgtaggcttgccattttgacttgttgaccggtcaaacatcaccatgcattttgacacaccatttcactctcaaggtttacgcgtacatgaaatacatgtaaagacaactataaaatgcaagagctctcgtgatcgagatcaagatcaaccacacaccaatccactctaacacctacgagctccgagctgcagccatggccatgaccttgccgtcaccgacatcgccgtcgttctacgtgtcgtcctccccgcgccaccagccgggcctgctcctccccctcccgtcgccgtcctcctccgaccggcgccgcccgatgcagctcgccgtcgcggcagcaatggacactactccgagacaaggcggagtgctcctggagatgaggcctagaggaggaggtgggggagctccccggaggccggcgccgccggccggtccgagagaagggcgcggcggagtggtggtcgtccatgcggtggcgagggacgctcctccggagacaggctctggcccaaagatccattgattcacaagaaatacaagatcgtcaagagcaagattaactgaacgttgttagggaacaaattagtttctgaacttaatatcttcgttttttaatatatgatgtcgatgatttgtacattatgtatgagcatttgttttaccttaattaagatgccatgcatttctgttacatttttgcgaacgattttggaagagttattcattatatgggtatgatgcacatgtctgaattaattaatgcaatcaagctatcatcaattatatatgatgcacattgtatttcttaattacaccttttgtacctctcacatactgtcacacatggtccatcgccaaacacatcacaaagatatataaattgatactaccatttgcgatcattcatgcatatgccaagttgaattaaaaggacgtatattattttaccatcattaattcagtattttaatctgatataacaaatcgcaacttgtttgatatagagcgtgcatcagtacagcagcaaaaggttgacgtgcaatttgccttagcatatcacaacattaatcctatatacctatacaaatcatccctactactagaattctctgcttcctggtgcttccacgtcaccccattttcttcccaccgttcgatctcaatcaagcggtcgcatcgctcctctcctctcccacatctcgctgcttcaccggccccacgcgcatcaacccctctctcccgcatcgctcctctcctctcctctcccctcgcacgctcgcatcgattccctctcccgcatctcgctctgccgcccccttcgtatcaatctcgccgtgatcctctccatctcccgcatcgtgctcgcccgtaccggcgctggcatgtcatccgcctcccgtgccacacagaggcaggatgagggtgtggcgcttcccctcccgtcgcccccatggcggctcgtgcgctgcttccccttcctctcccatgtctaaggttgtttgcctctttaggttgccatgattaatgaaaaccgtccacaaccaccgaggaaaacacttcacggctgttatcaagtaaatccattaatggcttaatgcgttttcttctcctcttatccctttatcagttctgcatctatatccaatttatcatctcgcttattcgtcgatctaccacactctaccaggctactggcgttttactaccgttcttgcaactctgcttgctggattcatatgcagccctcacctagttgatcctctccaattacttcaatgatctaacacaggttacctaccgatttcccctttccttatgttcaataaatctgatacccagcagagaattttattgttgttgtatcctctttttccaggttttaggttcttggctactgatttagttgattcatattctttatttatcctgaattatagaccacttctcattcttaagtggttgaagacgtggcaaatatgcatctattggttgatttgtcgtcacccgatcagatctaagaactcatcgagctaagtaacaatcatatgggctgctaagcggatggagctttcttcttttggtattttaattatggtctttaactggtgaagctatatatatctcggtacatctatgacgttgatgtgcttttcacttttgataaggtcctcatcaagaatgatgtcagattctccacacacagacacacaggtttgctcttaaatagattaggttgtcttccgtctcaaagttcattttattttctgatcatgtatactctagatatgttttttaagtatcttttgtcactcttgaattagcttggtgatataaatatttttggagttttctgaaagctaaaatcactccaaagagttaatcaaggatgagtacttaattatatatacgaggtaataatccttttcccaacttcccatatcttactcaagcatgaaaattttctaccattattatataatagtttgacaccttagttatgatttccttgctatcagtgataattggactatatttgtagatgtttaaaaatataaaatattgatgtttcagttatggttattatcagttttgtaattgtaaagtagtcatcactcatcacctaggtttgctacatgacttgactacattcctgatcagctatgcaactacaaatgcgctcctaatgttcatcgcatatttatacgataagatatgcataataattgctacttccagttaaataaacatttcttaccacaattatatatgatattctagcaccttatccatgaatcaattggcattcatttgcaagattaactacagaatttccaaaactgagatcaatgggtcaacgagggaagcggtactaggaaaaatgtcatgctgaataaaggctatcaagttaacgaggacagcagtatgacaccttacttacttttctactgttatttttcatacatgctatgttcataaacacatagtacataattttgggtaattttattgatggtgtatatttttcattttccagtaatgtttagtggccttcaattttgtttattaatacttgctctatccggtcaaaagccatatatttgagttgtaattctgttagttgcattggccaaccactgctacctggggagatactccatcatgtaatatttagttataattaccactgtatatactccatcaattatatggtaataagtagtttttttcttttttcttctcaaatgttatgcacatattgcatgtttaaaagttatttattatgtccgcagcaacgcgcggggtattatctagttaatcatcaacttgaccgatcgaccgagacagcagcaacatatatatcagatcaatccagggtcgagtcaattgcaagcaacgcgaagtcaaacgacaaatcgaaatgcatgtctcatatatatatcacaattaaataggagtaaattacgttcagggtaagaacttaggattttttttttaccatatgtatcagccggacacagcattccatatattttccacaaagttccaccgtacggtgaacgtaatttacttattaaatagtcataaacaattctagaaacatttaataacatatattataatgtcaaatatcgctccataagcatataaaaaactaaattttcaataatctatgtaatataagaaagggaaaattttggtaacaaatagaatctatccataacaagatttttttttgatagacttaatattttgcaagtagataagaaactatttatataagtattttcttttttaagggatttcttataacaatttgattgatacatttgaggagtaaaatcgaaacaaacgagcgctctcatgcgaatcccaagtcagagcatttctcattttactatattcttaattgaataattttagctcctgcagtcaaaaataataattttaattctaaagtaatacgccctccgtcctaaaatataagtatttttagtatagtgacaagtcaaacatttccaactttgactattaatagcaaaaaagtaaaaaagatcaatcatgtaaaattgatgttactagctagatttatcattaaacaaaatatcataatatgtaactctttttatttaaacatcttacttttatagatattgttggtcaaagtagcatatggtagaccatatcagagtctaaaaatacttatattttgggacggagggagtactaagatagcccagagaaatttgctccgtgcatatatagatgtccatatatcccattgaagtgggttatttttttcactcgagtgatgtacaattgtttcatgcatgccatccacaaaatcataaaataatttgagaaaaaataggtagctggatatataggtgaatatttgatatacacattcacaaacatgcccccagcaaaaataattcacaaacatgaaattttcaaatttaacttatacaagtggataaaatatttctagttgtataaaattgaatttgatcgtgcatatttgtgaatgacgacatatcacacatatattacctgatctatcttatgaaattgttttaattttttaagaccttttctaagtgacatatattaaacgagtgtacatctacttagggaaaactcttttaatcgcccgggtggatgtccacctgtttattacatagcatctaaatagttatgaaaaatttgataagatagatcaatatgaaatatatcactccacaaatatataagttcaaattcaacttcaacaaattgtaataaaaataacaaataaaactcaaattagtataggtatgttttcatttaaatttgttatttttgttacaactcgtagaagttaaatttgaacttacatatttatggagtgatatattacaaatattgaactatcttatcatttttttaaaaaaaatcataaccatttaacatgcaataagcaagtggatgtccgctgagtgattagaatccatcttcatctacttagtgacaaaaagaattttccagtgatacagtgggagctagacgtactactggtacattgaaacagatgtagaacatttgtacacacatacacaaatataattaaggtgtgtgcccattgtgtattactagtattactacttctctgatcatggagacagtcatatacttacacacgtactatgccatacacaattaacaacacatcacaattaattttaatccatgaccagatcaactcatcatgtatcggtcaagtccaacactgtgaatacacacgtacggaccaacaaaaatccattgaccacttcctctctctcttcgtcaacaccagtgcccagctactgttcggtcaaacgccacggttagcttagctcacctgaccatttcgccgccgcggcgtgtcgtggcgcgtggcgtggcgtcgccggctacaaatacggcagatcactcgacaacatttcatatcctcatccatccatccaggagcatccactgggcattagctcgaagctcgggactcgccgcgacgacgcgatcgatcggacatcggagtgagcgagttagtaggtgactaggtgttcgatcaccgtgcctggtggctgtggtcgatctaactagctagctagctcgatcgatcgccggaattaatggcagccatggcgtcgccgacctcgccgtcgtcgttcctcccggcgcacctcctgcggccccacgccgcgtcgctcgccggcgcaaacgtgttggtgagggacgctccgcctgagacaggcgggggcccgcaccacaacgccgtcctccgacagccgccggtgatgttggcggcggcggcgggcactccggagcaaggcagtggcccacactacaacgcggtcacgcagtggaagcccaggggaggagatcaactccgactgcccgcgtcgccgccggtgatcttggcggcggcgagcactccggagcaaggcaacggccccaagaccaacgccgtcctcaggcggccaacgccgcccggtggcgccggacctagagaaggcagcggcggacgcggcggagtgatccacgccgtcgccgactccgcgccgcagaggccaggcgcgccggcggagggcgccggcggcaatggtggagctgtccatgtcgcccctgctgctgctgcctcttcttgagtagaaagctaatgaaaaacgcacaaaattaaattaagatctgattaatttccaaaattaaagtaagattttctagaggtagctagattactgtatatgatattatgatgtagtggtagtacgtacatgtacatgtctgagttgaagttcagataaaaatgtctgaacttcagttggaaatgaagggaataaaatcaagcagattatataaaatcaagcagattaccaaatatcatgccttgcatatactcctattcaagttcctttctactttgattttgtaatatattatagttcagatctttgtgcatgaaaccctgtaattaaaacgagctctaaagcctacactagtgctatacataatactttttcgaaacaagttgcataagatagtgcgacgtttctattatatagttggaaaaaaaatacaagtccatggtcttggaagtctatagtcaggaaaaagaaaaagacaatcacatcatacgtatacgtatgatcctactgctagaaatagaacaaacagacaacacccataaggaatgggtcttctgaacgacgccaatgcacgagcaccgtccgcctccatccgtcctaaagaaccaggacttggttttcacctaaataacccattaggagtaataagctgttatacataatacatttgtaacaaactgtttgatatacatcatgagtaaattggcaccaggatatattggaccatacaaaattcaagctagacgtgaagaagttgcatatcagttggaattactagaagaatttgcaggtatacatctagtatttcatgtatcacaattaaggaagtgtctcagaaaaccaacaaatcaagttccactacaagaactagaactacaaccagacctaaaatatgaagaaatgcctgaacggattttagagacagatgaaagaagacccaggaatagaagtactacattttgttgagttcaatggaaaaatcacactgaagatgaagctacttgggaaaaacggttggaattgtagcgtgatttttcagaactattcttcctttgagctgaatctcggggaagtgattctctttatggggggtaggtctgcaacatactcaaaaatttcaaatttttgaagaaaatttatcgcgacgattttttcatttggctcttattgaattttactaaattggagcattttattttttttattcttttcaaatttatatcttaaaataaatacctttcgttttattttaaaaaatatatcaaacctcttgatactctgaaaatcttatttaaattttcttgccaaagttcaaaaattcctcaaacttctccctttagattccatctcctttgaatcctattcaaaaatcaaaaccctccacacaaaatccctaaaggttcctatttgttagggccgaatttcagtctatttggcccattccttctttcttcctctccactccactccctcctcctcaggccgccagcccacctagagtgtggcccagccgagccggcccaatcaagagcggcccagccgggcccgcgaggtcacctcctctctctcctatgggcgccgccgccgccgccaccgcgccaccacgggcgccgccacagcccagccaatcccgcgctccgccgccgccgccgcgccacccccgcgccgcaaccacgcctccaccgccgcaaaccgggtcaccccgtggcgcccccacagccaccgccgccggctccatttccgcggccgccgccgctgcccaccgttctcgccgccgccgcacgacgccgcgccacctcccgagccgcgtgtcgccgccgaccaccgaacctccatcgccggccaatccgacgaggacacccggcgccgccatccgtatcccgagccgacgccgcggcgtgccgtcgccggctacaaataccgcagctcaccggacaacatttcatatcctcatcaaccgcatccgcatccatccatctatccacctcgctcgaagctcgattgtcgcaactcgccgcgacgtgatcatcggacatcagactgagttagtctcgtaggtgttcgatcgatcgccgggatggcatcagccttggcgccgttcctgatccccgcacacctcctgcagccccacgccgcgtcggcgtcttccggcctgcagctcgccggcgcaaacgtgttgctgagggacgacgctccgcccgagggaggccgaggcccgcaccacaatgccgtcctcctcccacagccgccggtgatgttggcggcggcggcgggcactccggagcaaggcaacggccccaagatcaacgccgtcctcaggcggcccacgccgcccggtggcgccggacctagagaaggcagcggcggacgcggcggagtgatccacgccatcgccgactccgcgccgcagaggccaggcgcgccggcggagggcgccggcggcaatggtggagatgtccatgtcgctcctgctgctgctacctcttcttgagtgcaaaactaattaaagacgcgcaaaattaaattaagatgtgattaatttaccaaatccgaggcttgtttgacaggttacagtaaatacatagattcataattttgtaagattttctagaggtagctagattactgtatatgatattatgtagtagcacgtacatgtacatgtgtgagttgaagttcagataaaagtgtctgaatttcagttcgaaatgaagggaataaagtcaaacagattacaaaatgttatgccttgcatatactcctattcaagttcctttctactttcattttgtaatattaatattatcattttttttcaaaaaatatctatctattatattattaaaacagtcttgaaagaaagaaatatgttcgctgtggaggctagaaattcccacattaatcgaagaaaaagaaatgaacagttcaaatagagtacaatttagaaatatcaaaaattcgaaattaaaaataagtagtattagaagaagagtccttattgaaccaaatacgagattaattaaaattcagaattaaaaataaaataaattctgaaattagaaaagggaaaaaagagttcaagtagaaatagaagttagaaatatctaaaattcggaattaaaaataattaatatatgaagaagagtccttatagaactgaataagagaataattgaaatttagaataaaaataaaataaatttcgaaaatagaaaaataattataagagttcaagtagaaatacactttataaataaaaaaatatcagaataaaaaaatatggaatttttttttaaaaaaattaatcaatctagaactcaacgacaacaaataacagtaaaagaggacaagtaataggcatgtaaatcagtaaggtggtgaagggttgatgggacatctaaaaattataaacaaaaccagaaatagaaccccaaggatgattaagaggtggaatgacagacaggacattaagcagcatagtcatgacagttggcgggacttctataaagtaaaaaaataaatcgaaataacaatcatgttttatttttaaaatctcaatgataataaataggggagacaacgggcagaccatacaggagtatagtggtgtgaagccgctcttctagaaattaaaaaaatgaatccttaaaattcgaaataaagaataaaataaattttgaagatagaaaaataattctaagattttaagtaggaatacactttatagataagaaaatatcggaatgaaaaatatggaattttcaaaaaaaaaaattaaagtccatgtagacctcaacgatgacagataataataaagaggggagaaacattaggcccgtaaaggagtaagttggtggccgttgatgtgacatctaaaaactataaatgaaaccacaaatataatcccaatgatgattttcttttactgaaataatcccaatgatgattaagaggaggaacgatagacaagccgttaagcagcacggtcacaatggttggcgggacttctagaaagtaaaaagtaaatcgcaatgacaatcatgttcgatttttcaaatctcaatgataataaaaatacatgagtatagtatggcgaagccgacggcggttgggcagatttctacaaagtaaaaagatgaaccctaacgataattatgttcaatttttaaaatcctatcaacaattaatatgggagacaataagcggatcatagagaaatacaatattgacgtttgacaacactcctaaaaattataataacagaacgtgacgagacaatggactctaaaaagtagaaggtgtattttttaaggtttaatggaagataaataaaagccgtgatatagatcgggtaaacaaataaaggggtgataaaagagcaagagttaacgactggtgtgacttttaaataaaaactataaaaatttaaggatgataaggttcggtcttttaaggttataagacaacataatggctatttaataaattttaagtaatttcaaatatagaaaaatagataattttacatgtgtgctagcttttgcgcggatcacccagctagtttagaaatatttgaatgatatacaaacaccaagagacatctcttgagaatttaaggccgttctatatgtactccaaccgcaaacttcaatttactcgtttttcgttagcacgtttcctagactgctaaacgttttctgttgcaaaagaaaaaatatgtagaagttgttaaaaaatcaaaatttcaaatttacaataattaatatttaattaattatgtgctaatgagttttctcttttcgttttgtgtgccctgcaaatattcttggtgaaacaaacgaagccaaatccgttccgataaccccaaaactcgcactttcgttgcacattaactaaaacacaatttttaagtcacatgccgttgccgttgccgttgccgggccgcttctccggcgttttcctcagttcaccacatgccacctcctgcagctggtcctatacccttactgcaggtctgcagctgcagctccgccatcattcttcttcttcttcttcttccttctttttcttcttcttccagcagctcatgccggcatcagcagcgtccccatcaccaccaagaacagcagcatgctagtcttcgtgtccagctccggcggcacccatgggcagggcaaggaggcggcgagtgcgcaggagggcagagccggcgaagttgctggcagcggcgagagcgagacagaggcatgccgcgccgaccaaggcccgctcggcggctgcaagtagaggccgaggcggcgggataggaggaggagggagaccgcgacggcggcggcatctgttgagcggttaaggtggtggcatgactgtcacacacactccaagccgagacgtgcgggacggattcaacatcaaataactttgatttgatctaacctcttaaagacgttataactggaaccaaatttcttatagtcaaataacatacttagggcatatttagcagagcttgaactcataaatttaacaccatgagttgagtctggagtagagttatggagctgcctaaacctagatccacctcgttagtttattttgtgagagtgctccacccaactacactcccattctaggtggagctgaaattatttagctagactacagctctagtagagctgtagaggtagagttagagctgtgccaaactgactcttcgtacttacggtgacaccatgaaaacgagagtgaaaacactgacatgtatataatacatacggtgtgtccactgtccactccatggtgtattactgcttctctgatcgagacactgatgcacttcagcacttcgcaatcgatgactagatcaaacacgtacgatcaccacatgtaaatcggtcaagtccaacactgtgaatacacacgtacggacgaacaaaaatccattgaccacttcctctctctcttcgtcaacaccactcactagctactgtccggtcaaacaccacacacctgaccgtttcgccgccgcggccacgcccacacgcggcgtcgccggctacaaataccgcagctcaccggacaacatttcatcgtcgatcatcaaccgcatcagcatccatccatccatccatccgccgcgctcgaagctcgattatcgcaactcgccgcgacgtgatcatcggacatcagactgatcgccggaattaatggcatcagccttggcatcgccgacctcgccgtcgttcctcccggctcacctcctgcggccccacgccgcgtcgtcgtcttccggcctgcagctcgccggcgcaaaagtgttggtgagggacgctccgcccgagacaggcggaggcccgcaccacaatgccatcctcctccgacagccgccggtgatgctggcggcggcggcgggcattccggagcaaggcagtggcccacaccacaacgcggtcccgcagtggaagcccaggggaggaggagaactccgactgcccgcgtcgccgccggtgatcttggcggcggcgggcaccactccggagagaggcaacggctccaagaccaacgccgtcctcaggcggcccacgccgcccggtggcgccggacctagagaaggccgcggcggacgcggcggcgtgatccacgccgtcgccgactccgcgccgcagaggccaggctcgccggcggagggcgccggcggcaatggtggagctgtccatgccgctcctgctgctgctgctgctgccgcctcttcttgagcacaaaactaatgaaaaacgcacaaaattaaatcaaattaaattaagatgtgattacaaagattcgtaattttgtaagattttgtagctagattactgtatgtgatgtagtagtacgtgtacatgtacatgtgtgagttgaggttcagataaaaatgtctgaatttcaaattatgtgaataaaatcaagcagattatcaaaagttggtcttgcatattcaagttccatctttctactttcattttatatatatcagctcagatcctgtgcgtgaatccttgtaattgggaaagaatttttgtcactcgaatagacacacaattatttcatacgtgctatctaaaagtcattgaaaagtttttaaaaaattgataacatagctcaatacgtatactaaattgttaaccgtggtttaccccagagttagctgtttgctatacacgagtaaattaataatatattaaacccagtttggtcacatatacagttcgattattatgcttgaaaaattgtttcacacttttactagtaccaattcaacatgatttgctgttaataccacattctgttcatgatcaactgctctctagttgacctgaagtcaatgttcacacttgtcgtcttggtcttcatctcctaggtgttgcaacttgtatcactggcttctttgcagtaacgaccggttcagtttgatggatatataaaatctcggacattgtactattataatctgcatccacttcaattctcggattatctgtggtcccccaatttcattctttctgttacatgaacatagtaaaacgtagtcgcagtttcccgattttgagatgttgtatagcatggggtaggaaaaaaaggaaatgctacgggttaccgcacacacttggactatgttcttcgttcaaggatcacaatctcatctttctcctttttagcatgtacgcttcccaaaatgttaaacggtgtgtttttttacgaaagtttctatataaaagttgttggaaaaaatatattaattcattttttaattttaagttgatacttaattaatcatgttttaattcattgctccactttgaatgcaaagagtaggggttcccaactcctccaaaataacacagccttagctaccagtacatctttgttttttttaaaaaaaaatccatgagctctgcaacaatcgtgttctcactaaaacctggcacttagtaaataactaacaattgtgaagtaagtgtagctccattgcgtttccagtggtgaaacatatccatccgagttcacgttctagacttaacagttggcacgagtgctcgtatttatggttaattatttttaagtggtagatgacgttcctttcggagatgttcacaggagtgtgtgggcaatatacccctcgacaatgaagatctccacaacaaggtgatgcccagtctttagagatatgctcacgcgcatgtggtaactttgtaaatacgtggtctttggaagtgtttatatgaatgagtgtacgcacgtttatacgagcttctctatctcactgtactgtattccaaaaaaaaagtatagtaccaagtatatgagcatggtatgatgacttaattaaccttaaaccttacttttttttagataatagaataaatcacagcatttgcttcaaagaagctattgctaattattacaaaattcgctcaacaaatagcacaaaccatcctctcaaagaagagcacaaattatcctctcaacaaagagcaccaaagagcaataaaagatgcacaaacaaatgacctccaacataagacaaaaatccaatattattggaacctatttgtaaatctccatccattgacgaaaatctgcataatcattgactctagattacgacatgcaacatacatgagttcactgctatcatcaaatctctgtagttgtgtccaaatccagagcaagtgcgttaccctgaaaattacttgcatatatgatttagacggggatttatcaaacatcatattatttctactaaaccatagagcctaacatatagcagatgcttctacaatgataagttttttttagtttttcatcaattcccacaagccaattctcaataaatgagatatactatgtggatgatatagaccaaaagaaatatatattgatctccaaagtaatctagcaaaaatgacattcaaaaaaaataaatgatgaatcgtctcatttttcataaaaaaaacatcttatgctaccattttaattccttctcatcaaattagttagaactactcctttaaaaaaagcacataaaaatcttaattttaagaggtattttaagttttcagatagtctttttcttgttgatatggttattatatactctacataaataaaacgaattgaccattttgatagaaattccatttgaatatatcattttctttgatcaaatcttactaggttttgtggaatatatagtattactgttatatatcctttcgtcttaaaaaaacttaattccaacaataatcctgaacacatgcgtgtatatattcattgcgagaattgttttttttttatggagtagtattacctaacgaccaggcaaaaaaaatgctacattggcctactaacacgaatgacctggacttgggtcgttgggaaaaaaacaaatattgctttatcaaaaataaaataaacacgctttaaataattaactaattactcataattaattaattgcgaaaacatatagtattatatgacgacgactggagtggactgactattgatctgtttacataagagtagcagagcgagatagagtgatcagtgcagcagcagcagctagctctcttctcctccagcgactagctagcttagcttagctaggagcctaggatatggcagccatggcctccttcatggcactggccggcgcgtgccgccgccggccgcagctcctccggccatcggcggctcgccgcctcagcttcgtcttcctcagtcgtccatttcctcctgctcctgcacccttgttgcagctgatccagcggcagcgccatcgttcttcttcttcttccagcatctcggagaacggtgcggcagcgccggtgaccgagaatctgcaggcggcggcggcgaggcggcggaggcaatcggccggcggccgcccggcagctccgaggggaggccgcggcggcggcggcgtgagaccgacgccgcccggtaacccgagagaagcgcagaagggcggcggggtgatccacgcggtggcgccgccaccggcagcgccgacgagcagcaagcctaagcctgagccgccgggctacccgagggaaggcggcggcggcaatggcggagtcgtcgacgatgtttctccttcttctaccgatacctcgacgtcttcttcttcttcctcctcctcttgaggatcgagagattgaaaaaagagtgaagaagaagctatgaattgctactgcaacatctccattgatcgattggattgcttagctttgctgctgctcgtttaatttcctctgtttatgtttagcactggattaattagttgcaagtagttcaagttcaggatatatataatttgggttgctgcatatttgcaaattgtaagttaatttgtaacatgtagtgtttgtataattgtattgtatggtgtatatatatatatttgtactctactcgatcgattagaagaagatttaatttagtgatatcgttctaatgagcaggccataactgcaattaatgttcagcttgattcatctacgacctgaactggataatcttatcgttacttttgaacaggcaggcgtagctagtcagtacactcattgttagttggtgcagttgagcaaatgacaagagagatagatacatatacatagtactagtagttagtaatgtgcattaggtactcagtactaagtctggatgattcttgagcaaacagatgagacaaacaggtagggcaagatgtgaggtacatgaagctaattaacaagtaccctctccggcccacggtcaagattcgtattgctaagttgctgtttaatctaattttagtttgctatggccgtgtttagttattttggtaaaaaaaatttgacatatacggacacacatttgaagtattaaatgtagactaataacaaaataaattacatattccgcctgtaaattgcgagacaaatctattaagcctaattaatctatcattagcaaatgtttactgtagcaccacattgtcaaaccatgtcgtaattaggctcaaaagattcgtctcacaatttacatgcaaattgtgtaattggttttttttctacatttaatgcttcatacatgtgtccaaatatttgatgtgacgaaaaagttaaaaattcgaagggactatatttcaaaatgatacgagtaattaactataagcacatatatcatatcccactggtccgttccagcagacaagagcagtactgaagccttgccaggtcatgcatgtactactcatcaagccaaactatgatatactcatgatataagagattttaagttttttttatattgtttgaccactcgtctttttcaaaaaagcttaaagtactttggataataaaataagtcaaaaaaataaataataattctaaatttttttttgaataaaacgagtggtcaaacagtgtatgaaaaaactcaaattcgcttatattatgagacggagggagtatattcgtgtaaataatctggcaatgcaatgctaactacgagttggtggcaatcgaaatcgagttggtagcttaggtttcaatgcaggagagagcagtagtaaatcgaggtaggtgagagtgatcggcaacaggagcaggttttagtaattaaattcgtccaagctctttataggctgctagtgtttgtctgcatcgttttggctttcatctgcatgcatgctcagctcagctccatttcgattcatttaatttcttgagtttggagagcaggtggagagttttcaagacgagataggcagcagagacctcggacgactgtttgattttgatttttttagccaattattatcgttaattgtctatttgattattatatgaaataaatttagatgttttttttcgaaaattcatttcttttaccgaattttaaaaatagacttaacagaacaatttaaaacaagtcgtctaaaagcttttctttacaagaaaacatggttttcaaaacgtgatgtaaatgatccatttctaataatccaacgaataagctgaaaagatcggcaatgcatatatggctcaaatgacggcagtttgcgtacgtttgtatgcgcccttggacactaaggttgattaattaattgcatgccagcaacacttattatcaagaactttttcgcgttgatcatgtaattgctcagtttgaccaatcgttaatgggatcttcaatatgacagtaacagtttgtgcatgtgagtatcaagttgatgagggcaattagcagaatcaatacgtgctttcaacgtaattttagtagtggctagattgtttgtctcttacaatatatgtgaatagacgcatttgtaacaacatggatatggtgttacgtgtatagtagtgacggagacagtgccctatcaccacgaacgggtgcccgcgctccatgcatgccacaacacactactcccaaggtatatgcagcgttatgtaccttgcatacttgcctcataggttctaattaatggagattaattagatgataaatcagaaaacgagaaagcaagggccaaaccatcaagctgtagccataaaaaacatcaaaggccaaataggttcaaaacaatataacttactagcacctagcacctatgctcaatataatactagccttaaaatctaatttatctgcaataacattaatcttatccaggcatcagaaaatttctagatccgtaacgggtgtgcagtggtgtttgcgcgagtacgtgtgccgtgtaatcttagaagataaaaaagaatcaacgtgcaaggcaggggcattattggcaaatccaccttcaaattgtcctggactaaagcagtagagcagcagagagctcacctccctctcattatcaaagagagatatggaggaggaagacgacgagaaggttgtgaagaagagcagcgctagcggcggcctgcacggcgaagagcaggtcgatggcggacatgtcgtcacggcggagacggagatggcggcggcggctgcaccgtcgcggcagccgcagagcattctcatccgtgccttcgccggctgcctgctcgcgctgtgtggcggcggcggcggcgatccctccgatccgccgccgctgcgtccacggccacacggcgccaccgcggccgtcactgatactacttctgccgccgccgccgccgccgccgctcatcatcttcaacacgaggcagacggaggcagcaaacatgttgtaaccgtaagtgcatcattcatataaagcactggaagtaactatatttttttaatataaacttaatgggtacagggtttcaatttggaaattagattttatgccggggatgaccgaaatttcagaaatttctggtcgaaattatttgaaaatttaactgaatttgaataaaatttgatcaaattcacaaaaaattcaaaaaatcaaaaatttcggacaagatttgagcatgccggtggaggcgaaattaccaaaatttcaaaccatacattggtatcaaaattttaccgtgtatctcgagatatttttccaacaatgataaatcttctctttttttcttttatactaagcctaacttaattagtttgagtttttatgacagttgttgatcgataggttatgtataagtatttatagaaataaatatataatttaaaaatagtttacaaccatttgtgttagtcatatattggtactgccaaaatctagaaagttttgtcactaccaacatatatatatcaacatatgtttgttattcacaacttttggtggcaaatctaactttgccaaacacagattaaaatgctaacaacttgatagggcaaaatttagcttcgaacaaaaacaatctagagtttttggagatatcatactttgataacgatagttcgtttaatcagtaaggttgtatttagtttcacaccaaaattggaagtttgaagaaattggaataatgtgacggaaaagttggaagtttgtgtgtaggaaagttcgatgtgacggaaaagttgaaagtttgaagaaaacatgttggaatctaaacagggcctaagtctggtaatttgaaacaaggtcatctttagtttgtgggaggtgtgagcatatatatacacatccccatcaaagtttgggttctcgttgaaatcattttcagtgctatcttttctacattatttgtaccgagttctattttagtatcttttaattgcccctcaaaagtactaatatactaatacattttttcttttttaaatttgtaataagtatttaagatgtcgatgtgtatctcttattattgttactccctccacttcataatataaggatgtattttaagtgaatgtatcaggatgtgtcatattaatccaccaaaattttcttatattataggacagagggactactccgtaattttctatcacattttcaactgagctagagagatgtatccgtatcgtcgtctgccgtatggcagctgccatctgctattactgagtcgaccacataaatatatttataggttagttaaatagtttgatccatcagtagcactaacggaaactgccgtacggcagaggatacgagcgcatagagatggtattgaagatttcggttaattaaatatttcatatggtgtccttagttgcgatactgtatatatttgggcccaagtttaacgtggttttatttcaggatcgtatttttacattttaatcagcatgtacaaagcaataattttgacacatatgcaggaggatttattaggcactaatcggccaatgctgctggctagaacaagacctccaagaggacccggtcctccaagagaagggagaggaggaggtggtggatcacacaactaattaccctaattaagttcacagcttagattaatctttctgctctgaagtttgtcaagcacttttagccaggaaattagctaggaatgtacaagttttgtacttagagaaggcatattttcggatgtaaaaacagatcgatatacacaactatatgtgcaagtacagagttgattgttttttacatgtcaaacagtagcaaatctggtacataattaacagtaccatactctttccattatataaatataattaagtaacctcttagttgttgatcaggtcaatatcaagtgttcagacaactgaccagcaaaagcaagagaaattcaggatgtgtgtgagagatgctgcagttcacatctggttcagtggcctttccatggcttagctgaacctaaccctgcaaattggtatactactagtttagtttgagttaattagtgaacgagttcagtgtgcaggtttagtttattcagtatctacaaatgcatgaaaaaggctgggaatattgtttctgcttaagttgactgccagggagcagataaggcctggcactgcctcttctgttctggcttgtgatgagttgatggacagtgaagcaagaactatattgtgctgagcacacataatatgctcactagcccttgattgtaaaagttatttcctaaatagaagattaagtagtatctaaaagaagaagattatactctacatctctttagcttgccactaatcaggcatgtatgcatgtgctggaaatattcctcttataaacttttggagccacaaacattgaccttgccctaacagtactaggaatgatgcatggttaattcctgtacagatttatgtgtagtatatatttttctaattgatttctgtgtagtatattcagatggataagaataattataacacagttgaaagggagatgatcacaaaaagaagcacaatagtacacacaaaagacagaaaaagaaagatacttcaggggttaatagttaccaaagactgcagtcagtcaacagactgcattcaacaaatgatgattctattctcctccagtcagtcaacagactgcattattgtagcaagtttcagtgaacttctggaagaacagatgttgactaaacaaatggagataaa

SEQ ID NO: 23370 - DNA, 57750 bp, Oryza sativa
agcatcaataaatagagctgaaatgcaacccccattgctcacaaaccccaagaatttcaccaaaagggagtgcttactctgagctaaagaaagagtactctgaagtctgaagtagtcttacttcttccaagcaatctgaagtctgaaccttagaatggatcagaaggattagctgcagatgaaggagaatacattccaggaaggaacagccatggcgtcgtcctcctcatcatcgtcctttctcgctcatccatcgtcgctgctgcgtcaggtcgtccatggcttcgccggctacctcgccggcctctgccgttctctccagaatctgaaaccatctgcagctccgaaacaagacgctgacgacgaatttgccgtcaataacactgctgcgtcaagctccgtaagtaaaacatacaactgtaccaattaatttcaataaatttcatgtaattggttcgttcaaagaacaataaatttcatgtaattgcatgatctagccatctaggtgctcaattgagcgagcccagtgattgatcagcaagtttggttgctttttttttggtcttctgagctgatgattaattttggtgtgtccttgtgagagcaggaagaagttgagaatgttcagatgagaacaagagcaatgccgcgttctgaaaggccggttttaagagaagggaacgggggaaaaggcggagcacaccacaacgctggcctttagcttcaatcgatgcaaagctttgatcgatcgatcgacgcgatcattatgtacaataataagttcgggtaatccatgcatggattactgttcttcgaaccgagcagtggctttgatgatttgttaccctgactgtacgaggaaaatatcaagtggaaataaaatttgcactcacagatttaaccatgagtaaaaacttagtaaaagttttactgtggataaatctcaaacatattccttatcctatacttgttttcgggttttcacagtatatgggaagtggatttttgtctctcgaggagacatcccctcgttttgtgcataacgttcaaaaagttataaaaaaatttgaaaaattttgttaagatagatcaatatatgacatatttttgcaaacaaagttaaaatccgacttatacaattcgaaacaaaaataacaaatttgacagtgaattacgcattctattcctagtcaaatttgttatttttgtttctacttgtataagttgaactagcatggtggcccgcgcagattgcgcggctagcatcattacattttttttctcatataatagtatatatgttttctcattatattattcaaacatattaaaatgacaacataattttaaattttgcaataactttacaaaactactaaagtgtaatattcatattatattttatatacgtgttagttatttattatttttaatatcaaattttagttatttgtaaattatatatattcctatatgtactctagactcgtcttttaatatttctattttttaattccgaattttctgtaaattgtatttctatatagactcaatgtttttccttcaatattatttatttttatttctgaattttcatattatattttatatatgtgttagttattaattatttttaatatcaaattttagttatttgtaaattatatatattcctaatggactctagactcatcttttaatatattttttaattccaaattttctgtaaattgtatttctatatagactctatgctcttcttctaatattatttatttttatttctgaattttttattatttctaattgtatttctatgtggactctaaactcatcttttaatattctttaatttttaatttcaaatttcagttacttctaaattgtattcctatatttgtattcctatattgatcttaaactcttcttcccatgtttttcttaatttcgtattttagttatttgtaaattatatttttatacggactctaaactctacttttaattttattatgtttattccaaattttagtcagttttaaattcctatatgaactctatactctacttcaaatattccttatcttttaattctgaatttctgtttttttcttaattgtatttctatatggactctatactctacttctaatattccttatttttaattccaaatttatattatttcctaattgtatttctatatggactctatactctacttctaatattccttatttttaattctgaatttcagttatttcctaattgtatttatatatggactctagtctcctcttctaatattccttatttttttattccgaatttcagttatttcctaattgtatttctgtatggactctatactctacttctaatattccttatttttaattctgaattttagttatttcctaattgtatttctatatggactctagtctcctcttctaatattccttatttttttattccgaatttcagttatttcctaattgtatttctatatggactctggtcttctcttctaatattccttatcttttaataccgaatttcagctatttctaaattgtatttctatatggactctgccttttctttttctctgattattgtgagaatttctaggccatgagagcgaacgtggagactctttttttatttctttaataatataatagatttgaatatatatgtttgttaagtgacatatcacatggctattcctgctcttatagacttatccttctctttaatttctctcagctctctcttatgccgatcttatcctctccttcttccttacgctgcagagatcttaacctctcctttttgtgctctgcagcgaggagcgagcaagggcggcggcggccagtgcgcgccggagacgggagggcaggcggccgggctggggaggtggctgaccctgaaccatgatgatctgaaatggacgaaattcaaaattttggatggattttgaccaaattgagatgaaatgggagttccactgtcttgttgaatttcagacgtttcgatctgaataaccccgaacatcttgccaattgttcatctgaatcgcttaaggtaggcatagtgattgcaatttggacaccacaatccacaatccccaccccccccccccaacccccctcccgggcaagtaattatatcgcccaacattttcgaatttctctcagaatttatgaatttggttaaaatttaaactaatttcgtgtcaaaaagtaccaaaaaccccccaaattttttaaaaaaatttcggtgtcagcgatcaaatttcgtccaaatacgacaaacttgggagttaaacaagagagtaggttgttgggttttgatccaatactctaaaaatatgaaataggactacatgaaaacaaatcagaaaattcataaacgccaaactgtatatgcattggtgtgcgccacatgtgcgtgttaatcaatctctcaaaaattaagctaatcatcattgattatccccagtgatgactgatgacagcttatataattatcctgatatttctgatgatcaccaggttaattaaattaatcaatcaatcagattttgctaataataaaacatggaacccgatgacgccggtgggacgctctgctgatactggaagctctgcaggatggtcgcgatcgtcagcgactcgtcgtcgccggcctccacttcctcctccgccgccgccggcgacaggtaatcatcatcgtacagcggcgacggcggcggcggcggtggcggcggtggcactgccggagacagcgcgtgctgcggcggcgaagggtggtggtggtgcatgtcggggtagaggaagttggtgcgcgcggcggcggcgccggagatggagatggcggagaggtcgtaggcgacggcggcctcctcggcggtgtcgaaggtgccgagccagtggcgctccttggtgtacgggttgcggatctccgccgcgtaccgcccccacggccgccgccgcacgcccaggtactcgctcgacgcgcgcgcccgccgccgccgcatcatcatctgctgcggcgtcgtcgtcgccgccgcagtctcttcctgccggtgatgctgctccgccgcgtccgccattgctgacgtacttagcttagcttagctctgcctgtctgtactgtggatgtaggtggtagggcttaattaggtttttagcagccatggaattttataggaaagcatggaggtgatcgacaaagcttggtggagacgttgcgggctctgcatgcatggcatcggaaagcgtgccttgctccatgttttcctcgacatgataagcccatcatcgatcactttcatgagttggcaatttgtaagttgatcctacatttctacttactccctccgttccatatcgtaattcataagttgttcttaccttttttttttctagtcaaatattttaaagtttaactaaatttattagaagctatactaatatttttaatataaaacaaacatattatcgaaatatatcaatgttatgtttcatgaggctaactcagtgtttgtagatatagctaaattttcattcaaacttaatcagatctaaagaaatttaacaatattttttatagttaatgagatcgacatacaacctttatatatacgtttttacataagattaaatatgaaaatagaaatagcaacctaagtgtcatgccattaccatcatcattttatttttcttataaaaaacttggatatgtcattttcatatgactaataaagcttactttcctaaacaataatcgtagtcaaaattaacttatgttaatagtatacatattctaaaattaatgacattcttacacgaccagaagaaaactccctaacccaatcaattcataacatgttgtttgtgtcatctttgaccgcaaattatgcatgtactccctccgtttcaggttataagtctttttgattatggtcaaagtcaaaccgctttaaatttcaccaagtttatataatatatagtaacattttcgaccaagataaatttattataaaaatatatttaattattgatttaataaaactaatttgataatgtaaatattattatatttgtatataaacttagtcaaacttaaagtagtttaactttaaccaaagtcaaaacgaattataacctaaaacagggagggagtatttgagaggtatcatcaacaaaactagaaacaaggttgcacaaaagtatggcgggtgcgtagtgaggtgctcgtgtatgtctcttccgtgtaatcgtaaaaagtatatatacattatggacaggtcacaacatggtcctggcacctgatgttgcacaaactgttgacacacttaactgacatgtctataaaaatgtagcagggcgaatgttctctgcaactttgcgtcttaatccagtccagtctcgagagtacaaagcactagtactgaagagtacacaaagctcattcagagacaactcatcagaaacctctccaagggtcttctgaaaacagattaatatatataccccccaagttggaggcagaaacatctgtcagccagctgatcttttatcagcaggcaagggtgacacattgaatgtcaagaaaatgttaattaatccatacactgcgtgcaccccactagtatagacaggcaccatcagcttcagcacctttacagagtcagtgccccttgtttcctgacctctgtttacatacctaatacccaaatgatatatagtgcagattcatattcaaacaaaatactaagaacaaaagaaacaatatatatgtatggccaacagctgtgttcaatttttacaatgtcatccagggttaacatgtacaaatggagataaattcactaataatgttattacatttgacaaggcaataagtcaaaattgcctcagatatctttttttttcataaaaaaactgcttactctggagacttcaataaaaaaacactacacataaatttgagtatgtatcaaaccaaacaatacgtggatttccatatcaggtattttactattttactatcatataatggatggatgaagaagatgaaccgctgcatctaataattcgcatgaaagagaaatacaactaagtaaccttgttcagctagatgcattgcaaccaaaattcctcatatgccagagaatcagagatgaaatccaattttttagctgaaccccaaaatttaaagagaaaaagctccccccaaaattaatggcggctcacttaccagcttactacagacaatgacggcgaagacgacggtgcgaactggagaaacgaagtcgagcgggccgcttaattgggtgggctactttcaatttgtgggaaaattcagttcccgaggtccacgaaagcccccgagcacagaacagaacggcccaatagaaataacagcccaaataagacaaccacatccaagagaaccagcagggtttacgtttccgatgaaagccgaccagttgtcccgaaaacctgacttcctgacacggtttggaattaggtgctgacggaagattatgatgtattttgacccaattcaaatttgaaataaaaaaatcatttaaataccatgatatttaaagaacttaatggcataaatcccgtaaaaataagtaatggaataaaatattttcaaaaaagcaagtagcttcaactagttagggttatggtggtagtacctgtccacccaggtgctcgtatttacggctaaaattattttttcaattgtcggtgatgtgcccgttgacaatgaggcgcaatacactgttgaggatatgttatgcgcgtgtatacgggagcatgcgcctttactctatgttggtccaactgtgcgcagcaacgagctccgctttggcctctccgtgtgagcccgagaacaaaccaggggcaagctcgagctccactttggtctctctgcgctttggatgtcaccctcaattgttgttggtcaagctcacccttggccgcgggccctcgagctcgtcctcggcggtcacccttgggctcgggctctcatcccagtgtcatcctatagtagtccaaagaaagaagagaaaagaaaagggagaaaataaaatttctaagtaggccctaattgttagtcggtgtaggattgatgatggtgtcacgtcagcgtttgtgtgatggaatttaggccgtcgatgatacatttaacaaatttaagggtttaaaggtgcaactttaagtttttgacatagatgacgcccacttacaagtttaagtatcatcagtacattttactgaaaagaacaacctcaataagaggcagaagcctttctcaaaaagtttataaaatctttatgatgatattatcctaggcaaatctacacataccatactttagtttttaaaccaagcaaattgacaagttcaaagtatataagttattcttaagtaacaattattaattccggagggagtatagctgaagtgtgaattcacccatttataaacaagtgaattacctcgcactcgaaccatcgctagttcactagctcactgtcagtcaacccattgaccctcggccttctaaatccccgcccacccaacaccacacctcacatgtgtggcacacctgctttcttcagcatgcacacctcctccactgacactagagagcgccacaactgttgatgctatgccaaaaatggttgtaatggcaactctccctcctcttgccccctccacctctacttccctaccattctcttccctgccttttcttccccaactatatatggagaaatctccctgcaccacctttctcccttacatttggtggctcccatcaccacatcatccaccacctaattatgtgtttggttggaggaatttggtgggttgggataggtccatcccatttttgtaggtgtttggttgtagaatcaagtgggttgggttggatccaaagagaatattcttgtgatatccgggatgggctgatccgccaaaatctggtggaccgcgcggacccagctagctcccacgggtcatgtgcagcgcatgcgtgtagttatgggcggggaccctatgtctctcgtacgcgcacaacccctatcccctttttttttctcttcccttcttcgatccagatctgcgcgatgcgagataagaggcggcggcgaccgcgcgtgtgccaagcgacggtgagcttgggcatgtgctctcagccgcgacctcctcctcatccgtcctccctcgccggttacccaacctcaccggcttgatgcagtggcaggaaggaccggcgactgtggcagcaggaaggacacagctcgtcccctcaaggtagcaacggccgcgacctcctccttcctcccttgtccctttccccatcaaccctcatcgtttcccctcattgcaggattgcgtctaggaatctgtggtggaaggatgcggctgcagcggcttctggcaacatcacctccttgccctccactctcgtcgtcgcatactacatagctagagtaaggaaaccctatcacagaatgaatttttgttttcatggtcagatctgttcaagtattaatttgtgatgttggcaaatcagttcaagcaaccctagcactgtcctttgttgcaaagaaaatcagttcaaatattaatgtgtgatattagcaagtatttttttatgagatgatttgtgcttcagcatgatatgtcaacatgtttatttttctttgattgctgtattgtagatggataagacgaccaagttttaatttttgttgctgcttcaaatatattattgtcgatgatgaccatgattattcagtgtaggaaaagaaagagaggtgcaaggaagggaactcctccctctagcttcccctcccccacccctaccctcattacgaatgctaactttgtagagtttgatggagctcatcagagctcaccgaagctagagaaggttgtactacattaatcgtatgtagagcaaatgcatgtgaagatcaaagaatttgtaagattttgatttgatttttttgttgaataccatttagcacatccgtacatttacgttccaaattaattctcaaagtatataaattacccaaaattagttcactataaataaattagcaccgtgtatcaacaatctccgcgtacaggcatgaaaaaagaatttttcttatttttacagtgtattcttgtgtaaaagaggtggaggagatcgagattcctaatgtgctatatatagtaataaatgtatacacaaggagagtttatgtacactacggttctaataatgcaaaatgagttaaattagtgtgattcaaaccaattttgttggtaatgttaaatacatttatatgctatcacaacgtcaactatattgtattttgcaaaagtgttaatcacattttttgccaataagtgttaataacattttttgccaatatacgatattaattacattttcttgcagctattatgttattttcactagatagcttaaaattgaaaggcacataacactttgcaatctcttttacatcctcacatgctagcagccactaattatctatccatttttacattctcacattcaagcaggcacttgtccatccatttttacattctacatgcaactatgcaagcagccacttatctatctatttttacattctcacattcaagcagtcacttgtccatctatttttacattctatatgcgactatgcaagcagccacttgtccatccattttgacaagcataagcggcaagagaatggcaaagtgcacactgaatgcttgttataaagcaacgtcactggatttttgacaaagagatgaagcatttttgaccgacggatgaaacactatgctcttgtgtgtcccatgcattatgttgccttccgtattatggtctcaacatttttgcaatgaaacagtaccatatcacactagattatcatttttgcaccatattgcaccacggccaacctactgtgataaaatcacactgttaattacattttatttttggaaatatgttagttacatatttcggagatattgtgtgagttacattttttttttgccaacgcagtgttaattccatttcttttgcatatatagcgttgattaatgcatgatcatcaagattgaaacataggggctgtttggatgcttgtttcaatttaccaaactactatatagctaaagtgtggcatgccacaatttatgtggctaagaaattcttggccacaagttaggcaaatgttggcaaaggtatgtgcctatgataagtggggtcacaaaataaaaaattgtggcatgataaagatatggcaaccaagcaaacactaggctaagttggtcaaagtagcttgccaaagttgtggcaaagtatggtcaccatccaaacaaccccgtagtgcataactcattgcaatatatctacttcatcatataccatcgatcggccaaatatccttcctccggctggatgagcacacaaggcatgagaaggttagagtgctaatcaaatgccagttgttaaggttacatgactaattggtctctaaaactagaggattttaatggaaaaactatgaaaggaatacaaaagttaatactacctccatattttaatgtatgacaccgttgattttttgtccaacgtttaaccattcgtcatcatttattttattatgacttgattcgtcatccaatgttctttaagtatgatataaatattatcatatttgcacaaaaaaattgaataaaatgattggtcagaccttggtcgaaaagacaacggcgtcatacattaaaatacgaagggagtatgaaatgttggtaacaccgacgataactggtggtagcgggagaagcactcaatgtatgtcatatgccagttacttagactaccaattttgtacatacacattatagctcacttccgttttctttttctttttcgctccacgagaaaggatcaaaaccggtattgcaagatatttgaaatctagttatgtagttatttatgttgtccaactcttagacaactatgaatatgatattaaaacactagttattatatataacaccagttacacatagtatgtagggacctgggacccatgaccccacgtcgtccctagcaggcagctcgggggaaaaacgccaccccactcctccaccactccctccgtcttgccactgcaagagcaatccgccagtcatcgtgcggtgagccgagatggcggaggtgaggctagaccccggcggtgagccaacgcaaggaaatcaaggcgatgttggtgcgacagcatcaacgaaacaacaccacgacgacgatgatgggaaattcggtgtcctatggagaaaggcggagcaactgggcccctccctactcctaggatggcggtggtgggctactcctcgacgtgccagtagtgggccttccccaacctccactcttctggatggtgatggaggtagagctagggttgatggcatcgtcgaggaaatccatgttagtctctagttataccctgctttgacacctaaagaggacctttgagaagtcagagctaccgtatcgagctagcgttcaacgagctgttggcaacaatgactagaagggttctgcttagtttcaagcagggtttggttgttgtcttctaagtcagagctgcagcacttttgcgagctcgccaacgatgaccgaagtctacaaggctcatcagtctaactcttgtgtggggtttcaagcttttcgtttgcaaggctcatcagtctgactcgaccatgcatcaatgagtttgttggtcgcgaagtcgaagttgcggcattgaccggacacaatgtgtggcaacgttgacatgagcccatttgagttatgctttggcacatgctaggttgttgcccttatactagtgttttctggcgaagtcacagttgtccaatcacgaggatgatcatggtatgatggcaataatattgtatctttgccagtgtgcgggagtcttgtttccttctagcttgctacttgttcatgtggtaaatgacatttgttgagtgtcgcagttggctttcctgttcttgctgccttggtagtttaggttagttggtaaagtgtcgttatagttgtaatttttgtcatgttttttcttaattaactgtgcaccttattggttctattttctctttaaaatagacatctttctctttatataaaacaccaacaatggcttgaccgtttggagaaaaatacacagtacgtagctctgtctagctactggcactctggcctactcgaaggccatgcaatttccaggattagctctgaataccatttattggccggcttcacacctactccatccgtccgtgaatataagggattttaactttttttacttaaccattcatcttattaaaaaaaattaaaattattatttattttatttgtggcttactttattatccaaagtactttaaacacaatttttcgttttttatatttgcacaaattttttttgaataaaatgagtggtcaaacgttacacgggaatagtaaatatcccttatattcacggaggagggagtacatattaatggatcaattccgctttcttcaacctagctcggcctaacgcaatgtaatccttttacttgattacatgcaaggtacatgtctttcctccggccgaatgagcatatatgcatgagaagagtagagcggagcgttgcctggttatatcagttgtcaaggccacatcactgtataggttctaaaattgctggattttaatgaaatgagtgtcgaaattaattttgttgtgtcaaattgcatgcctccggccacaaccagcagtgggccatggccactccattgcatcttcatgtagtaatttttaaaattggagggattcaatagaatggtgttgaatagttttatataaaaaaaaatatgatggtatttgtataatgcaacgtctttaattatttttacgccaataaattgaatgtttgtaaccattagcatgcatgtttctgttcggacgcgctagttgctacagctgctgcggctatgataattgtaattgagctctatgctactaccggtttaaactgtcgcagctgtagcaattaggtaaagcagaacacgttcaatgattgtagaatcaaacgacctaaatttgtactccctccagttcattttaattgacgttttggacaataacacgatctacaaaatatatctttgatcttatttttctattataatatacacaataaataaatgcatgttaacttttattatagtgttttgaaagacaaatctatatatgttgttctagtttctttaaactaaatacttttgaagttattaatggtcatagttataaaagtttaacctcaaacttgttcaaaacgtcaattattatagaaccggaaggagtatgccagtaattaaaatgcacttcttcttttttgggaaattaaaatgcacttctgtaaatctgtaactagaaatgttataacttataaacaacaaacaagagggataacacagcccagcacgtatgtccaacttgaaaggagcctgagaaaggagcctgagatataatcaaatcacaattggataccttttgtgacgggtgctacacatagctatcctttggattcgtcctaccgtaaccgatcttcatcgatcacctcgaacaatccgtttgatatgaccgacgatgacacacactagctagctagctaccaaacgaacgtttcgctaggcaacaatggcgctgccgtcaccggtgacgaccaccgtgccgcgaagcatgcacggcgcgccggccgatcatcacgcccgtggttttgttccttgcaaagttgcaaacgttgtcattgctgcagaaaaagccaaacctcaccaaatcttaaaaagagttctatgtagaatttgtgcgtaaaatacactttttagcagttcggtacacattttcaggtgaaacaagaaagtagacgaggacctaagttgacacgtctttatagtaaactatactcccgctgcctaaaaaatatatgattatattgacttttatataacgtttgaccattcatttcattaaaacaaattatacaaatatcatttattttgatctaacttattttatcatcaaagaaactataaccttaatttatgctggtacatatttatactaaaattttaaattaattccatagaaaaattataagttacaacaacttttaatagatcaaatagtgctaaaactactactataaatgcaaaaataactgaaattagctagaattttaaaaagcttattttactgatagatgaaaatccgatccatcaattctgaaccgatacccgtttcatatttttatggtctcaatattatgtgagtggtctaggagcatggttaggctgaattagaaaggaatagtgcccaaggcactgttcattgtcttccctagccgaagccggaaaataaaagaggagggaagaagggcactgtgctccagtgatcaaacggcgatgaggaaggtggtaggatatgtcccatgatgtgactcgttcatagatggtggaggttggcaataaagaaaccagaacagcaagaacgcagatagcaatgacgtggtctagatagagagagaaatgacaacaacgagctctggtaataaacacgaccagatgagtgtatcaaaacgcattcccaaataagggggttccgttttccttgaatgtgtaggaagaacaaagatggagaaaaaacgactaacactattcattgtcttccctagcataaacaagaaacaaaagaggaggaaagatgggcgctggtgctccggcgaccaaatggcggcgagtaaggtagccgtacgcgtcctaacaatgtgactcgtccataaatggcagcggttggcaatgaataaaactaaaatagtagggaatacaaccgataacgatgtggtcccaacagagaaagaaacgacaacgacgagctctggtcatgaacacgaccaagtgagcgcgtcaaaacatgttcccaaacgaggaggttccccttgaatgcacaagagggagcgggcgcaagggagaataggggtgttgagaggaggggcgacaggaaggagaggggccgcgtggggatgggaagtgcaatatttgttggggatcgcgagggagagatgggggcgccgagagggaggagatgggctgcatggggaggggagtgcaacatttttttggtattgcgaggaagagatgtggagcgctgggaggaagggcgtagggagggaggggtgaggcggacacacgaaaaataggtccgaaagctttacttattttttaattaggtatatagtttctttaaaataacatgaatgaccaaacgtaatgtaaaaattcacgacgtccgatattttaggagggatggagtagaaaaaactattactttgctgtttaactttgatttctgacactaacatcagaagtttgattacaagacaggcaaaaatacaaataataatattattattattattaactaattaattgatagtgccaaatgttactcctatggcactgagtagcatcagctagccgaggacctgcgccttgaaggcgtccacgtgcgccgggtcgatggacaccgagagctgcacctcgccgtcgcgccggccgccgacgagcaccatctcgccgtcgtggttcatcgacacgagctcgacgcgcgccggcctcccgaacccgaagtcggcggcgccgtacgccccgaaccgcgggctcgccgccacgttcgccatgcgggagaaggggatctgcatcacccgcgcgatcgccgacccgtccgccgtcccggcgagcggcgccgcctccatctccgccaccgccgcctgaaccgcccgcgccgcgcgcagcagcccgcgctcgccgcggagctccgccgcgttggcgcagcgcgccaggcacatcctcacgcagttcccgaggtacccctcgccgacggcggggtcgagccgcgcccggaggtcggcgaggaagatcaggtacgtgtcgtccccgtcggcgagcgccttggaccggacgaacgccgcccaccccatcgccgccagcgccacgaacgtcgacaccggcttggcggcgccgccgccatcggcagcctcctccgccgaggcgagctcgtcgatgcgccgcttcaacgcgcggatggcgtcggcgccgaggtggaacgtccggcgagccagccggaatcgctggctgaagtcctgctgatccccgctcgcctgcaagcatccatggcgggtggtggtgatctcgtcagtaaatttgcattcacggcgagcgagagagagatcatgacgcgtgcatgccattgcttgctccgccacgccaccgcggcgagctccgcatgcgcttaacattggggggagaaggaaaccatggttggatggcgtaccaagcaaaggttgacgacacatacacacttcgaagaggctacactacactacagtacatgcttcatgcatgatggaagcttcgatttttgtttatttatttgaactaccagaaagattttttgggctgttttttttatttggttgaattttattcagaattcaaatacattacaaccattttgcaaatctcgctgcctcgggacctctcttttggaagatgaccctgcctcagtgtaacattgtggaattgttgacttggtgttgaccatatatctgcacatctcctactctttttttttttgttgttgcaactttgctttagtcccaaaaatttatgtattctatgaaaatcctggtgaatttctacattttgaaaaatagccgtgtggaaacatctatagataaaattacgatatcacggaaatagggaattcttatatctttaaaaattgaagtcacttttcgtatatcttgcttaatgatctaacaactcatacgattgttcacattttctatttagacacaattttatatttcttcaataaaaggttgaataacaaattattctaaatgtaaaagcattcaaacataaaaaaacatatgaaataacaaaattttcagttaaaataaacaaaaaatgcaagtgatgcaaatcttcttaattttggacaatttacggttaaacattggtgaaatcgaagaattttatttttaagatgtgaaatgaaaggagctaggaagtgggagagtgacgatagcttaccacggccgggagcttgggcgcgaccaacttgagcatgtggcgcgcgagctcgccgccgtcgggttgggggatggccgcctcccggcggtagtgcggcgcgccgagcgacttggtcaccggagagccgacgcgcgcggccgacgaccacgcttccatgaactgccacacggcgcggccgtcggcgacggcgtggtgcacggacaggccgagcgcgaggccggcgccgccgccgaggcgcgtggcctgcacggacagcacgggcgccgggagcgcccgggtgtcgagctccggcacgagcgcgaggaacgccgcgacgtcgtgcgcctcgtcgccggcgagcctgagcacgtccatgtcctcggcggcggcgtcctccgcctcggcctcgacgaacgccaccccggcgtcggcgtcgtcggcggcggcgcagtccaccacgacgtcctccgtctcctccacgtagaccagcttccctgccaggggcaggtaaagcaccagcgtggcggcgagcgagcccttgagccgctcgaccgccgccgcgaacccatccccaccgccgccgtccgccgccgccgccgccgacatctcgtacaggaacacgcgctggatcggcgggagcacgacccacggcgtgtcgaagaaggacagcccgacgcgctcccgctccaccggcgccggcgacggcgcgacgcgggacacggcgagcacgcgcacgcgcgcgcgcgcgccagcgtcgccggacacggccgcggcctcccccatctctccctctatctctctcccaaccccggcgtgcttcgttctcgccgtcactggagcgcgcgcgagatgttcgacgaattgatctaccgtttcggctcgtatgatcgcgacctcatttataagtgcgaggtgtccgtgacgtcgtcgtcctcctcctcctgcataggaggcaacggaacattggaggcaatttttttatttttttgggggcgaggatttttttttttttttggagggtgaggtatcattaaatttttgtggttgatactctacatttcacagctcaccacacagcacacagcaataaaattcatatttatgctgatttggtttgagaaaagttcacagaaaatactatcaattatcgaaagcaattgaaatatatctaaaataattaatgtatgaagttaagaaaaggaaatgtaaacgcggtagtaaatttctattccctttttcaaaatataagtatttttttcaaaattatttaattagtaaatttccattgttttctacatgatctcttatattactctttcacaattaatatttgttctaatgtattatcaaacagctacaatgtaaacatcgcttgaaagtttttttaaaatacgattataatcatatggcataaatgactctaaatatatatagcttctattctaaaatataagagatcttggctacgtgactagacgtacttgttaaaatacgattaccctccaggttaataatacttgtcgtttcaaataaataagaacacaacccctaaaaaatatctttatcactattttctattgtaacatatatagtaatatattttattggaataccttttaaattaatctggtagtctataagaaaaatattttagaaattattattagtcaaatataaaatttgacattaatcttatcctaaacgataagtattatcaacatgtagggagtaatatattgttagtttggctattagtactccctccgttcctaaatacaggacgtaacttcttttcaactggattccataatacaaggcggcagcttctcggtgcatgtgcatctgcatgcatgctggctattcgctcggaaagtgcaggtcgagcgcatgctgcatgcatggtggttaatgctagcgtatctaccgcgcaacaaccgaaacgtcgctcttcgaacggagagaattagtcagcataactgctatttaaacagttttattggtctttgcaactacaacaaccacgtcctatattaaggaacggagggagtagaagttaacaaatatagaccttatattttagtatactaagggttttctcgcagaaaaaatatattctatttttgatgcagtttttcacattaattgtgcaaaattattccagtgacaaactaaagaaatctggagactaacgtaatggaactgaaactggtatacagctcggtttatatttcctgtcaaaataaacacggattttgcgttccatgactcggatttgatttttctgtcaaatcaaatctgcattttgtcccgaggcttcaaatttcttgagacagctcaagtacactaaggacaatatataattggacactaataactgctggttgatcgatgtagtattagctggttaataacaactagctggacgtcccgcgcaattgcgcggttagcatctaaccaaaatcatatattattcagcatgattttacttaaaatttattaaatagctatccctgtattatccccatatttctaattatgtagtttttaaagtcacaccagctgctaccccttacttctgtcatatccttatttatttgcttgctcggtctaccactatttctattcattctcctgaaacctttaaaaattagattttatagttttttaagtttattatctcgttgggtttcgtttttataatttctggaagtcccatcaaacgctgccattatactcctctatggcccgtccactgttttttctctttattgtcattgggattttacaaatcaaacataattatcgttcgagtttattttttactttttataactcccgccaaaccgtcagcggctttgcaattgtactcctttatggctcgcccgttgtctcccttctttattgccattgagattttaaaatcaaatatgattatcattattttttttactttttagaagttccgaacctttaaaaattagaccttgtagtttttagaatttattttcttgttgagctttattttttataatttttagaagtcgcgtcaaacgatgccactatacttctttacgacccatccgccgcctaatctttattattgtcattgggattctaaaaatcgagcataactatcgttggaattcattttttttattttttaagaagtccccgccaaccatcggcggctctacaactatactcttatacaccctcctgatgcttctctttttattatcattgagattttaaaaatcgaatatgattatcaatggagtttttttcttttactttctaaaagtcccagcaaccatattacccgtttgcttcacggcctgcctgtcgtccctccttttaatcatcataatgattttatttggtgttttactagcagtcaaccaccaccactcttatcttttataggcttgttacttaatttatcttatcgtgtgttttatatggtcttctttttcaatagtctttatttttatcaccaattttagttatttataaattgtattcctaattgaaatcttgtttctttttctaatttcagaatttatttttatttttattctgaatattaactaatctcgtatttgggttcttatatggactcttctctcaatattccttttttttacttctgaattttagttatttttaaattgtattcctagatggactcttcttttcttttctaatttctgattttattttatttttattctgaattttgattaatatcatattggattcttctatggactgttctttcaatattgcttatttttaattccgaatttcaaatatttttaaattgtatttctacttggactatccttttctttttctccgactaatgtgggaatttttagcccccacagcgaacgtggtgtctcctttcaaagctgttttaataatatactagaatagataattggggcttcaaattttcttctgtccaggtttcagctttgctcatttggaagctaccagctacagtagctaaattaagcatatgtccatttggaagcctttcatgctggcgacgttaatgacttaattcacatgacatttggcagctactgtactacgtactgccagagaaaaccaactagctagtcaagagatatctcaatgtgtgattacagattagaaggttacctactgtttcttttgacaaatcaggcaattaatcagattaattgatggattgtatgactgagcaccagtgagcagcaattccaatttaattgcgattgtgttggtttcagaaattttgatggatttttgggatgtcagtttcagctgggtgacgggtgcatgatgaaacctcaggtttaaaaactcaactacttcctctgttcaaattacttgtttttttttaactttgtcgtaagtcaaatactattaactttgatcattatttttctaaaactaatatagtttaacaatatgaaaattatgtattatgaaaacatttattatgatgaaataaaaacataattcttagaatgttaaactataaaaatttctgaaaattgatattcgaatggaggaatctaagttagtacaaagctaaaacaataaataatgtgaaacaggggaatataaggtttttttaaaaaataatatttttcaatagagaattgaaaatataagggttaacgtattaaaattaagtttaacacctcattgaacaatcaaagttcgacacgggataaaaaaaatgacaacagtcactgcacaacgctgtgtgacactgtacaacatatatgtgagtagtgtgagacactgttcatgcattttcatttttttaaagtggaccaacaaccctatcggataaccgcagctcgacaagtgtcgaactacggttatttgacagggtattaaacttacgattttagctgatcagcttctatttttataatttttcattaaaataatattatttctaaaaaaaattaataagggaggcataatcattttcagtaaaatcaacgcacactagtacagaaaaccccatatgtgccggttgggaaacccacataggtgcaggtttcctaaccgacacccccaaagcagcaccaatgagagaaatggtaggtgctggtgtctagaaccggcacttataaggtccaacgaatcaaaaaaaaatccgactcgatgtatcggctcgatttgagccgatactcggctcgatttgatccccacaatatctcatcaaagaacaattcatcaatatcttcattcatcaacatcccatccaacaagaacaaacaaggagactccgagatcgagattgaaagatacccaagaacatcaaagaacaaaattaagcacataattaagaatttcaagcacacgagactccggatctggaagatttggaaagctctgaggccatcgggagggagggtgccaccggcggcgacgtgtgggaggtcgccagcctccccgccacacgccgccatggtgaggccgccagccaccccaccgcgcccgtggagaggtcgaccagccgcccgtacccccgcgtgccgccatgggaaggcggcgttcaccccgccaccgccgccgtccgccgcgaccggctgctagcccagacactaaccccgtctcctcccccctccccggccgccgcctggctggatgcagaaagagaatgggggaagagagaagagaatgggggacgaggaggaggagagagggatggtgagtggagcagtggaggagaccgggtgagtggataagtacgcgcgactttatccactttatcgaccgcgcccccggcttctctctcgatcggctcggctcgtttgataggtgccagtttttttagaaaaccggcatctgtaatatattataggtgtcggtttttatttaaccgacacctataatatatcataggtgtcgttttttaaaaaaaaaccggcatctatagtataggtgtaggtttttctattgaaccggcacctataactaattaaagataccggttttttttattttcagcctgtgaaggtgggaaaaacactataggtgtcaattttagctatttcggtacatatagtgccgaactgtatgtgtgtttttgtagtagtggcatgatgttttcgatccagaccatgcatgttgaaaattaaatgttctcatttttcataaaatcagtagtcaatcctatagaatagttcaagaatatattttggccgaatatgtatgaccacaagacacaagtgtgatagagattagagatcgaatagctgtggcatgtaaaccatctagagcttggaaatgtatacacttttcgaatataaaagacaaactagtagttttcgctatagaagaagagttcaatggcacattttggtcgtatttataggcaatcaggaatagatgtgactgagaaaagtaggagcatttgtggctacatattcaggtgaactcatggtatacagtgcatcagcggcagagctgcttctagagacgacacgctggacactagcttagctacaatgtctctaaatcaccggttaaattaacacaaaggattgacaccgtaagagatgacgtcagataatttagatacttatggagtcttcgtttgaaaattccctttttccaaccacatgcatggtggtgtgaaactgtgaattcgaattcaagttgatacggctagctatatgtctgtgagtccggttggaatgacttgagtagtactccaagatactgagttcaaatctttatacgagttaatttcagattaaattgtttgaggagactaagtttttaatttaaaaaggctacatatatccgatacgatgtggccgagttaaaaaaatatcattctctaaaataaaaggctataacttaatttgtgagtaattatagcataatcttgtgaatcataatatatactaaaatgttaatcatgagacttgatcacaggctcacgaatcacactacatgtaatgagtttaacgagctaactcggacattttaacgggtcaagttaagtttcaattcgttcccaacttattgtgttaatgagtcgagccgaacaaactcgttaacttaacaagtttttacgaattacttcctccgtttcaagttataaagctttcacattgcccatatatatatatatatatatatatatatatatatatatatatatatatatatatatatatatagagagagagagagagagagagagacctatacctattaacaaaacaactaaaatttaactttatttcacaatccatgattacatacctaactaattatatgtatggatgctatatacctagaatcaaaatctaacaaaaacaagttcaaattcagtataaacatgctttgaactagttagtaaagtacttaatgttaatacctaagtaattgaaaaagtttcatactcatttgaattgggtatatactcaatttcaacaatgatgcccgggcaccatggagcaccaaacaaatttaatatatatatatatatatatatatatatatatatatatatatatatatatatatatatatatatgtatgtatgtatgtatgtatgtatgtatgtatgtatgtatgtatgtatgtatgtatgtatgtatgtatgtatgtatgtatgtatgtatgtatgtatgtatgtatgtatgtatgtatgtatgtatgtatgtatgtatgtatgtatgtatgtatgtatgtatgtatgtatgtatgtatgtatgtatgtaaattaactggtgctacatggagtatgggctccaagattcaaattgagtatatacccaatttgagtgagtatgaaatttttttaaatgcttagatatgaacattaacttctttactatgttagttcaaacaagtttgaactttttttttgttagattttggttctaggtatataacatccaaacatataattcgttaggtatttaataatgaattgtgaaataaagtttagtttgagttgttttgttgttaggtatttgtatgaatcaaattcatatagctagatatatactcacaatttgaaaattttaaaaaatttaagagaatttgtgtgttttataccttaccctaccatagccgccacagtcaatcaatcgctacaaatacaagtactgagattgtgacaacaacggaatccccaagctcttcgcaaaaactgcaccaatttttattttccttccaccaaccgagccgatcgcaggaagccgagcgagacgtctttccttcgtctcgccgccagccatggcgccaccaccatcggtcaccgtcattgaggacggccgcgtcgccgtgccgcctccgccgccgccagcttccggcgacgccgcgccgcctcctcaaacgacgctgttcaagctgaccgcgctcgacgcgcagtggatcccgctcccgctcatccagcgggtgctcgtgttcgacggcggcgaggggcgcataccgccgttcgaggacgtcgtcgccgccctccgcgcgtccctggcggagacggtggcgcggctactgcccctcgccggtaggatcgtccacctgccggagacgggggaggcggcgatcgactgctccgggcgcggcgtggccggcggcggcgtcaggttcgtcgtcgcggagtgcggcggcgccgacgcggcgcgcgtcgcccgggacgccgaccacgacgtggcgctgctggagcagctcgcgccggtgctcgacgccgacgcgctcccggcggagacgatggccgcgcaggtgaccaggctgggcggcggcggcggcggcggcgtggcggtcggcgtggcgctgcaccacgccgtggcggacggccgctcggtctggaggttcatcgaggcctgggcggcgtgctgccgcggcgacgacgcgtggagcgccgcgccggcgccggcgttcgaccgcgccgccgtcgcgctccctgacggcgaggagctcgccagggacgtgctccggaagtacgtcccaaacctgccagtggtaagcacgcaaattcacaggatttctttgaattccattgtttttttaaaaaaaaattacatttcaaaagaatatgttcaaatatttttaaaaagaaataaatgttactccctccgtcccataatgtaagggattttgagtttttgtttgcattgtttgaccactcgtcttattcaaataatttgtgcaaatataaaaaatgaaaagttgtgcttaaaatattttgaataataaagtaagtaaaaaaagaaataacaattctaattttttttttgaataagacgagtggttaaacagagcgagtaaaaacttaacatctcttctaatataggagggagggagtatttttttcaaccgtgcgatcgatcagattagtgggccatgaggtacggcctttcactgtccaacttttaatgtcttcattgcagtgcatgccctgctactgctagttgtgtggttctatccaaatttgaggctcctgtcagatttgagggaatggcttcccggcagatcaagaaaacaaacacaaaattttaccgtaacttaccccccgataacttcaaaacagtaattaacagccattccatttggaatttacagctggagttaaatgtaaactcattatatttatacagtgtaaatttcacaagaaccagacctacaacataagctaaagaatcatatagcctcaaaacaatatagtaccaaaccaactaaaaaaagtccaaattttccctctaaactattgcggtcgtctgatttatcatactcatttcaaatactagatattttacaccttaaacttttcaaaccggaccgataattaacctccttaacctcccataaagcagtatcagtcttacgtgacacacgtacaacagtttagccacatgtccatctagtcaacagtttgggaaaatattttttcagaaaatataatagtggccccacatgtcatattcttatatcttcttcttcctcgctctctcatagtcccgtgccgtcgtcgcccccgccccccgttgatctctccagctctccctgccaccaccctccacgagcttgctagctccactagtgtggctgcagctcgttgcatccatgtgccatagcacaagccaatcaagctcctctcaactgaagaggaacacacccatgcgaccttccgagccattcccccttccctctcactgagatcgatgggtgagatgatgcatgatgcggcagggttgctgcctttctggggatgacgccaccgctatcgcctacacatcaaacctttcttcctctgccgtctcagggaggccatcgccatcttccttcgcctcctcactgctcctcctgttgtggggaggagggagggagagagtgggagatggaaggaaggagacgagaggagaagaagatggagctcgctgatttttttttctatctttaatttctagcttactagactgcagtcacgtaatatcaaaatcactccggattgagttaggggggttaagcatctagtttaaagagttcgagatacaaaatatctggtatttgttgaatgggtaaatcgaacgatcgcaatagtccaaaaaggtaattcggattttttcctactaatttatagtcacttttttaaaaaaaataattggagttacaatctaacatcaacatatttacactgtaaattgcagaacttcgtagaaccacacgtagttagggcataatcggatagctgtttacgttttacagtcattttatgctggggataaagcatttttagcatagtgacaaatcaaatatttttaactttgattattaatagcaaaaaaaatcaatcatgtaagtaaacaatcataatatgtaactttttttatttaaaacattttacttttataaatattattggtcaaagtagcatctcgaaaacagtgtgaggataaaaaatgcttatattttggaacgaagggagtattagtttttttttttgaaaaatggactaatatgatttttcaaaacaactttcatataaaaatttttgtaaaaaatacacaatttaatagtttgaaaacgtacgtgcggaaaacgagagatatgagttaggaaagtgaggtaatgacgtggcatcctaatgactatactaactcaatcgaattggctatggtgttatgttttggccttggttcacacgtgttacacaagtcactcatcacataaaagttctctaaacttttgtactagtagggcaatttataccttttaagttcgagtaattctatacaatttactcaaataacttttataaatatagtgtttttttaaaaaaatgcaaaataagttcataaatttggcttattcgcgccatttccgatgagcaggcaacggtacccaagttcctcgtcaagggccgcctgcagctctcccgccggacgttcaccgtcgccgccgcgcaaatgctccggctgaagcagcgcatcgtcgtcgccggcgccggcggcctcacgccgccgtccggcttcgtggcgctcgcggcgctggcgtgggtgtcgttcgtccggagcaagcacgcggcgggcgccatcgccgccggcgacgaggtgtacctcttcttcttcatcgactgccgcggccgccgcgccgcgttcgacccgccggtgggggagggcttcttcggcacgtgcatctccggctgcctcgccacggccaccgcgcgggacctgctcggcggcggcgacggcgggctggtcgccgccgccagggccgtgcaggaggaggtgcggcgagcggcggaggacccgctcgccggctgggagtggatgtcgctggtggggcggatcgcgctgagccggctggtgaacatgtcggggtcgacgaggttcccggcgtacgaggcggcggacttcgggtggggctcgccgagccggacggagttggtgacgatgaaccatggcgggcaggtggtgctcgtcgccgccaagggcggcggtgtgcaggcgtcggtgtcgatgaagccggagcacatggacaagttcaagtcggattttgagagctacttagaatgattatttgactagaaaaaatacccgtgcgttgtacgggtgaagtttattttaatcttattattattatatggtttagttaatataaaattcactgcgagagttcgcttgaaaatatatatttttagaaaattatgggttgtagttaggaatccaatcaccttaagttagcatgcgagtttttttaaacatatttttttatgattccttctgtattaaaaaagtgaattatcttaaaaaccgactcaaatacggatatgtattttcaaaagcaaacgaacttaaaaaccgactcatacacgaatgacgtaaaaaataccaacaaaaatatttttaatttttattatagtagagatcgaagaagatgaaaattccaattggaaaccatcgatcgtactacgtgtttcttgtttgtagtcaaaaattttggagtgcttttgaattaaatggccgaaaagacgtcatgtcaagttggcaaccaactgttaagattttgagaaaaataatatattgtccccgatatcttggattgtactgtacatgttgatatataagaaaggataatagaaattcttgcattgtccctgataacagcacacatggatattaataggatctggtcttaaataattaagcaaatttcataaaaccttactcactccgtccttaaaaaaaaactcaatctagaaagagatgtctagaacaacgaatctggacaaagggttacatcccatcctaagttaagtttttttttgggacagagcaagtatgttttggaattggagcgcacgtcacacaaaacccattaaagcttaaaccttatgaaacattgtatcataaaacatgagattcttcaaaacaaactattatacctgaggttttgaattatagatgcttcaaaaccgagttttatgaagttattacattctagaatcgctggattgctactaaagcacagacaggttactacaataggaaataaataaatgctcatggtttaagagaacataacgcccctgttttttttaaaaagaaatcattcgtccaattagtacagtatattatttacatgattatagatataaattaaatattataataaataaacttaacaaatagcttacacaaagcatcttaaaaaaatacagaagaatgttttttttagaaaacatattaatccagtgaagttcatgatgaattgattccacccaccccaaaccaacttccaagtttcttactacgaattactctagttttcgccacttggacactaaacaaaaatacagtactaaaaatgaggtgctctttcaagcttcacttgttctgtggtgctaccaatttacacaaccgtgtttggcatattccttttaagtgaagtacttacatatttttcacatttactacatatgaattaatttatccttccgttctactctctccatcaaaaaaaaaccaaacgtaggactagatgtgacatattcagattcgttgtagcaggatatatcacatctagttctatgattttctttttggaccgaaagagtatattatataagtcatcttaggttggttctaaatcaaaatacttttagtttctagcaaaatatataaacatctataatcaaattaggcttattaaatctacgactaaacatattctatggtacatttattttgtgttaaaaatattgctatgtttttcaataaatttagttaaatcttaaaaagaaacagaggtagatcagactatctaggcgcataggccatggcccatttacaaaactagcccgatgccaaattgagcgggatatataccacggcccatttgaaaagattatgcaacgcaactacctcccctccttttttttccaatttattttcctactgaaaaatggtggttgccggacacggaggcggcggcgggcgttgctgtcagaggcgatgaggctgtccgcgatggatgccctgtggctcaccgctgccgctcatccagcgtgtcctcattttccttcctttaagaaaataagagatttgaaacatgttgagaattaaacaagagagactttacggttgaaaccgtacgtttcttattactgcactcgtgttcctaccaccgtccagcgacgtcgccgtcgactgctcctcatccgccacggtcgctggcgtcaggttcatcccggccgagggccgaggggctcggcgccgacgcgcgctgcctggggccaaagctgtgcccttgcttgatctccaattttgtgttgtaatgtttaattcaagtatcggttattgaatcttcagctcacttggagaccttggatggaatcgtataaggtcagaattgtgatcgaaagacacacaagatttacccataggaaccagaagcacgagtaatccaaatcatagagcccataaaacatggaaatttaactatttgtaactattaagtttggtaattgtctaaatatccttcttaatttatactttttttaccgcttttaagacgtgatttcttaactatttattatttttgcccacgtagcatgccaacgtggtaacgtatggtaaaaaccggtgtgagattcactggtcagtgtctctccctccgccggccttctctgtcgccgtcgccactagggtgagcatgagggtgggcgcccaccgtctcgttgttcaaccacctccgttgcctccttgctggcggctcgctcgataacgacaacagcatgggcgacgtcacccgcgttgctagggttcgttatgacccgcatgcccacgttgtctagattgaggaattcctgataaccaacgccaagttacgtgccagtgccaagaggccgcacgaatgcgatactggcaacggtccgaatgtctagttccccaccgccggcacacatgggatagttgtctcactaacgatggtgactcgtttcgtcccaacgctgctggtgcagcagcagacacagcatcgttggcagctgccacgccgctggttcatgcgtggagccggagcgacggtagtgaaaaagggcagtacaacagcatcctccaggccgtgtagagcgcgacaatgagggaaaggtggacaccgacgatgtaactcatgctgccattatcatcgtgcaagccgccaacgaggaggcggtcgaacaccagggcagctgtcgggtggtagacacccaccctcatgctcaccctcacggcgatggcagcaaagagggcctagccacggcagcggcagtgagagagaaggccagcggagggagagacactgaccagtgcgtcctacacatggtttgcagtttcgtttttggtgaaaatttcggtagcaccgaaatttacaaacttcttggttttcagcacttttgaaccgaaattatttaaaattttaacaaattttgactgaatttaaataaattattatcaaattgaacaaaagaaattaagaaaacccgaaaatttatgtcgatgtaatgacttgctgggggtccgaaaatttgaatcaaaattgcaattatcggtcccacaccattttcaccctatattgccatgttggcatgccacttgagaaaaaaggaaaatagttcagaaaccacctcttaagagtaataaaaaaatagcaaatctagaaagaacatttagataattgagaaaatttatagtggaaaaaaaattaaattttccctaaaataacaacaggtgactagaagtcttccgtctaattgaaacgaaaaattaccgtgcgaatgttgttagccacatgttctttttagcttatttatcatactattgaaatagattatttgattcacacttcaaaaagtatatgtttaaatatatgttttccccaatgtgccaagcccagatgagcgtgagccgccatgggccaaactacacatatctgattggatttggatcacaaccgaactcctacagaaatttcaaggactatttttcttcaattttaaaccataccatcaaacatttcatgcaaaaggagaatcaattttaaacagcatcagcatcaacaattaattaacgcggtaattaagtaataataaaactacgcgtgtgcctagctagctaattagtattcctctttagtctaaaccattgcacgccatggaggtggccggcgaaccccctctcgccgccgccgccgccgcctccgctctcctcctcgccgccgatgccctcgaactccatcaccctcgacccgtcgccgccgcagtacgccttgttccctgacgccgccgtcgccgccggcgcgtagaacgccgtcgtcgtcgacccggccccggcgttgtacccgacgccggcgtcgccgccgcccatcatgagcccgacgtcgccgccgccgtcctgctgctgatgaccatggtgtgagtgtgacaggccgccggcgagcgggtaatgcccgtcgatgacgacgccatcggcgccgccgccgccgccgccgcagcaaccgccctcgccgtggcgcgccgcggcggcgccgccggcgccgccgagcacgtcggccttctcgccctcggcctcgcggtagcggttgaggtaggacttgagcgggccgacgtaggcctcgaaccccagcgtggtcatggcccagaggaggtcgtcgccgttgatggtcttccgcttctcgcgctggcacttgtcggaggcctcgcctgtaacgaagctgatgaactccgacacgcactcctgcaccgtctccttcgactccttggagatcttggcgttcgccggcagcgaccgcttcatgatgcggctcacgttcgcgatcggcaggaacctgtcctgctccttcgccggcgagtccccaccgccgccgccgccgtagacgacatacccggcgctgctcccgcagccgccgccgccagccgcagccgccgccgccgcctcgccggactcgttgtccaacggcgggctgcccaccgggctcagcaagtgcccatagctcttcctactcttcatgtgaagctaacaacactagctatagctagctagctagctagagagagagtgtgtagttagagagagagagaagggggaggttatgggagttgaggatggagtggtgatgctctccttttaaagaaggaaaggaggtgaggagatgcgagtgggaagacggtatcgatgcggacacaaagcaaacataaggacgctactatatatattatgtgtgtcgcgacattctcgtccctacccgatcacctttcatgtaaaccatgtagtaatagttcagcggtttaatttattacctatgcaaagtgagtagagattaaggataacaaaatctacatcatgctgaaattaattcttatctatcaaggtgctctatcgctgcattgcgtcacgttttaaatagtgcgcgccgttgcaccaataaaaattaacttggttgtttgcattacatgtgtgcagcgcattcaatgatgctcatttacttcttgcacaaataaataaagatacacttgttagctgatgatcattttgaaaagactaaaaaatcttaggtgatgatcaaactacgacgaaaaaatattgtttaaggtgtttaattatttaatttatactaacatatactaatgaccgaaggaagtattacattttcttttgttattggagtctaggcaagggattgatttattttatgagaattgagatatgtataattgtgcatgaaagtatggtgtatagctagagatgaaatggaggtggggagatggaggtcgatgagagagagagagagagaggggggggactagttgccattgctgacgggctcgaatatcatgttgaagaacatgagaccagagttccaaaaagatcaagacaggggaaaccagaaaatattccaaaggatatcatggcacagtccacagcctggatgaccaccactagctagccatgtcacctcaagaaaaaaattgctatctacaaagatttttgatttcttggggttcctaggccaatggcaaggcatcacattagtggcattgatgcactgcaatctttctacccaaaaaaagggggtcacacacttacatctcatatagttttgcttgataataaaaaagataatgcatattgtaagctcattgctaaagatggcatctgcgagtgcatatattacattgtgaaaattgtgacatgaaaaagaaaaatatctctgctctcacttcacttgtgatggaatatggtatcttgtgcattttcataaaaggaaaaggcaggacaaagggcaaaggggccttgtgtgagatgcttctcttatccccttttccactctttttttggcttcaaagttctatggattattcgcgccatcacatcgcacaataatagaagaatatatgtgataacaacttgggtagagtacgcggattaattaacataacctcagaagcttaaggttgaaattactaggttttaatttccactacttcatcagctgcaggcttctggattaggaaatcaattatatgctttgggaggtttgaatggtaaacgggtgattagttttagtagttagcaaccggagcttcatataaacaactgagatcgtgccatttgtcagattccagaggaagccactgccgtaattacctgttgtttagtgtttaaaattattgctctttctcaactggattcatttcctctgttgtgctcgggcaaatattctacatgattaaataacatccgacctctgcatcaaggatgcgggcaagtactcattttagaaattctataagtttagtgaaacataagaagcctgaaaaaaaatattcaagctttcctaaaaaaaattaatccaatctgcacatatatagctgttactaaaattttcaccggtgcttgacaaacatattcactgacaaaagacgagctacagtactgcaggcatacgcgcaccgttggatcggctaaacattcggtcaagatcaaagtatgacttcttttaattagagaatttgctggaatatttcaaaaagcttagtgaatttttcaatggaaccgtgggtcatttccaacgttccattactttgcaaaccgttaatttattattgctcttttttttttgttaaactgcacactttgtgtccagccgattgaaaacaactcattttttaaacccgtttcaagagaaatacattgcaaaaataaataacggggatattgggagcacgacgatgcaaaggcgagagatgtaaccaaacccggattatctaaaattatttggaacatgaggattcctctaggagttttgagaaactcatgataatttcatcgaaaatgtttatcaacgactcaaacttgactaatatcccaaccaaattaacgacgaaaatagattcggtttgggcctccaaaaaagcctttgagtgttcctcttcttcatttttcccaagtggaaaagggaaagatcaggaaatgaggctgagaagacatgataaaactaggtgtttaacaggccaaagcccaaaagcagcccaaaaaacacaaaaggagccaagtgaaagtggaagagcttttgtcaaagtgtgttcctacctttccttaccacttgcacttttcccccctcagctttcaagctttttgtccaacacgtggccagaaccttctaaagcaacatgtacttaaactaaaacaagagtactgaaactagtactaagctagtaaaatataaaaatagttagattatgatcagagccaactatacacaatacaatagtgatagggagtaccatgtttcttcatttttaagcttttgaccttttcatcttctccgagttgcaactttaacagttcctcagtgtaagtgaacagtaaaatatactaggagaaccaaacatgacaaaagtattcttaaattaaggtagtgtaacaatataatatttgtgtaaccagttcaaatgatttttatttgattattgccagtcaaaattcaaacagagaagctactaggaaattaaaaaaaaatcggcctacaatgcgcaactcctcggcaccacagccaccaactttaataacctaatttggaagacctaggcgccacgaaaatgcaaaaccttcacatggctaatcatccaaaacagagtatggacctccgacagactagcaaccagaggatggccaaacagttccatatgtcccttatgtcgtcgatctcaagaaactgccctacacctcttcacgggttgtagatacacaaagagaatctaggaggcaattgcagaatggacggcgtgtgaggggttgaaaccatgtcggtggcagcaaacctccacggtgttagaatggtgggaggctacctcaaatatccaggaggcacccaagaaggctcttcgcacactgatcctgctggtcgcatgggagatctggactgagagaaaccgcagaacctttcagcaaaaagagctatcgaccacctcccttctggctaaaatcaaggaagaggccaaaatttgggccttagcgggcgcgaaaaatcttcataattggctttcttttagttagctcggaccaaaggtcttgagctcgttttcgcctttgtacagttttactccttctatattcaatgaaaattggcagcttgccttttcttcaaaaaaaaatcatatcaagttcatcacatttctttgactggttttgtgcaatactaattaatctactactccttccgtcccaaaatataagcaattttaccatagtgtcaagttaactatttttaatttggactattaatagaaacaaatcaataatgtaactattgatgttactagatttattattaaacaaactatcataatatacaattctttttatttaaagcatcttatttttatacttattgttggtgaaagtagtatctcgaagactgtgccgaaatctaaaaatgattatattttgggacggatggagtaccacaagatagatatatataaattaatatgcataaagaaaagatagggaagaacatttcaacatcgcaggccaccacacggcataatatataaatgctattcaatttgacaaaagtaaagctaatactgcctagttgacacacttgacagtgataatcaacatcaaggatctaatggactataacctcatcatcctgttgtatgccatctctttcttcagctagatttgacgttaccatcagtccatcactaacgttaacctctcctcgttgagctacaaattacacgcaaacttttgaattatctttccggataaactatttatcggttaatcgtttgtatgaaatgatacttgcatatttagcgactgaaattgatccattgaagatgaaacgtccaattttctccagggagttgattgtctgctatttcttgtttttttttcagctactagcagctagccttttatactcctaaaagatgtactttttataaaaacaaatatataaatttcttagaatactttttaaaatccattttcaactttttaatatttaattcatttattgttgccctcgaaaaagtcattacaaaattagaataatctatagctatcatataattcggaatgggcctataaggctgacgaaaatgcatgctatatatatttttaaaaaaagtaaatattttattaaagaataaaatcatatccaatctttgcacctatcaggatgtatacagccaacgtacatactgtgtgtgaggctagatatatacatgtagatcgtacatgtctaaaatatcgtgtaagatctgtaccattccaataaattgggtatcctgaaagtaccaataagttggatatcctgatcgataaagcatggaacaaaaagagaagccatttcagtggacattttcgaatcttgtccaacgcctacctaaaaattatcttttccaaaaaggaaacgtgcatttcatctgatttttcatctttgtagtgttgtatactattatgtacctatcacatattggacgaataatatcaaagtgaaaaatccagagaaccaatttagtagcgtatttttagagtcgccccttctaaactaaagatacgcgaccaaatgacaaacatgaattttaagacaagtagcttaaaatacatttcttttgcatgcttcttaatcccctaaacagtatgtttcatgtaaagatctcctatatactccctccgtcttaaaatataggggattttgtatggatgagacacttactagtactccctccatcccaaaataaatacagttttacactattcatcttcaacgtttgatcgtttgttttatttgaaaaaattttatgattactatatttattgttattagatgataaaacatgaataatactttatgtgtgactattttttaaaaaaaaattataatttttttaaataagacggacggtcaaacgttggacacggatttccacggttgcacttattttgggacggaggtagtactacaaatctagacagctccccgtctagattcctagtactagaaagtgtcacatccgttcaaaatcccttatatttggggacggatagagtatatttcttttgttggaatacttttgtaaagtagccttttcaatttcgtactatttctttcatttgtttatatacactcaaatagccatcaaaaaatcggattatccaacgatccatcaattccagctctccaaaatggggccaaaatatagtccctatatttaattttaaaaaatgagactatactagtatagaatttcaaaccatgcagccgctcaaacaagcagagaccataatggcaaaacaccaaatatgaaatgccccaaaacacccaatttaagatgaactcacgagcaaactgaccccacaggtgggccgagccgggccgggccgggcgtgagatcgcagccgcacgttcggcaggcagcccatccatccgggccgtccgtttgcgcggacgccgtaatgatggcgatgatgaattgatgatgatccactgatgatggtcccgtaataataaatcgcgatcgcacgagcgcagaagccgttccgtttgcttcttcaatgcaggtagaaccaggaggaggtgggacccacgtaaccaggacgtggggcccacgaacgggacggaacggaattggggggaggggacactgttgaccggatatgctgcgtctagctgcttggacttcgcttttttgtttcaggcggggtgaaaatttaaatgaccgttgatttgtggaaaattcatgtaacctttgtggtgatacttatgcggcttgtttggtaactcgaaggaaggggattatgggagtttacataaggaaatttatgatgagattaagataggaatttgatttttaatcacaatatcttatttggtttgggtgatggaaattgacagagagtttagttggagattaggtcattaataaaaatggatggctcagatttgcttagacaaaataaaggaggaattccctcctaattatctgcccctacccaggtactgaaaaggagggagttccttcctcaattctccatccacatcccaccaaaattcccatctcttccaaccaaacaaaacacttaatagcctcatccctctaaactcccaatccctcctaaaaactccctccaaccaaacgagccgatgtagtattttttttcatgtgttaattgtcttatttttattttttaaagttgattcgattgtgagcacggtttcatttaaaaagaaatataatccacgagcatggtggtcagttgatattgtgcagggaaaggcattataatccgaagaaaagacacgtaatcaaaactacattttaattaacttgaatatctgttaaatcattggccatatattctttacacactttatagtaaaaggactatatatttatcatctattcttattttcaattaatatagtactttttctagcgatttattatactataagtggaattgggactatatgaaaacaagatactgtgaaaatgttaaatacaatagcttctataatagttgttctagttaaatcactatttgttcttttgcatattagcaacatactgcctccttctcaaaataagctcatttttcatccactacacacatatcaatacaaaacaaaaagattagaatacctccactttgtcaaattctaatataattattcatcactttatctattcctaatataattgttccctactttcataaactctgatataatgattactctaaaagtaaatatttttttgggataaatggacgaagctaaaagtaaacttaggctgtgtttgaggaggaggagatagagaagattgggaagatacgcaaaacgaggtgagccattagcgcatgattaattgagtcttaactattttaaattttagaaatggattaatatgattttttaaagcaactttcctatagaaaaattttacaaaaaacacaccatttagtagtttgaaaagcgtgcgtgcggaaaacgagacaatcacccctatctcccctgatagaacgcaaacggaggaaatacataagaatccattccattgtagatgaaggacatcaccagatccattgaggatgaaggacatcacatgttagcacctaataaactcttcatggcaacacttactacaaccacagcttatgaggcctggccactccataagcttcttcattttatttaattgcagctgcgtttgttaacatcacttctttatcgcatcacagctttgtctcaacatgcatgcatgcatccttgtcacactcaccatgccacatgcaaaccaaatgaaaacgatgggttaagctcacagtaaaatcaaagtgctgcttgtacatacacctttaatattgtactatcggccaaaaatatatactctttgtcttaaattaaagctatttttaccacttaagttattttaatataaagctatttctctacctacttactttatttcaaccaatcataacaactcttcatttaatttcttcacgtactttatctccctaagtaattataacatatattctttcaattattttcacctagtttttatttcatgtgaaaattttcatgaatgcttacattttgggacgagagaatattagctagtattgtcttttttaagaggatttatgaaattttcataaaaacattgttccatattttttcaattaaaagggaagaaaatttagatatttccaaaaaggtatacatcagataaatttggtccatgtttcattataaaaattgatatcctactcacatatatttaatttatcacatctactatatgcactataaaaattaaccaattgtagaaaatctcaagtttataaaatagtactcttaaaaatagatccaaccgtacgatgatcatcaatggaattagataaaacatgattacatattcatcgtttctcgccgttcacacgtttagtcacaagcccggacgtgatttaaaatttctcttcactggttagttctttttttactacacttttttagtgattttttatatgttggattagagggagaaaggaaggaaaataactatgctttttaacatatactcacttcggtttcataattcttatcattttggataatgacatggttttcaaaatatatctttgactgtatttttctattgtaatatatctttgactgtatttttctattgtaatacagttatactttaactgtagtactcccttcatctactttttgatagtcatatttcatattggcacacagaccaaggataagtaattcatcatctatttaaacatgctactagtcattcctcgtaaacaagcgattcattaatatttacattttttaatacccatgtagccaatcatgtgtggaagaatggagagtcacacattaaatccgagaaagtcattaagatgataggttgttggattgaaatatgcctatcaaaaataaatttttcagatttggaaatatgactatcaaaaatagatggaggaaatactttgtaagacaagtctatatattgttctagtgactttaaactaaatattttaaaagttattaatagttaaagttataaaagtttgaccttaatctacagtagaaggccacacgcccacacaggccacatccctcctgtggctgctgttcatccgaccacacgggatcccacctcctccaccgatcccgttccgttgactccgttcccgtcccgccccgcccccactcatctccactaatccccttcgctaatcacctctgactccctctaatccaccattttaattaaaccccaataattaacaaacccctcactctcttaatccgcattaattaattgattaaaaaaatctaatcactctcgctatcccgttctaatcctaaccccacccgtgtctcctacctcatcgacggtataaagcgaggcgacgaactgactcgactcaactcaaccccccccaaaaaaaagaagaaaaaaaagaaaaagaaaaaaaagtcgtcgaaaagcgagagaaggggatcgattcgaagagagaggaggtaaagcggcggcgggagaatcttcgccggatcggcggcggtggcggaggaggaggaggaggaggaggaagagggtggtgctgatttggtgtggaggcggggaaatgcgtgatgtgtgagatctagggcgtggggaggcggatcgcggcaatggcggcgcatcggtgggcggtgtgggcggtgctgctgctgcggctgctcgtgccggcggcgcgggtgctcgccaacatggaaggtgggtggggggggaggtttgcgtttgagttgagcttttgcttgggttttggtcgatctggggtgtgttcttgctgggttggagtggattggtgtcgggagcttggggggtggctgcttgcttggcttggtttgagcagttagtacaagttgccgcggctgctggtttttgctgtgtgtgtaagttgctacgagacgtcgcttgattttggtttgatgcgtggccgctttgtacggatcctaccttttttactctccctcgcggaagaatcggagcattttctcgaatttttctccggtcgaatttggacttctctgcgttccaaattcactccgaattcccctagcctgtgaattgcttcaaaaatctgcgcaaagtcgggagctaaatttgcgctttcaaaatgtgaaacccttgtcggaaaaaagttgccatcgcgtttgatttaatttaatttaattttccatgcatttggatcatgtgttctattgaatgaagatttgaactgtgctgcgccgatgctgcacgtttcggagatttcccctttctatcgggtttctgcgtgcgcttgagagagctactgttgcattaaatcgcgttgctacacgttgcttgctagttgttcatggactaatctgctagagctgtgttaatcgattctttcccgtggttgttaggtcttgattaggacgtctaatgacgtggttttgctatttcgggccattgttagattcgagctgtcggtgcctaagttcgtgacataattgggttaccttttcgcgcgcgcgtgcgggttggtggctaggtgatttttcaagccggactttgtgtctaatcatggtacgaaatgggatggatcgtttcgattgcggattttctcgagcatggcttgtttagtcttgagatcccagttgcttaggcctgcctgggattgattaggacgttgatgcgcgtttgacgacgctagactgctaattttgggggtgggattggttgtatgtgtgtagttctagttggggattcggcaaattgtagtgggggcctgtgagctgtgggtcaaattgtattttccaggacaattggtagttgatgtgtgatcttgaagcttcaagcacctgaagcctgatggtgattgcttgtatttgaaaactttggtagtagtaggatataaagaggccaagttggtgttgtaattttcattttagttcgaccctttgatgctgatctcttacttaggtacttactttggagtgattcataagaaaatttaaaagcttattcacgacttacattctcataattgagatgttctcataattgatgatattttgagtttggctcactggttttaagtctagcgtctaagagttatctttcatgtacttatttgcccctttgtcatatactagagtaacaatttaactttttttaaaaacaaatcatactagctatggctgatgaaatggaatttttttgacatacaagtcagatagaattgtgccagatgcaatacaaacaccacatgaatcatgcatgctagttgaccttttggtttcgctccttttctgcatgatgatttggagtgttttcctttggacaaattctattttcaatctacacaacaattattagctactatttatgcacaatcctcattgattgtttggttaaattttattcacctgttgttgatacatgattctattattggcaggtgatgcattgcatagcttgaggactaatttagttgatcctaataatgttctacaaagttgggacccaactctggtcaatccgtgcacttggtttcatgttacttgcaataacgacaacagtgttatcagagtgtacgtgctaccttttgtctactatgcaatccacgcctcatacatttttattgaaattatctccatttttcagtgatcttgggaatgctgcactatcaggcactttggtcccacaacttgggcaactaaaaaacttgcaatacctgtaagttctcttcctgttgttaagtgttgtgcacatcattaaatgccattcctgctgcacatggtgcaatgttttgtcattgttctgatctttgaatttaggttaataccttgtaatgtgatatacgaattcatataataaatgttccattttgtaaataaatgcctattacctttcttatgtgagtatgtgatgaatgtctcacctatatcatcagaatatctacagtcacgtggagaaatattcctagctagtgtgttgtgctcagatcaactcaagccaatcactgagtattgtagagtattaatgttcattgttttctctttatgatgcagggagctctacagtaataacataagcggaacgatacctagtgaacttggaaacctcacaaacttggtcagtttggatttgtacttgaacaacttcactggtccaataccagattcacttggaaacctattgaagctacgattcctgtatgcttctactttactagctaaccgcttctacatatttacgtttagtagagatatacatggtcagccatctcatatttttaggacttggaaactatacttaaatacatatgttttagctggtgagtatttttgagctctcaacctaaggatcttgaattttcagaacacatattctcttagcatagtgcattggaatattggatagagatgaaatgaatctgtggtagtatcggttcatggcaatataaagcctatcgttgagaatcatgctgatgtagccaaccatatagctaaattggttttgtcgaccatttaacctgatatcaatggacagttggacacgcaatgcttacatattttggataacagcacttaacatggtaatgccattgttttaccaacatgcacttataagtgggaaaacattgccatgtgtactacaacaaaatgatttggttcgatttgttttcctggtctgaccttttcattcaacttggttgtgcattagtacattgcaattatatttccagactgctgtttatgagatgatggatagcttttgctactttctcactccttttctgatgttttagggcatctcctatgcctcttgattttcgaagtagttttctagagtctctgcattatatttattctctgtcattttctgtcaatgttactaatttggtgacttattttgtatttctgcgaggataggcgtcttaacaataacagcctttcgggttcaattcctaaatcactaactgctatcactgccctacaagttctgtaagttatccccccccctttattatacacttgtttaatcctttcttttcagtgtagtctttgttttttgttctgtggtttaattagtaaataacccatggtcaatgttttctatttaattaaagagatctttcaaacaacaatttgtctggagaagttccatcaactggttccttttcattattcacccctatcaggtaaaactagatttaataatgattgcagttcactgctcttttccaatacactgctgctatttacacttgcctgtcttttgcagttttgccaacaacccttccttgtgtggtcctgggaccacaaaaccttgccctggtgctccccccttttccccacctcctccatataatcctccaactcctgtgcagtcaccaggtgagatctgttcatattcacagctgtgcaacagccaacactatgatttttttttgttgcactgacgcgtggtacttatgctggtatggactatggaacatattgttgttgttctgacaataataacctcatgttctatagggagttcatctagtactggagcaattgctggtggagtggctgctggagcagccttgctatttgctattcctgctattggttttgcatggtatcggcgcaggaaaccccaagagcatttctttgatgtgcctggtaagcgtccaatagaacaagcgaacttggagaataatattgagccaactttgattgagattcattatttgttacagctgaggaggatccagaggtccatcttggccagcttaaaagattttcactacgagaactacaagttgcaacagataccttcagcaataaaaacattctcggaagaggtgggtttggcaaggtctataaaggaagattagcagatggttctttagtagctgttaagagactaaaggaggagagaacacctggtggggaactacagtttcaaacagaagttgagatgattagcatggctgtacatagaaatctgctgcgtttacgagggttctgtatgacacccacagaaaggttgcttgtgtatccatacatggctaatggaagcgttgcgtcacgtcttagaggtacgttgccttttttttttccaatctgacatccctgtatctttcagataattggagggttgatttgggttttatattatagaacggccaccatcggaacctccacttgattggcgaacaagaagaaggattgcgttgggttccgccagggggctgtcctatttacatgatcattgtgacccaaagattatccatcgtgatgtcaaagctgcaaatattttattagatgaagactttgaagctgtagtaggggactttggtttggccaaactaatggattacaaggatacccatgtaacaactgcagttcgtggaacaattgggcatattgcaccagaatatctttcaacaggaaaatcatctgagaaaactgatgtatttggttatgggattatgcttttggagcttataacaggacaacgtgcctttgaccttgctcgtctagccaatgatgatgatgtcatgctactggactgggtaattgactagcacaatcttcaattcaaattgcagtccatattcatgcccttttgtggcttgatgttgtgttgggagttagataaaattacttttatgtatgtccaaaatcgtatcatataaaaaatagtagttacagtaaggtcttaaaagtagtcctttttttaatcattatggcattagctaagctaagcataggattgaacatcatcgtctgagaaatacactgttatatggtaagccaatattcatgtgctgtgctttgtgcaggtaaaaggattactcaaggagaaaaggctggagatgttggttgatccagatttacagagcaactacattgatgttgaggtagaatcactaatccaggttgctcttctttgcacacaaggctcccccacagaacgccccaagatggcggaggttgtgaggatgcttgaaggtgatggccttgccgagagatgggaggagtggcagaagatagaagtagtacggcaggaggtagagcttggccctcatcggaactcagagtggattgtcgactcgacggacaaccttcatgcggttgagctatcagggccgaggtgatgacagcgcactggtagtttgctgctaattcttgtccgtcggaagagtgatttttatcagccatcctagtcgaatcgccatttgttcataccaaccaattggcccaatgtagccagctacaactatgttttgatgtatattgcttgatttgctccttgatgtgccgccttggatatcggtgacccgaaaacagcaggagcccaaggaactattgtcctgaagcttgcaagttgcaacaagatcccagtatgttaaagctcacaaggtagcagctaggagtgaggttgctgcggctgtttgctggacctgtgaaaattgtactgactggtgacatctaactattttgtaccaaatgtaaggaaaaaccatggtattattactttggcctcctctgggaaaggttcagaactttcagatgatgcagttggcctcactggtatactctatttggacatttgattatgatgtgtttactgtaaatgatacccagttctgaatcaaatgtaccttctgcatacagatgaaatctttggtagaaattgcttatttctttttattgggtcgattgtgcaatcttgtttccttcgccgtgtccatcacgaaagatgacttgaaggctagctatgtactccctccgtctcataatataagggattttgagttttcgcttgtaacgtttgaccactcgtcttatttaatttttttaaaattattatttattttatttgtgacttactttattatccacattacttaagcataacttttcgtttttttatatgttcatccatttagcacttataaatccgtttgaattcaactattttccaatttcttcacttgctccggccatgggtgcagcaactccaaatggctcgtctttttcttgagaacaccaaatggttcgtcttgttcgtatatttttatggtgcatatgttacgtagcttctcgacataaaacgtcctgttcataaacatactttttcacggttggatatctaccatgaaatccgcagaggatgttcagctcttgtcaaattcttactgcctgtttaatacaataaatctagatagttgtttattacactgtgttggtttgtttattttgaggcagagggagcatgtctcaaacgtgttggttttgcatcaattaaaacagtatttctcagtcttaaaatataagcatttctaagtataaatatgaacgactgtatatctaaattcgtagccaaaagttactatattttgggataaatgtagtatgtaagacaatgcagttctcaagctgccgaattctcacgttccaaattatggctttagtttcaaaatgacagcaaatcctctcacggatcaaggaattgagaaacatttgacttacaaaattcaaaaaagcccaacaaaaacccaaaaacccaccagccagagggtttttcactttgggtatgtttagttcccaaaaagtttttttcaaaaacatcacattgaatctttgggcgcttgcatggagtattgtatatagataaaaagaaaaattaatcacacaattatgtgggaaatcgcgagacgaatcttttgagcctaattagtccatgattagccataagtgctacagtaacccatatgtgctaatgacggcttaattaggctcaaaagatttgtctcgcggttttcgggcgagttctaaaattagttttttcattcgtgtccgatcaaacgtctgatgtgacgttcaaaaattttcttttccccaactaaacaagccctttttctccctttcacccttcccctccaggcctccacctggctcaaagccggtggcatactttcccggtgatggcagcggccggcgagctcgcaaacgacggcggagacgcaagtccggtgaccccatgcccgctagaggtagcggcggcaatgcagcttctcttcctcttcctcccccgccggtctcccctatcctccctcgattgtggcgtcgtcccgcggcagctcgcgagtgcatgcgcggcggaggtccaaaggaccggaggcggggacgaagcgagcaccgccccccgccagatccggaggcggagtgccgcgtgcggcgtcgcccgcggcggcccgccggcgggtgcgcgtccaaggggatcaggcaagctgctgcgctcggcatcggcggatcggcctcgctcgcactagtcgcactcatcgtgggactggtcggggagcaacggctttgcgccgacgagcataggcatgcggcgatccttccttcttttgcctcctattccagtgatttcttgcaaattacccccaaattgttgcagatcagatggatttccttgatttcttgtgcaggcgtgccgccgctcaacatggaaactttccaagtgaaggaaagatggagactatgaaaaacgctagctccacaaagtggtgtgctagttggtctaggttcgaaatctcaccccttttatttatttgatattagtttattctccaatattcgtgtttttttaagatggagaatattataactgaaactaataatagcaatactgaggtttaggataataattgtgcggccagaaaacactattcactgaggtttaggataacaattcactaatattcgcggtttaggataacaattgatattagtttattctctaatattcatgtttttttaagatggagaatattataactgaaaataataataacaagagtgaggtttaggataataattgtgtggccagaaaacaaggtttaggataacaattgtgtggccagaaaactctagttgacttgaccgagtggactaggtgcatcatcttccttgcaaataccatataggcatatgaacacaatgcatttcctcagatcctgaacaattacaagtagcttcctactattacgactagtaccatcaaactacttcatccgactgagagctgagctcagacataagagagtaatggcgacgatgcttgtgggtgtttctacaggagtaatgaacaccctcctgtccaagctctccaagattttggaggacaaatacacaaagctcaaaggagtacgccgtcaaatcgcattctttagaaatgagttgagcagcatgaaggctgccttggagatgcttgaaactgtagaggaacttgatcccctccagaaggaatggagggacacagtgcgtgagctggcttatgatatcgaggactgtattgatcccttcttggttcttgttgatcagaagcaagatgaacaatcaacattctttaaggggttctcctacaaactgaagaagatgaaggctcgccatgagatctctaatgagattgaagaactgaagacacgcgtgatagaggcaagcaagaggcacaagagatataattttgttggtctacaatccagccatggcacttctggtattgaccctaggctgcgagcactctacgttgaggttgatgagcttgtgggaatcaaaggaccaaaggagcatgtcatggagtggtttgccaaggggagaggtgatgtagaagtgaaggtgttgtccgttgtgggttctggaggtctgggtaagactactcttgccaaccaaatcttccgtcaattgaagtgccaatttgaatgcacaggttttgtatctgtgtcacgaagtcctgacataaagagtatttaaagacaaatgcatactgaggtagggatcactgatgacacatctgaagatgagcgacaactgatagacaaaataagggaccacctcaaagataaaaggtaaacccagtaatccacttataacaactaatgattttctgcattttgttaagcacagaaaccaaacatggaagcatacaataaacaataattagtggcataactacatgcattttctttgtttataaagtgcatactgcatatacatatgctaaaaacaagaagtctagtcttgactgctataactgtcatgagtaaattgcataaactttctaaaccatttttgtataacaacattaatgaaaaactaacttcttgatggcaaatgacaaagacgtgtgtaaatttgtactgcttgactttttttcaacaaaatccaaatttacaaataggatttcttttctcagagtgcaaaattgtactgcttgatggcaaatggcaacacatatgtgagcatttggaaaggaaggtatttttctccattcctactagaacaaaactaccacctgtggaatatctgcattccaaacaattttttttctcaaaagcgcaggactgcatttcatttcatcaagaagaaaggaaataaatacaaaaagagggggctaaactaacaccagcctacactaacaacacctaagggcaacacacaacctcaacaagcaaacacaaactaattgcccggggtaagcaaacctacagtgaaactcatggagtgcgtaagctccagcaaaactacactcatttattttatagcctgcaaactcccgcgcccccccccccccaaaaaaaaaaaacgtttggattagcactattgaaaacacaatcgttgcgatgcttccaaatctcccaagcaactaggatgatcaacgagttcaatcagttgtgcaactctagataccccttgatggctttgccccaccatgctgagaatcaagtttatgatggttgaggtgcagcaccagccagccgtagcctcaagaggagtggggcaagagaaaacacatgatacgaggatatgctgaaatagtcatcaccactttggtcgcttattgggcaggcaacaaaatgtgacaaccctcgcttagcaagtcgatcagaagtcaacatatgacgttgattgctaaccaaataaaaaacttgcaacataaaggagctcagcttttccaaatccgcttccatggagcaaacttgatagatcccaggaaataagacttgtaggctgatttacttgtgtgggaaccagaccctgtgagcttccaaatatgctggtcctgaactccatgctgcaagaccaccccatcaaccaaatcccagatcagcaaatacttagagagaacatggacagacaagccaccttttataccagccacccaccgcctatttactagtgcttgtgccacagtacgttgcttcgttgatcttttggtgattaaataaaaaagattgggaaagggcatgtagcctagtggttgcagtaatctgagtagcactccaaggtcctaagttcaaatctctataggagcgaatttcggattgggttatttgagggctaagttccctgtttgataggctaagttcataatttaaaaaggctgcatatatccagttggatgtagagatcgggtaaaaaaatacccttctctaaaaaaaaaagattgggagcctattcagttatcgttcttccttgccaccatctatcactccagtacatggtattttccccgttgccaactatagtttccacacccactctgaacacagagcgaacactgcgatgtacttgtataggtaacacgttacaaggcctagtggagtcagtttttttaagtctaagccacctcaagattatgaatgccaagccccccttaaagagaggccaacaaacacgatcccaggagacaaggcagttatcactattggccttctcctgacccttccaaaggaagcccttgcgccttttatcaatagccctggacacccatttgggaagattcattgccatgaccgaatagataagtatagctgtcaagaccacacagaccatcacaagccggccagcctggttcataagggaagctttccacactggtaggccatccgccactttgtcaaccaatggcaacaaatcatccttaatggtttgcgagttgtgacggaagggcaagataagagcaaggaaagctcttcacttcacaagaaagctcagtggagagaacttccaagtcttcctcggaacattggataggggtgcacaaactccttgtcattttggtcttaagacctgaaatacagccaaaaaaatctaggatcacccttgtaggtcagaggaacatcattgttatgtggagggatgaattggggtgctcgacgggagggcaaggttgctgcagcttcgctgccccggagcctaggtgaggccgaacagagaagaggggagactagagataggtttaacttctttcttgattaattccacatgactgtggtgcctctccttatatagagccggctcctaacaaacatcctaacaaccttatcaaataaagcctaacaaacctcctaacaaccttatctaataaagcctaataaccttatctaataatgagaggggctgagttctgcccataacaatcaccacattatctgtgcgtatagagaaatccgatgtgccatctttggaacagcatggggccgacgaagattattgtggatgcatgaaccacgataaattcagcaaattcataactaaaaaaaaacatggggatggaggctccgaagatgaagtgttatttgccccggttccctattaatcaaagctcctgtggaagaagtggagagcggtaggcatagcaagttacaataccaccttccaaaccccaagtattttagtacctcaattaggaaggaccaatcaagcgaatcaaaggcctttgatatgtcaagtttaaacaaaacatggggctctttcttactgtgtaattttcttgccacctgttggacaagcagacaattgtcctgtatacttcttcccttgatgaatgcactttgatttatggaaaccatccccggaagcaaaggtgctaggcgatgtgccaaccaacttagcaaaatttgaataagactaatggaacgataatactttacttgaatcgcatcaattttttttttggcaacaaggcaatgaaagctgttttaagaagtttgaacttagccacatgaccacactgaattgctgagaaggccaaagatcacatcattttttgataatgtcccaagtcccaacacgatgtagaaccgaaagttccaacttccgaacaattgaatgtccacaataaatccatgcattaagatacattgccacatactcccctcaataagtgtatttttagcctaacaatttgtccctaatagagtgtagttttatagtggtccactagacctctttaatactacatccttttcttctcattttagtcattgaacaaatagtactccctcctcctcgttttctccccctccttgttttctctccattttaatgaagggcatattagtcttttgacctcgtccttaatatgtctttgactagctaaaactacagttatttagggacggagggttttatgtgtgcaaaatctgaccatatatatgctttgagaagacatatccatttccctaactaggttcctcattgatatttataaaactgggacctgagctctagagtaagcatgcatactagtatataaccctgattgcagtagggtggtaagcatacttgaatgatatataactaaataaccctgttaaaatcatggaacaggtactttgttgtaattgatgatgtatgggatgttgaagcatgggaagctgtgaaacttgccttgttcaataatagatgtggtagcagaatcgtcatgacaacacgtaatgcagcagttgcatcgcattgctcacgtggtggtgtttgtgtctatcaaatggaaccccttagttttgctgactccaaaatgttgttttgccaaagagcatttcgttcccaggaattatactatccccatttggaagaagtttgtgatgagatactggcaaagtgtggtggattaccattggcaattattactgtatctagcttgttagccggcaagcatgcaaaagatgaatgggacaggatgctaactgctattggccatgcacttgctaagaatcctgatgctgctaacatgacaaagatattatctctcagttactttgatcttccccaccatctaagaacttgtttcttatatttgagtgtatttccagaagattacaagatcagcaagcaacacttgataaatagatggattgccgaaggatttgttcatgaagaacaaggatggaggacctatgaagttggcgggaactattttaatgatctcatcaatagaagtttgatcgaaccagttgatataaatgatggccaggcgaaggcatgtcaagttcatgacatcattcttgatttcatcacatgcaaggctgccgaggaaaatttcgtcacctcagtgaattctgtggagcatgggaacatttc

SEQ ID NO: 23371 - DNA, 2333 bp, Oryza sativa
attggacaataattcgctcctggcttgtcgctctctttcttgagctgtggctctgtgcctgtttccttccaacatttgcaggacgtacctcacctgatgcttttaataagtaaaaaatgtgagattggatcatacaaagcaatcagtagctgccaagaagggattactggaagcgaagttccgctatctgttttctcaataataatcatcctcacattcatttttctttttgtgccatgtgtaacagggtgagacaagtcaagagtttgagggtcagggtccagatgaggcctatcctcgccagcataaaattttttcactacgggaactagaagatgcaacaaattgctttagcgatagcaatgttcttcaacgtggtcgattcgacggcagcatgtacaaaggaagactaggagatggctcattagtagctgttaaaaaggattatataagccgggctttaagcatgggttatccaaacattgattggagaacatggcactttcaaacacaagttgagatgcctgtgcatagaaacctgatgcgtcttcatggattctgcataacgccaacaaaaaggttccttgtctatccatacatgtctaatggaaccgttgcatcacgtcttagagttacgttgccttttttttttctagtctgacatccctgtatctttcagataattagagggttgatttgggttttatattatagaacggccgccatatgaacctccacttgattggcgaacaaggaggaggattgcattgggttccgccaggggactgtcctatttacatgatcattgtgacccaaagattatccatcgtgatgtcaaagctgcaaatatttcattagatgaagactttgaagccttagtggggggttttggtttggccaaactaatggatcacatggataccgatgaaccaaatgcagtacgtggaacaattgggcatatcgcaccagaatatctttcaactggaattatctctgagaaaactgatgtatttggttatgggattatgcttttggagcttattacaggacaacgtgcctttgaccttgctcgtctagccaatgatgatgacgtcatgctactggactgggtaattgactagcacaatcttcaattcgaattgcagtccatattcatgtccttttgtggcttgatgttgtgttgggagttagataaaattacttttatgtatgtccaaaattgtatcatataaaaaatagtagttacagtaaggtcttaaaagtagtcctttttttaatcattatggcattagctaagctaagcataggattgaacatcatcgtctgagaaatacactgttatatggtaagccaatattcatgtgctgtgctttgtgcaggtaaaaggattactcaaggagaaacggctggagatgttggttgatccagatctacagagcaactacattgatgttgaggtagaatcactaatccaggttgctcttctttgcacacaaggctcccccacagaacgccctaagatggcggaggtggtgaggatgcttgaaggtgatggccttgccgagagatgggaggagtggcagaagatagaagtagtacggcaggaggtagagcttgttgggaatagtcacacattgtttatttagagagagttgaactaacttaaaagtggggggagtcactcacctcttgatgtagcttttggggtgtagcaaggctttctcccttttgggatgtagcaagactttcttccggttgagccaacgtctcctgattttgggccctcagagcttggccctcattgaaactcagagtggattgttgacttgaccatcggaactcagagtggattgttgacttgacggacatgattgttgcgcactggtagtttgctgctaattcttgtctggtagttgctagttcttgtccgtcggaagagtgatttttatcataccaaccaattggcccaatgtagccagctacaactatgttttgatgtatattgcttgattggttccttgatgtgctgccttggatatcagtgctccgaaaacggcatgatcccaaggaactagtgtcctgagcagggtttcacaaaccgccgcggccggggttaccgtgccctggcggtaagcacagttaccgcggtaactgtgaaaaaccgtacgaaaccatgcaaaatatattaaaaattcaaattatttttaaaatttatttaaatttaaggaggttaccgtggtttttctattaccataccccgcggtaaggccggtaaccgcggtaaccgcgcggttacagatggtaagtcaaaccctggtcctgagtggctgctg

SEQ ID NO: 23372 - DNA, 3642 bp, Oryza sativa
tatgcgttcagtaagtcatttaaaatatttacagaagatgcctgtcataaatagttatggaaaaacaatactgcgaaaaagtcaaatgagtataactatcgttaatttctgtctaatcaccatcttgcagtaactttgtgtcagtcaacccgtaaggttacaggtcctaatctgtccaaacagacgagcttgagatataagcattaattttcagctggcttgcaaaatcgtgatgttcctttggtcgatgtaaattaaccttttctgtttcagtaaaaaaaaaaatcaccgtttatagcaaactgagccgtgctaattactgagttaagatataaatgtttgtttttagttcttcgatgatcagactagctacagtatcaccaagtagcataaaaacaaacatcagcacacccatatcttcgataatcagactacactatcaccaaattataatactagtataagaacaaacgtcacacccatatcagaagtgacgcgtataggaacacttggaaaagaacttgtttgataaatcgagggaagagaattaagagtttagatgagagaattggtgagattaatatgagaatttgattcttaattttattattttgtttggtagagatgatgcgaacaaattgagatagagacgggattttaagtgaaaatatatggttaagattttcttaggaaacttaaagaagtaattaatttcgtttcaactctcaccccctaccttactactattaaagagtatggagttcctttcttaattcttcatccttattctactataacttgtagctcctcaaactaaatagaataaccatcattccatactctcaatcccttctaaaaactaaaacttccgcaaccaaatggagcattgcatttaaacaaatagatgaaaatgagtgcatacgagaaactaattaagcacgaacagaagtcacatttcatgcatccaacacaaaaaaggtattactgagtcaggataaacatagatctcctagtcactcatataatctcaaacctctagaccagttatcctaatcaatcacttgaagtttctggtactcgtccccagcaattgcatcaagcatctcatcttccggctccaccaccccattgttctcaagaaacaatctcatcaactcatccgagtatccactaagtgtcatgactccatccttagttgcggttaagcctgcagagcgtggccccttaaggttccacagtacgatctgaggtaccacgtcctgaaagcctaccctcttgaattcttcgcacaccctccgatattcttcatgccacggacgcgacgacaatggattaaaatcttcatgttcaatcagctcaaccggacgcactgatgccttctcaaaaaacttgtctgtgaatatgaatatggtcttcaccatattgtccggggtaacaccactcgttactgcccttgtaattatcccctcaaacaccttctttaggttaaacctctcttcgcaaggcatctggcgaataaaattcaacttttcccgatagctgccaacaggaagcacaagagggaaatagtttgaagcgaaggcatgcaccgagttcgtccatggaggcgaactgagttcagagattaagaatccaagccccacacagatcttcaacaacttctggccttcacttttgaccagcccccccttgttgacgtcgcagaccgccatacaattgcacagagatcccttcccacggagatgatcgaccaaagtgcgccactgctgagcagcatcctcccttcgtttgatgttgctggcatgcgatgccaggccaagcgaggtaatgatgtcttgcagaaggggtggctggggcgccgccttctttgccttgtgcttggcggcctcgcggctatctttgtggtctttgagaaacgccgtgaagcgcccttcatcgtgcttcttgaacaagtgctcgtaaatcctcatggcctctgaggccacgcgctcgtaaggcagatcagaccattggtttttggacatataaatctcgggcagctccaggtccttacgcagcggcacgagaacctcgcggcggagacggcggcgcacaaggaagatgtaatgcttctctttcatgttggcgtagctagcgtctgattcgcgtggaaagagaccgcgagcgatggcctcacataacaatgtggattggtcgaaggacgagtctggtgagggacaacatttggcggtgagcccgatcttggacagcttgccggacttgtggtgctcgagatcggagcggaggttttgtccacaaagaaactggtgatggagttgaagaggagacgatagttgtcatcttcatggtatattttcatggccaacttggcgaggcgggccgccttgagcaccttcttgctggggctgcccttcaccggcgcctcccccacgacatcctctgtctccaggttgacggcgtcggcgagcaagtggtcgggctggggctggggctggggctggggctggacctggaccgcatcggtagacgccgcaggcgtagggtcgtcgtcgtcgtcgcgggcgcgcttccggccgctcagtctggcgaggtcgccccctcaggccttggacttggccttagcgaccttgcgtgcatcagcgccgtggatgatgcggtagagaagctcggggaagtccttgatgtagccgaactcggcgaacgcggagaggttgccggcgagcgtgcgtgggtggtattggtgcatccagagcgcggcggtgtagaatccctccctgtcgcccttgccgttgtcgcgcacgccgcggaggttgaagacgagcttgagcgcggtgagggcatcgtgctcccaggcggcggcgaggaggtcgcggaggtgctggggcggcgtgtccctgtcgacgagggcgaagaaactaaggcaggggttgccaaaggcgccactttgcaagtgctcgacgacctccgcgcctgcgacatgtcccgcggtggaggtggagcccgcttcggctgacgacgacgcattcccgacggggaggcccgcgacgggagggccaaggattaggtggtccccggcggcggaggacatagcgcgcagcggcgaggtggaggagggttttgggggtttcggcttgctctctccactctccatcacccgtgctctccaggaaagggaaggggtttccttgtccttggtttttctccgcctgcctgggtccgggttttggttttggttttggttttggggtttcggcttggtctctccgctctctctcccactctccacccccgtctccaggaaggaaacattgggttgggcgaggtgccaaagctacgtgtcactgttttactcgttgcagctggcctccatgccctgtccccatggaaacagtgaacccgcatcttctgacctgatatgtgtgtgttgattcggtccgttgcctattggtctgctctgtactctactctgcacagtgacgttgcagcctgcctggtccatggtgcaccgagcgtatatgctgctactagtcaaatttaaacccaaaaggcatctatattccattttgaaatcaaggcttgaacggagtagttcatatttaaacccaaaaggtatctacattttgggtgtgtttagttcacgct

SEQ ID NO: 23373 - DNA, 8493 bp, Oryza sativa
aacttttttgttttccattagcacgttttcgaaactgctaaacagtgtattcctatataagaactgttatttcttcgaaagatcaaataaacttacaaaagtaagtttataatggttttgtcttgttctctgtgtcacgaaattgtcattgccaaactctaaaacgaactcaacaacataaatgtattgcccggaatagcccgtatgtatcctttcgccacctacataatcttaaagagatcttctggaatgctttaaattaattagaacccttgatcaataatgatctaacggacagagagagaaggtactagaaaaaaggtattaaaggagtgggccaggtacgaaaggtgaaaggagtaattgattttcattaaattatttttcggtaaatggcaaaagcggtggacctcgtttccatgatcgccatggcggatggcgcgggaggaggtgttctgattagggccgcgtcaattgatttgagatctccggtgatcgatctggtcaatctatctgcaggattggattgttcgcttgatcgcttcatcactagttggtcagttggtgtcgtttttctttcgtatcctgtagctgtgatctcggctgcctgacagcctgaggcccttgtgcttctgaaacttctgattaatttgatgatccgaacctgagatgagattgactgccttgctgttagttcgatcattcaagatgttcgatcgattttgattgtctcatcaatgtgcatgatcgacctgctcgagtacccattaccctttgccttcctggtgaatggatttgtgcagtgtaaaaaattttgttcctaaattaccctttgaagattaacggtggataacacttcattaagaggtacctcaggtaccttccaagcactgtaaaagacctcttaattaaaagggtatacagcgagcggcatactcccggtgcaaataatactggccaattccggccaaattccgcttggtattgaccataatgaccagatttgacgtaatatttgttcatgtgtaatgtaagtgatatttatgtagaatttgctctagttgattggtcggggaataagccaaatgacatatttataaacaaaaataatttataaataaaaattttatatgcatgttcttaacgatcaaaaactaaaggctgaaaaataaacttcgataaaataaacccagaatgaactctaaatttaaggttgaaattttattatatctataaagtaatagaaaaaggagcctccacgttcgctctcacgacctagaaattctcacattaatccaaaaaataagaaaaaagaaaaatagaactagattaggattagttaaaaactgaagaaagaaaaaaaaggcatattatgaaactcgaatcggacaatctgtccaaaacaaaaaaaaaaggaaaacctaatctttctttttccttttagaaaaaaatcacgttttatgtgtgcaatgtccgattggacaatgaagaaaaaaattacctaagctggctacagtaaccgtgtacagcacaaatcacaagcgtgcatgtatgtgacaggtactatccaatattggctcactgtttatctctattctctccgttgcaacaaatcgaatctctgatgacgggttcagatgtgcagactcctgttgtagtggaaccgtatcctctgacattacacaataatgtcatggtgtgacattctttcaaaaatccacaccatccattctaaatcaacagtcatagattatttggcatgcaattaatcaaactaattagtggattgtgtagttataaattgtccctagatcaaatattgcattttcaagagacaaacatcgttgttgactggtggaagaatccgcaagttactagcacatgatgataattaggtatctccgtcagaacggcgcaattctgaatatacaagccgatgggttaatgtttaatgaagatgaggatactgctttagtgctaacaaaaaaaaattccttcccacctattaagtacacacctacataatctgttaattagtttgattagttagatagcaattaatatgtggccattgatttagaatggatggagcggattaaggaatgtcacactgtgacattactatataatgtcagaggatacggttcccctgttgtatttatccatatatctatattatcttaatgtaataggaaaaagggccaccatgttagctcccacttcctagaaactcccataatataatccataataattagagaaaaaaagagtccaaacagaaccacgtggtcaacaattcaatacatctaaaattcagaataaaaaaataaataaaaattagagaagagtctacgtagatgtacaatttagaaatatccgaaactcggattaaaatttaaaaataattaatattgagataaaagtacctttagaaatacaatttaggcaaaaaatagataatattaagagaataagtacctaaaatttggagagagaaaataaatattatgaaaaaaattgttcatgtatgagtattatataaaaatagtttgaagttggattagaactaaataatattctttccgtcccaaaatatatcaacttctagcctctataatttgtctcaaaataatataggtataaatataatttataaatacctataattaagattcaaaaaatattatagaaaatggatttttttaaaaaaaatagtaattgagagagtcattaagaatacaatttttagaaaagaaaaaaaatgagagttcaagtgaaaagtagaaaatacaattcaaactatgtgaaattcataagtaaaactaaataaaactaaaaaagagtccacatataaatacaggagcctccacgttcgctctcacagcctataaattctcatattactcggagaaaagaaaaaaatatagtctatctataaatacaatttgaaaaatagctgaaattcaggattaaaaaataagggatattggaagaggggactagagtccatatagttatacaatttagagataattgaaatttggaatgaaaaaaagttaaatatagagttaaagtccatatggaatacaataaagaaataactaaaacagagttagaactaaaaaaataagaaaattaaaagtagactttatagtccatatagaaatacaatttagaattacaaaaaatcaaaactaaaaataaacaagattggcagaagagactagggtccatataggcataaaaactagaaataataaaaaatcagaataaataaaaaaattagaaaattaaaagtagagattagagtccatatagaaatacaataaagaaataactaaaattcgaagttaaagataaaaaatattagaagaagagtctagagtctaaataggaatacaatttcgtggaattcaatttttttaagaaaagaatactaaaagaagagtcaaaagtccatatacaaatttagaactaactgaaagtcaaaaattaaaaaaaataatagtatatcttagagttcatatagaaatacaattaaaaaagaacgaaaattcaagataaaaaaagattgagagaagagtctagactctagagcacctattggaatacaatttagaaataattgaaggtcgtaattaaaaactaggagtattgaaagaagagtatagtgtccatacatgaatacaatttagaaataaccgaaatttgaaatttaaaaatgaggaatatggaaagaatagtttagaatcaatataaaaataattgtaattcgggatttgaaaataaagaatatggaaataacataactttcaaattaaaaaaaaggaatataggagaactttgaaactgaaaaaaaaaagaaatattggaagaggagtctagactactctagagtctatataggaatataatttagaaatactccctccaacctccatcccataatataaggcgtccacgcattttaacattccaccttcaaaacattttgaccaatatttagtacaatataaattgaattttacttgctaaaaattatatcattggattaacatttggatttactttcaaatggttataattttgttactacagaccttatagtatatgagaaattataagataaaaaatagttttagagaccgtgtcaagtttgatcatgccttatattatggtatagagggagtaactaaaataaggaattaaaaaataattataactatcacatatatacaatacaacatgaatactacacattggttagtttggtcaagttcatatagaatttaaaaattatgttgccatttttaatatattttaataataaaatgtgaaaatagatatgttaataagtgaaaaaatatataacggtactagccgtgcaatctgcgcgggccaccatactagtttaaattatgacagataagcataaatataagcgaaaatatgaggatgcgaagtgggagttaggtttagggtttgtatatggctaatgggccaagagaaaggggcacaagaatgaagagatgggctaaaattagctaatacaaaagtatcgggtcaggcatgggttatccgtgaaaaataataatatacgactattgcccgctatgttcttagatttcagacggacgtgtccgcgggtaaaatattacacccatacccagtgagcggaggcagcggccgggcaccacgggcaattgctcgggctccatgcgtacaacaacactgctccaatgcatatgcagcatattactcgttaatcatatacttaatcactttgtctcgtaggttataatggagattaatcagatgaataaacagaaaacgaggcagcaaggaccaaaccatcgaactgtagctaatccagttttaaattaaaggacgtgttttagataaacataatagttgtggggggttaaaatggactttatcgtttacaaatgatctgaatcaaactcgatgttaaaacgagggaccttattgcacataagaaccattttgtccgctgagccggggcaggtcgacctctccgtccccttcacccgcgggttcccgcgccgatctccatcatcgggagcggcggcgccgacggcgtccaccgcatactctcgcctctgaatctttgcgcccaagtcgatctacccgttccctcggcctcgactcccatctcctgcgagttcgtcgccgcctccgccgatctccatcaggcgagcagcggtgccgtcgtcgtgctgcttccgcctccgccctccggtgagcacacccgtaccgacgcacatcctatttctttctcatccctcgctttcgttgtaccgcaccttttctttttgccttatcttctcatcatttggacgctaggtttaggttgccccctcccccaactgaacccccatggccccgcccttggctggtacaaatttcaatagttgagctaagaaaatatttggagacacctatcaacattatcgttgtctatgcccgatacatctacggatctaccccttgtgaattggaggtctgaaaaagatattgcaaggaaacattgtgcttaattctaatgacattatggattttaaaatttgtatattttctggtaactgttttgagtcctgtccaacaaactcattgagtgaagagtatttactcttttatacttttgtaaagttgattttggatcttacaggaaagtcatcatcattgacataaaacctatatttgtgaccttttaattagtaaatccgtgttagttttatggtgctgcttttctgttctgatccacattttgcacctttttttcttttaaaaaaacttatgcttcagtgctgagaagatgcggagcggtcgttatgatctcagaagtaacttgaagagggatgaaaaaactgattttgtcatgacgtattcaaagaagcatagaataaaggaggacatagtttgcaatgaaggagagatagctgagtccttggtttcaggtttgctggtccttcctcttttctgcatgtctcttatatctcttgctgagcattcacggttgtgttgtatgtaactaggtgacttgccctgcgaatcgaatcaaggtgtcttctggagtgagctcagtggagaagttgcatctaatctgtccaaaagtgttgtttcacttgccctgcacgatggtgattatatgtgctgttatacccttcttacttttccaggcatatatataaacaccgctaattatgaatgatttaaatcacaatcttatgtaggaaacacaatgttatttgtatgctcgggcatagctgtacaccgtaatggacatgttataaaattgctgacctcagcaagcttgcttaaagcttttaatgacgcaagaaaagatcatgataacttgaaggttggtgctgctaatcatcctttactattttttcttcttacataaggtagttgactggttgtgatcattgcttactcttcacctgattcttcattataggttgaagtgcaccatgaagacactgttgtcatagggtttttgagagaatataatttagatcacaacatggctgctgtcattgtggagaacttacctgatcttcgtcctgtgcctttcaacaatgttcagaaatttgtaccgcatagcaaggtagtagctctaggccgtgatatctctggcaaattaatgaccacaagtggggtattgattggtgaatcatacaatggatatcttatgtcgtccacttgtaaattctctgaggtacaccttttcttttactactgtgaggtacacgcttgcattacaacaaaaatatttaatcccttttgttttatacctctgaggcaataagatgatgatttttcctacatatcttcttgttccatttcactttattttgtccaatgcaactagtattgcctgtaatcctgttctgtttggtgccaggtttatgaaggtgggccactttttgattttgatggggactttcttggcatgaacctttccttcactaccgagggaaccgtatttgtgccaggggatagagttcttgaccagcttgtgaattgtatactcgatcatgaggtcagatttgctgcgcggttagaggctttgaaggaagtctggtatgttttgcatattttgaatgggacacatatcctgctctctccctgccatacgtgatttaatgaatttagctgttctttatgccaaacagtttatgggactaggttttgctataatctggatagttgggtgttgttccttttgtaggttttctgacattgtagttcctctgcagttttcaatgtgttatgttcccataatgcaacatgattctctcccacctataccaagatgtttctctgtcctattggcacataacactacctccctgtactagattagtcacatgtttcaatgtttaatgatatttgtctaattttattagagaaaggaacattttgtccagatttagtggtcacactgctatgaattatgatgcctctagacactggaggttttatataacatttgttcaattctcttgctttcttgaaatatttatatccataatactccaggtcctcttttatctatattgtttgttcctacaattatattcatgctggtgttgcatataaattgtgctggacctggtttgataaattttacttttggctactcatgttgatatttttctgcagggttggagaaagtcccagcggtgagatgcctagctctcatcaaggtgagcacagtgatactttaggcttctagtattttggtatatgcaattcatcgttatttctaatattctgtatttgtacataaatggtgtaaattttaggttttacacttacactcttgtgataactatcgatgggcttagctttttacggttgtcatggagttagcgacaatcagttaatactgttaccctatgctcatgggtattgttaagcagaatcaatatattgtggtttgcaactcgggttatcatcatatattgatcgtctgtacttatattatgtgtggaattttagttgaatcttatcatatactatattagtgttaatcactcactattgatattgatacgccagtacatagagatgttcttaacaaggatcgatacggggatctagaatccttgggctatcctgagcccccaaaatcgaaaggtaagtaaaaccctgtaaatatcgtgacagtttcatgcattgtgtttttgtacttactgtaccacttacactattttacttggtatgttcaactagatggcatgattttggcttatacttttgaagagccttttggtgacatatttggtaaaggtgtctggagtgaactaagtgaagatgttgcctctagcatatgcgaaaatactgtcgcacttgcttcattcaacggtgatttttcagtattgtgctgtttacggtttcatatttgtactctaatcataactaactaatgatcaaaattatgatatccaggagataaacgaactt

SEQ ID NO: 23374 - DNA, 9877 bp, Oryza sativa
acacagttgaagtaaatagttgcatcagaatatgagttaactatgattatttgattggcattaccaattataacttctccatttcacctggataggctggcattggagggcctcttctttgtttcgatggaacctttgttggcatgaacttctacgatgagggtgtagaaggcaccgcattcctatcatggtgtgagattcgcgagatcctgaagtattttaagacaaaagggtatgtctagatctttttggttattcaaatgctttgatgatgtgctccttccagtcacaaaatagtgatgttcacatgtagttaaaccaattgactttgaccatagtaattatttcaaatgttaagctttgaatgtataaaatgatacagtaaaatatcataatattacactagattaacattttggtgacttttttgaagttaattttttatgttctgccatgttgactttgaaaagccaaaaacttgatcctttagtaaacagaggggatattgtacaaattcatgttttgaatgtataaaatgatgcagtaaattatcataatattacactagattaacattttggtgacttttgtgaagttaattttttaagttctgccacgttggctttgaaaagccaaaaacttgatccaagtaaacagaggggatattgtaaattatcatgtttcaaggacgtgctcctgtaatacttgtgagaacaattaattttgaattgttgttgaagcaggttcagtcaaatcataattttccattgaattctttgttgtgtttgatagggctgttgctgaacatagccatggtaatccatctgatgtgcttgattggaagattgctggagatgatagtgttcaccctgataggtattatgatgcattacactactatcacgttaaatattcgtacaaatttgtggataacattacattgtgggcaaattactgaatggcagatggccggttcctatgccgtattggactcttcctgaggatctggtccaacgtaaacttgcagctaaaataagaagacaagaggccatcctgtgttgaattgatccccatatcactatcttgtgaacctgtttaacgtcgagagacctagtttctaactttatcacaatgattattgtctagttagtgttgcatgtattatagtgcttggtttcataaattattactaatgtttctgagtagtgtttaagtgctctgccttttgagcccgactgcccgagggccatccgaccagtgatggacgtccgagcgtgcactgtgatgggccatatagcctatggtcttccatgcccttcttgtgctacaaatatgtaatcatcctttgtactcccttcatcacaagagttgcacgtacttatttcgtttcagttttttctcaagagttttacgtattctgcatgtgtctcgaaagactaatcgcgcgggccttcgttttgcggctgaattgaattgtccacgcgagcggcccttggttccttttaattaaaattgatgaatctgcggctgaattgaattgttcacgccaacggcccttcgttccatttaattaaaattgatggattcatcaacgttttcctcaaaggccaccctcgccgctgctgcgccaatagcaagatggataatgggttagtccgctatgtcgtcagagatggcaaggatgaagcagcggtcgctgagtttgatagcgagcacggcggcgccgacgaagcaatgcaagaatctgactctatctcgtagtagtacgtgattgattccctagccggcgatactgaagtgatgccagcagaatcccagcagggggaccgtggacggtgagctcgtagcccgtggaaggcatcatcgtgggaacgacactgtcgtcgatgcgctgcatgccgatggtgacatgcatgaagctatccatgcacttgtgcacctctcatcgatcaatgagtggatattccagatcaatgagttcatgatgcttgggcagccattgcatttggattgaggagggattggaggcaaagaatacgaagactgaagggctgattgaggagcaaagaactgattgagaagcaaacaattgagtggcgatctggcgcccgacccgcctgctcccgcgtggtcgccgccgctgccgcatcgcaggtcgccggccaccggccgccgaacctcctcctctcccgtctcaccctgtcggccggcctgcccacccagactagaagagaagtgagagagaagaagggaaaagagagacatgacgtggcatcctgatacatggggcccatatagacccacgctaactcagcagtcacgccagataaaaccggtatcaagtgaacagtttttcaagttgagagacgtggttttacggttggagacgattttgcaactcgatgacaacttgagggaccttgggtatactttttcctccattcttcccccaagctgcaagggttaccccatattcaggcccaattactggggcaaaaagcagccgctagggcaagggcctactactacagcgttgcgccgtccgcctgcgtccttgcttgatgcttcgcacgcgcgtgacggcgccgccgttcctcgcctctctcctctctcctctctccgccactccgcctctcccccatcccatcgtccacccggcccgagctgcggaggcgcagacctccgccgctgcgcccgcatcggcacagctacagaccaacgcggccgccggcgctgggagctcgggacgcgaggacagcggtacagccggacccccggctgactgacgcagtgccgcctgcctctgcccgtcgcggcgtcgccgttagcctcttctcttgctctctgccctctgcgctacggctgccggctcgtgtgactcagtggctgtgaagtccttcccagcgggcgagacggcgacccggctcctgcaggttatacctctagcagtttagctcatagcttcattattcccatttagtcattgtgtttgaactttctgccaattgccactaccatttgctaatctgtgattagtgaatgggatgctgacttgctgccgctgtagtttgtaggattggtaaaacatgaagagaaatggggatattgctgttgaactatctatacttctatactatgagctggtggttctgccaaccaccaccaccaccaccactgaaatatgggccatggtgttagtataagtttctgagtgcttggtcagcttttttctgtacttctgtagaatagttgtgtagtctttactctctagctggtatttgaagtactatataaactaaagttctttaattttatattgatttaccttttgtcatcttgattcaactaaagaaaacccacaaactttttaggttttaattgtaatttaaaatgacatagacagcacaattcattgaagagtacatattttgtaatcatatcaaaggacatattgttagcacaattggagtcatctatctatactgaaacaaactatgccatttttctttctgtttgttaatacaaagaagctaatatttgttgcaacacggatgtaatttgtttgttgctgttttgaatctggtgtaacgcacaggtatttggctagtctatatttattatttgtaccttttgaacttgcttgtttcattagtcgattatttgttttataagatgttatttgctatatttgtatctctttttaccaaatttatacttgcaatgttcaaaaatttttggcatgtaatgtgaaattgtgaagtagggctagtcaaccataaattcctggctatgccagtctccgtccggttaccagaggagctcaatccagttgcttgcagcttgtatcaggcggtgagcagctcactcctgtagatccgcttgcttgcagcttggatcgggctgggagaagcttattttgggacaaacggaaggaggcaaagatgaactttttatggaacggagggagtagggtggaacagaaaaaaaaaaaagaaaacctttgctttgctttggcaaggaagttaaaccgcatgggtccttactccttaaatcctagctttgctagctctgctccccttctcatttttcttctcttcctctggatcaaatggagcacaaactttgtttaatgcacacttgcaaaaattgagcaccgcaccaacactgccggatgttagcaccctaagcagcagcccacaggttgtcttgctgggaggagctcgctctagtggtggcgggctcatctgggtagcggggtcttcgatttgggtggcgcgagagtacccagccattgtggttgttgtccagagagcgagggagggtgtacggtaggaggtgtacaaagtgagatggaaatggatccccgagtaacatagagaagaggccaagaagggatccaatcacatctctctcgcaatccaagattgggaattccgaccaacataactctcaacgacccgctgcagtgctgcgatttttgcatcccaacctccatatagagggtcaaacaacgagatctctttggttaagacattgaatattctatcattgtgctgttttttttttcttttgctatttctactgttgcagcagctctctctctctctctctcgttgcagtactatgctgctaattgctttctttttattattttgtttcaaaaggttgtcttattgtataaatctataaatgtttgctcctagttgtagcgcctctttgatttttcatatttcgtttttatttaaaatgaacatcactataggttcatgattgggatttattattttgcagttgagttgccatggatattgagcgacaagttcaagagacatttagtaaccactataaaagcgtggtgctaatcagaaggggatcagatggcatcggcactggctttattattggtaaaacaaggaaaagttatgttgcgatgacatgctaccatgtcatctcaggtaacccctctggtgctttaaaggtcagactacctagggacacaaaggattatgttgctgagctgctatatgagcatcagggttatgatcttgcaattattaaagttaatggagtgagtggagaatgcccaattcttcaatttggtgatttagaaggtgtggcgcatagggccaatgtcgttcagcttggatatatccttgggtcacagtttgctttaaacttggacccctcagtatctcctggatcagtcatgtgagttattttcttttgttatttttttgttagcttgtctagtttatactaacttatatagtagccacattatttttttttgttatttttttgttagcttgtctagtttatactaacttatatagtagccacattaatatcttttatttgttttaaagaagaccggcaaaccaaaatggaatgatgggcagccaggatgttgtctacagtgccgctgcaagacatggcgcctcaggatctgcagtgatgtttgatgataaagttattggagtactatattcaatgtctacaaatagccaagttgcgtatgctcgatcaagtactactgttcacatggccttgaagaattggttgcatccaaatgtgagttgtttctgctcttttttaaggtagtcacttaactgttgcttgtcacctaattatattttatgacttcttttttcaggatgctgcaataaccactgagaagatgatagaacttgtagtaaaacctctaaatgattcagagttagacgattgattggactggctatggattgcaagggcatgtggactcaatgggtgtagactctattaatgtaatcgcccatggttgtttgttatttttattgatgtcctctttccatgggaatatgttgtctatgtaatttttaatgtttgaaattatcaatagttagctagctattagatcttgttcttttcagctgatggacagcttacggatagttattgcatgcttttaaagctagaattcctttcaaaaaaaaatgttatcgttgacaactttttctaaattgtgggacagtgatagtattagttaaacccagtctctatagtaatttttggctccgttgcccgtgctttataaacaggaaggctaatacatttacaagtgaaatactctatttgtttttgtttggcattgattagtttaaaattgaactaaccaatgtcatacattgtggaatggggatagtattagttaagccccaagttagctctagtcttcaaatttttggctccgtcaattatgcccgtgctttatgaacaggaagggtaatgcatttataagtgagttgctctggtggtaatctatctactcagctgacactcttctcgtagttgacactattagtatggatggttaaccgcgtgcactaatgtagaattgtagattgtagaatccaaggcaaatcttttgtttgctgagaatttctgaagagtttaagcgtcggatgtgaatgatgtagctctcccctctgtgataagagttgccaatatatgtcaggccaccactattttgccggtcatgcattgccaaatctaagggcactcacagtgaagaccctcatttgaggagcctcaggacgtttccgaggacgtgacacatcagaagagttgcacccttttcgattttttttcttttttttggggggtgggaaggggaggaggtattatacccggtttttattgttgagggagctgactacgaaaattaatttgtaaataaaacttttatatatgtgttcttagcgatctaaaagcaaatgctgaaaaataaagttcaatgaaaaatcctcaaaatcaaatccaaatttaaggttgaaaattcaaattttgactgataagcataagtataagcgaaaagatggggcttaataaggtgcaacagattagggaggcaaaaataaagttattcctatttgagggagttagggtagacttttgccatgtcaaaatgtcaatgaagcacatcaacacgatcaggtcacacaagcctgaatcgtcgtcgggtaaaaaacggcccgctcgactcatgtaatacggcaagagtgtaaaggtagacgcccctcagccacggagacaccaaccctaaagtgtcttgcggtctcgccccgccgccatctgtgtagtcgccacctccccaccgtccctctcttccaagttcttccaagtttcagttcaccggtggagagatagcttcggcggaagacagggaaggaggtcaatctgccgcgtaagttgtgctcttcactcatcacttcgttaattttcttttctcagcttgggtgtttgatcttgtgatggtgttttgctctaattttgcccccaaactgcatttcaatgaagaaccgtagatctgtgtgtagcaactatatttggccattgactttcctcaaaactccattccgcgaccaacaggcacctgccggatgcggcgagctgcggtgcgccttgtagtgttctttgttcaagggctggggttgggacttgggactccgcgagctcaaagagagcaccttatcttctgttttgtttgtataggactaatatataatattgcttttgggataaattgctattgtgttgttagtttatgagataattagttgatatgattttctgttttgtataggactaatggagaatatggagaatgaatttcgtagggtcttcaacatgtctctccaagtgttgtgttagtggaacaagtcggacggatcgactattactgtattggttcgattattttcagtgataaaaaaaaactttcatactcacccagtcctcaattacttcatctgctgcgaatctgtctgtccgtttctccgatggttttaaacagtcagcatccctcattttaaaacaagatgtacaagaaagtgcaagcggacaatgtgaattatgcatcttgatgactgattatcattccaattccaagacggtggagttctttgaaggtgatgttgatcattcatatgcggttgctatcgcccctgagtcaaaatattccgtacacaacatgcccggttttattatacataggtcacttgaagcagcaagcgatagctctgaaagtgtgtacaaaggttctgaggattatttcactttcgcatgccgatatggagacacaagtccgaaccttgtgagcagattaatcacaggtccagtttttaatctgaatgggcaagttttagggatcgttgttgatgatattgagtataaattctggcccaagaagcccaggaaggaagatggtagtcaagagattattcatgaagatcttttctatcgcgctggatatttcttaaaggttgctatgcgtgttaacaaccttcagcaagacttgaggtcgatggtaaaagacaatgactggcagaatggtctgaagaaaatagctactgaaagaagagtgtaacagcaaaaaggagcatgattcctgagatgaacagtaatagtttttggtcgcgatccctaaactgtttctgctgtagtttagttgtctgctaagtactttggcttgaatcagtcatatttaatcgtactgtaagactttatttgtcgcaaagtgttggctctgcagactttatatgttttcattcgtaccgatcggttgtaattaatttatcagacttgaggtcttttgtttggaaaaagttcatttttgtcttaattatcaccaaattcaaatatcgagcgatcttcagatatgcttattattagatttgttttatcgtatattttgaataggaaatattggttcaaactgtttgtgattttgctatatgatttaaaagtttttagctgtcaaagagaagattaaactaccagtattgtttgctaccatgtgcttgcatggtcattaccggtaacgtaagagcaagtttaatagtatagtccactattagctccaaaacatttataattaatgtaatagccaatttatataatagttgtttactatactataattatctggtcccacttgtcatacacacattatatcttggagttcgtgccgtagctggctacagatctgtagcccgctgctcttctctctcatccgttatctctgtagaatatgtttatagctggcttatagcctgctattgtacctgctctaatgaggcaaatacacatgatgtgtggcccactgtcagtctgtcattagctgttctaatctaatactatatgtcttccgacatatgatcctcgtctcctcgatcctcttttttttctagtccctcctaattcgagctcaacacagataaacattcagattgctacttgttgcacttgcacctgatcgttgcaacagctggtgagaaaggaaaaggattggattatacatcaccatcggcatctagttaaaaaataacaatcaacaagtcattagtggattacattcacgtttgcacaatttactccctgaatttaaattattctccactggacattttcaaatccagactatcaacattagccaaattaagttgtgatccctaatttgctccaaaaatttgtgaaaatagaataagtccaattatataagatgtaaataaataagtagagcatgctcatctttcctggaaaataaagaacccatgcaatacctgcacatgtaattcaaaatggactccgatgattcccatgcaacaagaagctgatcacacacatttcgtgcacgtttcattaaaaagggcaatcatttaaaactctcttactctatttggtcagcgttaccactactagaaaacgacttttagcgacattggccttttatttttccacacgggtatgatcctcgcagccaaatatctgcctacgaaaatgtaaaccgaggtggattttcgtcatccgcctgtgaaaatcattttttctaggcgga

SEQ ID NO: 23375 - DNA, 5441 bp, Oryza sativa
tagaagtgatacaaccctaccagtctaccaccacagccgtctaccgcactcctccagtccccaccgcgctgccgccgcctccttcagcccccaccgccgccgccgcctcctccagcccccaccgccccgctccctcttccagcctccaccgcaccgccgccgccgcctccgatctccgccgcgccaccgccgccgtcctccaccgcgccgcggccaacgcctccgccctccaccgcgccgacgatgcctccgtcctccaccgcgccggcgacacctctagcaaattttttcgttccaaactttctcctcaaaaattttggtcagaccgagaccgagaccgagaccgaatttgccggtcctgagtttttttggatgaaattcggtcctgagtttgcaaagaccgaactgatcgaaaaaccgaagaccgagaccgaatttttcggtctgaccaaatgcccacccctaatggccacactagacgtgccagtgccccggggggggggaggggatccatccttctctttcaccctttccctctccaacttgcccgcgtggatggatctggagcgcatcgaaggttaagaccttactctgatggccggccaacggcacggtggctgcgcattaagggagattagctggtgatggatgctatatttgacgggcactcgttgacgcgggagagtaggaaagcaatgggtgaaggcctagcctctgggccggcaatggcaatgcttgtgagcgtcgctttctcccttcgggtgttgttacactttactccttctccattggtttctttaggtgcgaagcatctaggcccccatcattgattttggtaattaatgacaagcgctaattgtggactaactattttcttgagttatacattttgagttaggaccacgtgatatgtatgcatggatgatcaccggggactaaattcaatggtgcaaagcaaaaggaacaaagatggtaaaactagaggttttattttaagtgatcgatgagttgggcgatcaaaatttgctagttttattcatagctttgtcgtactataaagaggggtaatgacctaaacaaagagatgataaaaatgccacattagatcatttgcatttagacttggttcacaattaaaattgatttacttctctatctaatgccggtctgaccgagggcctaatgccgatctaactggcaggtgttggccggtctaaccgatgggaccttgccagtctgaccggctggcctagtaccggtggtcggcctctgggcgaaaaacccaagccccagagccacagccagtcggtctgatcggccgccctatggcggtttgaccggctcccgtgtgtctgtgcatttaatgcactgcaacggctagttttctagccgttgcaaagtagtccggtctgactggcgaccctatggcagcctgaccggcaatgcactgagttggggattatgacccacacggctagtttttgtgggtgggagtataaatactcccccaccaacagcaaggagctctcttggcacttgcttcacttgcatataccccttgtacactctctcacactctctagtgcttgtgttcatccatttagtgtgattgagggttgattagccaatagtgaagtgcatttgattcattgtagagctagtgtggcacttgatcatctccgagccaggtcattgcttgttactcttggagtttgccgcctcctagatggcttgtggaggtgttgcctggtgacctctccaaggagattgtggagaaggcccggcgccggttgtgagtggtttgaagttcaccaccttcggagtaaaggaagaactacccctagtaattaaggctcgggtagtccacttcgtgggtcggctcccaccttacccaccccttgacaaagggggcttgcggtggcttcgtggttttgagcggtgaagttgggctcgcctcaatgggaagtaggaaaccggcgagtttccgaacctcaggtgaaaaactccttctctcttgtctcatttgcttattctatttatatttgtgcaatttactttcatagagacatatttaaacccatatcaccctacgattgcaaaacttatattatgtgtgcaatttactttcacatatacatatttgaggccgtatcaccctaggattacaaaacataacttagtttcttagttaaccttgtatctcaccaagcctaacaacttaggttagttttgagtatgtgtcatttagttttaaatcgcctattcacccccaactaggcgacatcacgatcctacaaggtgaaaaccataacctggttttttagaacgggcaacgacggcactcttggcatcgccacctccttggaggcgttgtttagaagattcattcgtgttgtgtgcctgttaggcttttcagtagcaggatcaagcgcagacgcgtggtgtggttgtattttccttttccttactatagtctcccagtaatgtagacctttttttcttgttatatatcaatataaacgtcataatatcttgtaccgatttcaccgtacatgaatgtcgcggttgctgtttttgatggtcgttgagacagatagtttggtactatcagatttcagttccgtagctcctggatcatgatagcatcagtttcatcatcagttggtctgcgatttcatcgtaggctaataaatagtacttcttcttcttctgtaccctaatatatataagagatttcgatattttgcttacactgtttgactactcatcttatttaaaaaatttgtgcaaatataaaaagtaatttagataataaaataaataaaaaaataaaaaataattctaaattttttttaaataagacaaatgataaatagtgcaagcaaaatatcagaacctcttctatcaggagagggaggaagtatgtgacatgttctagccttttggaaaggagaatctactgtttgacctgagcatctgaacagtgcgagccccaaaactgaagtcaacctggtgaatcttgggaagacaaatgatgccttttgccatggaaaaacatttcaaaagtccccaagaccgaagcagaaatggagatgctactactgctatttgtctctttggcctatttttagagcgctcatgtctttctgcctcaccgctgcctctgcctccttccaaatgcttcgccccccgagctctcctcggcgtgcgcggcgcagcgccatccaccccgacaactcctcccaacccccaacctatccaaacacattttcttgcccgcccctgcagctccctccaccgcgccacccatccatcgccagccatgcacaccctcgctctgacgaccctgtcacgttgagctacgctcggaggaggacgccacgacggcgaccgggaagaagatgaacccgctccctcccccggccagccggctgtgggaggcgagcatccgcaagctcaagtactccaccatcctccgcggctccgtcgtcccctccggcgccgccttcgatggtgcggcggcggcggccaccggaggtgaccccgtcacgctcaccccaagcctctccgtcagctcctccacctccaacaccatctaccagtacgaagacggcgacgacgacatcgactccgtcctcgacgacgtcgacaccgacgacgacgacgtcgacgaggcgtccctcggcgagcccagccactccgaccagctgctgcccagcggagacttctaccagggcgacctgcgcggcgacctcccccacggcgccggcaagtatctctggacggacggcagcatgtacgaggggtcgtggcgcggcggccgcgcggccgggcgcggcaagttctcgtggtcgtcgggcgccatctacgagggcgacctcgccggcgggtacatgcacggccaaggaacctacatcggcgagctcggggacacgttcgccgggctgtgggcgaacaacctccggcacggccgcggcacgcaggcgtacgtcaacggcgacgtgtacgacggccactggcgcgacgggctgcaggatgggcacggccggtacatctggcgcggcggccacgagtacatcgggacgtggaaggccggcgagatgcacggccgcgggacggtgatatgggcggacggcgaccggtacgacggcgcgtgggaggacgccaagcccaaggggcagggcacgttccggtggtccgacggcgggatgtacatcggcctgtggtgccaggagtccggcgagacgcagggcaagggcgtgtactacccgccgtccggtggcccggcggtgccgttgccccgggaacccaaggaggtgatcacgaagctgctcgaggagctggagatgtccgaggggaagacggtgtcgctgctgccgtcgcagaaggtgctgacatggcccggggtggagcccgtgacgaagaagccggtgtggcggccgccggaggtcgccgctgaccaagggatgtggcggccgccggaggtcggagctgaccaagggaggaggtcgagcaggaggaacagcatgtcgtccgacattgacagcctggttgagggggaggacggcggcgaggagactcgcaacgacaggtcatgggtgcggacaccgtcgtgtatgcgcgcgcccacgctgccgaagccggggaagaagcagggggagaccatctccaagggccacaagaactacgaactgatgctcaacttgcagctgggtatcaggtgagatgatttgcttcatgtccactaatgttattacacatgttgactaattgacacttttaagatatggtaattaagaatttgcaatttgttgtctatgacatgtgagtccaatagcaagaatcacttgtaagaatgacaaatagttaattattctgtcattggtgttttctgaatgctgatgcattggtcttctaaattcgatgcattgacatttgctgttcatattatttggggatacagacatgctgtaggaaggcagtcagctcctgcttcattggatcttaaatcatcagcatttgatccgaaagagaaggtgtggacaagatttcctcctgaaggatcaaagcatactcctcctcaccagtcatgtgatttccggtggaaggactactgtccattggttttcaggtcagtatattaagatactgtaatatatggtcattcttttagatttataatatattgacgtgcaaagattttgagatactgtaatatatggtcattcttatagatttctaatatattgacgtgcaaagattttgagtgttcaaaaaaaaattgataagttttttagataaggaaggtaaattacatccccagcctctacatccaggatgcaatatgtcattaaatgtaccgttcaaaaaaatgtgtcattaaatgttccttctttattttgtcctacagagagtaacttcattctcttaactgttgctgg

SEQ ID NO: 23376 - DNA, 8081 bp, Oryza sativa
agtgggccaaatacaacgaccagaaggaagcgatgccgaaagctgcattccagtttggagtgaagatgcaggatggcaggaagacgaggaagcagaacaaggaccagaagctcacgaatgacctacacaagattaacaagatacttgcgaggaagaaaggtgacaaagatggaggggatgatggtgggcattatgatgatgatctacctagtggcaagaagcagcgcgcctgatgcaagccactaatagtttatcctgcgagaggtgtaaaaatgtatttgtactaggaattacagcgccatgaacaaacgacagttgtaatgttcagcgttttggccggtgcagaagggaataagaatggggagctggaacggtgaaaatatgtagtttgtccatttttataacagaacaatcggtaatttgctttgttctactatgaaaagagaaaacatcaacgaatgcccaattttctgacaatgtacgcgttaagtcatatcctttaaaatggaaaagtgatttcatccctcgaggggatatcccctcatttcgtgcatgccacctaagggtgtgtttagttcgcgaaaaaaaaaatttttgggtgtcacatcggacatttagccagatgtcggaaggggttttcggacacgaatgaaaaaactggttctaggactggtagccatcctccagggcctgcttacctgagcatctccgcgctggcttcgactccctggtgctcctagtctcttggcaactgtggaaggaacataaccatatgtggcttggtcatatgtggctttagctagtattgctgcttttgggaacttgtcaggagtgtagcgtggctcggcccattctcgttgtttggagtttgtgtttagccgccgtagttttctaagcttcagccttttattttgcattttctcccttcctctggcataagccggtctggctgattgtgttgtgtaactataattgttttcttctaatatattgacgtgcaatccttctgcacgttcgcgaaaaaagtatttcacatcaacctgttaactgaacatcttagtgtcagactcggatgaggaacagcgaggatacgatccgtatggtttcatccacaaaatgctcacactgtaatgcagaggcaattagcgcccaattatctttcatgctgcgagtttgcattccacatttggaaaaactttccagggttgctttgcctaaccaccctctgattaacactcacctagtgcctaattcttttgcccttcatgacaacctaaaccccagcttcagagttggcacaaacgagtcttctccctacacgtaccagaatgccatttcccagctagtatatgcacggtaatttggcacgtgcaacctctgcaatataatcatccgaattccatcacgtagatttctgatttatcacatattttcacacgtgcgaagcatgccggaattcattttctacgcacgtttttgatttttttttttcatttttaaatttatttttttaatatttacagaaatattatatcagcggaaagatttacaaaaatggaccttgccgccctccatttgggcggcaagctgacgtggcacacggcgtcatgacttgtgcgcattttacgctaagccccttgcagctctctgtaagggcggcaaggggctaaatgtgattttggccctgccaaaaaagcaattggctagttctttttgcatctgagccccttgttgcccttacgaattttgcacggtggccccttgccgcctagacagagggcggcaagggggccacgtgcaaaattcatagcttcccaaaacgactgtcatgtgtccatgtgccacgtcagcttgccgcgcaaatagagggcggtagggtctatttttgtaaatctttttgccgatataatatttctgtaaatattaaaaaaataaatttaaaaatgaaaaaatccacgttttccaggcttaaaatggccgtgtcgaattaggctcacatttcggtacggcccatttgtccattcggcccatgtccaacacgccccacggccctctaaaactcacgtgctaaaaatagcccaattcgaaaatttccccacggcgtcgtcgcctccgccggcgaggtgggagatgaatctctccgctaccttccgatcggcgaagatccctcgcgctcttcctcccaaatccggcgagcccgccgccgccgccttggcctcggcctcgtgcgcgcccgggaatccgtcggcggaggccgcgaaggggaaggcggcgttgggctggtgcgtctacctcatcgcctcctcccggatctcccgcacctacgtcggcgtcaccaccgatttccctcgccggtgattccccgaatccctttgattcactgtttctagagctgtttcagaagattctgtgggttatggtggctccgccagttagtgattgaaatactgcccccaatttatcgctattgttttgttaacactatgagatgtgatattaggcctgaaagttacatgattcggatgacaattggactgaaatccttgcgattttcatatatttagtacttttttaggacttgggaaaacaaatgaagctcaggttattgttcagtccctttagtgaagataattgaacatggattgattcctttcaaaaaaaaatgagcatggattaaaccttaatttgttctacttttagcaatgtatgttaaacatgcataatattttctactgaataagctgttgcctgctcttgtttctacctatcttcaatttatgacgctgtgatttacaagcagaactgtgttactcgttgggcataccaaagcttgtccttttattcgtgtataaaattgtagttgccttgaaatattctactcgtagttgtcttgctcaggcaggcttgtatacatgcttcaatatatggggtttttttttgtgtgttgatcatcggttcttgttggaatacatagcacttaacatggttagaacttagaaagtacaaagatgagaagtaaatttatactccctccatttcagattgtaagactttctagcattgcccatattcatatagaagttaatgaatatagacacatatatatgcctagattcattaacatctatacgaatgtggacaatgctagaaagtcttacattatgaaacaaagaaagtacatctttagtcgtaccacgttgaaatggtaatcgtgtgttgatgaaagtatttttattatttctagcctgagacaacataatggtgagttaaaaggtggtgccaaagcttcctctgctggaaggccatggaatctcgcatgccttattgaaggatttgtcaacagaagtgaaggttattgattgtaaccatcattttccaacagcttcagacttggttgagatgttactagaattgcgtatagccatatagtgctctagcttgtaagtgcaacttttcctttccagttttcacttgatttagggagtcatttcattttttctgaaattattttgtatcataggttggtacttttctgacatgttaccctaggaagctatgtttatttagccataccaaaacaatttgacaacatgactgtctgtactggtcacttcttttcttgttttgtttagtattatataattagtgtttcatcaaggtttctatgttcattgactctttggcataaagaaacatttagttattgttacctctttttctgcacagagaaacattaacattgtctatgtgctttagatactcaggtgccatctgcatcttttgcatcgaaatgaaatgaatgtttcccttttcaagtttgcactactacgtaagaattcctatttactgaattatttgtgtgcagcctgtgaatttgaatcaaaatggaagaacatctcccggaaaatggcacgcaaaaggagtgaacctagcatgacctcattgctgcagcatcgagatatggcattgagcagagtgaaaaacgatctggcctgtagccatctgaaaatcaaatggcactcaagttgaagttatttctctcatgttggtatgtacatgcatttaaaactatgcaaaaagtcacctgttactttgtaatttgtgagtgtgcttcagcataggcttttcaaattccatatttatgtttgaaaatcacttgtcttcaagctcaacactgttatctcgcagaatgatgaagctggttgttgtatttgtttatttaagattaagatatgaaacattgaaaattaagggtccggtgctttgcaaacattgtgtttctttacttggagactgcaccggtgtccaaaatgttatcatttatgatattgctatttcgatatatttttcttcaaaggttctccaaactacctggctaccccagaagcccagattgagtatcgtcaagcataaatgctgttatccttgtattgccacaaatatttgacgtatcagatacacacacagagcggaccgcgcgtgtcataaatatttgacgtatcagattctgtcaaacattattgacgaaatcttgtgttaacagtattaaagccatgcgttgatgggaaagattgaagccatgcgttgctacacgaaggtcaaatggccaaaccagaagaacctcaggtgataaaatatttaataaccagacaaactaaccaatcagcctgcgcgctctttaaccggattacatgattatgctctattctacataactaaagcagaattttcactgcagttaaatgtttttttcagcagtaccattttcagcaggcccgccattcgccagctcaaatggtctataaggcacgtcactcattggtcgaggaatcaatcgacctccaaaatcttctgggaagaactcaaaattgggaccaaagttgaacctgacttgacagtttggttggtcaggcagtgtatacattgacgcagctgggtagtaccgccctccaggaatgtccacaaaagcagtgccctggcatatcccattcttgaagtagcatatctcgctacctgcatttgcaaaatggattatttgatgaaaaaccagtgagaggttgaacagataaaacaatggatgctacaaagtaggaagtgtcatatagtgcaactttgcaaaacaatcattgttaggaccctgactttgtatgcgaaaaacaaacaagtaaccccttttctgtttaaacaaaaaagaccatgtaggcaagacagagagatctagtggaagatattaatgtgcacctattacaggatacctgcactgaatatctaatattgaaacttttcaattagtgcctttgtggcaactaaaatcttactgtagtgtctttcatattcaagtaggcataatataatgcaagataaggtggaatgttgactggataagtaaaaacacccaaggtaacctctttgatgtaggagggagaccttgagatcaggattagtacagtatcttatgttgtacttgtgatgtagacaaatcacagaacggaaaaatataagtatttatagttcagtataaatattatagaatgtatcgtcagatgaagatatagatactcttgaacaggacaatgaggtaaattttgttacatttcatggatatttcttgtctttgattgagtggcaaattaataagttatgcatattgtaaggctgctgcagaagcaaatcgttacattttcatgttgtgcttcctttgcttttctggtttacattctcaagatagcatcactcaagtaacataagctgcttcctttgctttcctggtgtacattttgacttatgaactgtatgttgcactcaccattaccatattatggcattatgcttctgcactaagcgcctccaataatacagatgaagatatgcaataactatatttcttggtacagaacactatgctttggaaatgatttcaagagaagtgagtgaaaactatctagtttgtgcaattgagatatagtgactactgacacacatgtaggtaaccttgtgtccaaacagggatcaagaattttctcaaaggttgaataggaaacatcaaaacaatccccccaagctgaccaatgggattgagatatttactacaaactcgtgaaactgagcaatacagaatgcaaaagaccgatgaagcttattagctgtacttttcagttttgtaaggacaagtgcactactatcaccctttaaccattggaagttgtaatgtttgttgtataaccatgcatctataaaaacactgcctaaaacctaaatcacttatttttttatgcaattctgccattggtaattggcacacagtattgcatataacgtcatcagatgtgcacccttgttattatgtacagaatgttatttgtgaaatagctagttcatacccatttgttttgtgaaacatagcatgtgttattttcctagcacggtgatctgcaactagtccactaaaacacatgaagtaacaccggtggcactcaccaggaacaggatcctaaatcctgaatcctaaatcactttaaaatgaaaatctactactggtaattccgtaattggtacaaattctacattatgccaagtattgcatataacatcatgaaacctgcatccttgttattacacagaattttatctgtgaaattgctagttcataccaagttgtttcatgaaaaatagcatttgttgttttcctggctgacaatctaccactagtctattgaaaagtgtagagtcaaacacaatggtagtatggtactgaccaggaactggatccggcgtcttctgctcagccgccttgggagcttctgcgcggaaaggaagccccttgtagtgaaccaggaagggctgcttgggctcatacagctccccgtcaggaagatgaatgtagaagccgaggacatcgccatcgccatagccttgctcagcgtaattggccctccatgccttgtgcaccttggtgccatccatgtcgcggtatccgaatccaaacacatcgtagccaacgggtgcgtggatgtcagcattgttggtagcccatccaaggcgggtgtggccggtgctgccgaggtgaaggaccttgacctcgaagtaccaagcgccggcagcgacgccgcgggtggcgcgcaccatccggtagccctttgtgctgccggcggtgaggcggtcgtcggagacctcgaccttgtcggacttgaagacgcgggagaggagcacgggccgatcgggcgcgtcgtcgttgcgctcggcggcgaatcggggcgccggggtgaggacgagctcatcctcgccgctggagggcttggggaggcggccgttggcgccgccgctgccgccggcgagggcgttggccggctgcttggccttcttcttgcccttgcgggagttgggcctggtccagacgctgttgctgttcttcttcttggacttcttgctcggcggcgccgggggcgcgagggccatgtgcttcatggcgccgcccaacgggttggtcccgtcgtcgtcgggtggcgcggcgacgcccgaggcatcagcatcggatgcatcggcgagcgcggcgtcggagaagggggtctcgggttcggcggaggcggaggcgggggtgtcggggagatttggggtatcggcggcggatggggtggcgtcggacatgggggtatcggcggacgcggggtggaacgcggaagggggtggggagggaggcgcatcgtcgtcggcggcggcgtccgccatggggagggtttctgtgcgatttggggtcggaattggggatttgggtggttttgctgctctctctcccgcggtttgggtttggtttgcgaaatcgcgagcgggaggaggatgcggtgcacggcacccggcacccggcctcccgcgagtggaaacggtagagcagtttgccgttttctgcctgcacaccgccgaaaatatatctctgcgatcactggagctagcaaaatcgatcaaaaactgctgaaacttgggctgcaaattgaactagaatcggactacatctgggtttcctccctggctcaacccgtactactgctgttctgggtgctcgaagcaaggtttaatcgttaagatcc

SEQ ID NO: 23377 - DNA, 3789 bp, Oryza sativa
cctgcagcccatcatacttgcataccaaagttgatttagcctttcctacaacaatagaagcataaaagtgaataatactagataggggaacaaaacaaacagtccatatacttatacatatcaatatcaggtaggagtgcatctccagtttattgttcaatgtggcatacttgaattcaagcattcaccaactagcccatttgtataaattgttctgctccgcagtccatagagaacactttcgttgaacaaaatcagcaacaagtgtggttcgttttttcagatctttctccagtaactaacacaagctatgatgcagccagtggaaaaccagatttgtcaggcctcaggtgtgatcattatacatgtgatcaaatgctaactgcttcatccatataaccattcagctatatccagtcaatactagcatgctgctacagaaaaggacaaagcaatttcttaaacgcctatatgccaggtttttttgtgtccatgctcaaagttcaacaagttactttggcatatcgatgctaacccattacatgccaaaggaatggaaactataggtttaaacatcatcacaggaatatgaaggataatgcgaccatcaacacaagaataacaccactaatcaaactattttatccacagtgcgtttagctacaatttccaatatcaacaactagacaactcgcaatgcatgaacaactgaatatgtgataaaataatgatgtatgagtgactggccacaaccgacaacaccaaaaacagatgaaactatttgaaattataaggatacaacataataaaataggaggatgcttgcttctatggttttcagcctgcacctctgtcttatgcaacataaaaaagctaatgtaagtacaataactgaacagcaaaacttgcaaatcagatttttttttccagtactgaatgtaccggctaccaggattttcctttcctggacatcatatttatggcacatggttacatacttacatgttcattcatattaatcataactagccaacaaaccaagacaaccctatactaactcaggtcccaagagattctcaaattacaccctaattaacctgccaatctcgatattctaatgcattcaaacaagaaacaaatgctatgcattggaaaatgcactaaatgactgaattagtgaaatctctaaatacaggctgggagggggaaggcaccacacggtgttgagcatatcctcacaaatttctaaagccacaaagctaaaacccaaccaacagttgacaaagataacaagaggggaaattggggacaccaatgaatacaacacaatttgccaggggtcattacaaacatgaaacatcataaaataatctagacccattttgtagctaacagtaccagcaaatatccagtcatcaatgtctagttgattgacccacaacttacattggaaccaaagaatgtagaattacaggagcgcacaattaatcctcctaattacgtcgccagtaatcagtcagcatgcgagaattcatcatatccctctattcgacaaatgatgaggacacgaatgactacaacaccagaaagaatcatcctaatcaattggccaaagcggaacatttgatacccaaataaaggccgcccaattcatgattcctagtcaaaattaagcgtacctagtcctcaattctcaatccacaacactatttgatcaaccaagaaccttacctagcatcaaaggaagggccaaacaagaactgaaaaattgaaattaccagaggcacggtgtctagttgtagtagagctcgaggcccatcccgtcgtggatctcgtagtccctgagggtgatgtggtccttgtagatgttgtaccacttctggatgcggatcttctcgggcctcgtcccggtctgcgccgccaccagcttcttgaggtcgccgatggtgtcgtcctcgttgcacttcacccgcaccttcttccccagccggtcgttcagcaccacctcgatcatcttctcctcctcctcctcctcctcgaactctctcctgctccctcctcccgaagatcacgcaaaccctagctcagtcctggccacggcgagacttggtgttggaagcggcaagggagaggagaatcgtgtggcctcgcctgctcgccccgctctcggtggaggagcagaagaatcgagaaggagatgagggagcaccggagcagtagcagtgtagcacgaatttttttcatttttagattttttttaatatttacagaaataatctatcggccaaaaaaaatacaaaaatagaccctgccgccccagtggtgggcggcaagctgacgtggcagacggcgggtcgaccgtgccgtctgccgccgtcggccaaaattgcaattcccccagagggcggcaaggggctaattgcaatttttgccgcccataaagaggttgcgctcgtactttttgcatttgggccccttgctgccccagtagagggcggcaagggacccagatgcaaaaagtacggccaaacgatttttctattttatgttaataataaataaagaagtatttattggtaaaacttgttaatattgttataaaaatgtattgaagttggttgtttcgcaatttcatatgttaaggaaggtattattttgtaacttattcgacgtattagtactcggataattaataggcctatcgcagtctcggttgtagaaacattatatggacttaaacaaggagaattatgtaacatgaagaaatagtagtacaatttgaacatgatacaactatttccattgcggttacatatatgatattagatttgaactaggagggaggtagtgcaatagttgaacacaacgacgatgtagtaatgggacaaggaagcatgacagtagaaatttcaatatgccaagttgtccgataatagctaacccctacgtgagtatccctctcctctctcaaaacgcgctttagtaaccctgtattgctctggtagttcaagctacacaacacggcaaggtggagttagaacccttctggtgtctatccattctttgtattgacatctccttggtggttcctaggaggaaagaatagatgtaaagcgagcaaagttagtaaatattgtgagaaaataaggattcatgtaatcaaaatattcttaccatgaaatcgtcgtcaagaatatttggacaaacaaagaaccttcgacccaatgttgtaggctttatggaacgaagaacctgacaacgatcaccacacctgcatcttggacgggcttcccatggagggagtgccgtagttagcacccgccagtcgctctgttgttcacgacattgtcgttcataagccgcttttctctgtaagtattgctcagtactttcggatgcgaaataccagcgaccttcttgtaaacaagtggttaggtcgaaaacgggattttctgtatcgacccactcgatgtatgcgcaagccgtagtgcgggtctgccgaatagagtagtgttacgaagaataaagcgattgcccatacggaatgaataagcatatgcagataataaaatacctcacggtcatagttagggcacctaaaaaagcgccttcctcgaatatcaggattcctcgaagccattagttggcatcgatcaccgctaggcagagaggacgctggcaccaatgtggtagtaggtatacacaagaatcgctacgccagtttcggatcctcaacaccccggggtctaacctttgacgaaagccggttggatttgtaatgaagcaagt

SEQ ID NO: 23378 - DNA, 19751 bp, Oryza sativa
cggcaaccgacggacgggattcggggtgccctaagaaaggagaagagagagattagagggagggagatgaaccacggcgaccggcatttatggccgaagtcagcggtataggtttaactcaccggagcacgaggggatgcgaattccggcgatgaatccggacggggaaggggtggccggggtggagcttagcctcgcaaacccgacggtgccgacggcgcggtgcggcggcgaccctagcggcggctagcggcggcgggagtagcggaaacggcagcaacgggtggttgcacggcgcgggagcgatggggagcacgagggagttcggcgagatggggaaaaagcgagagggggcgacggggaagcttaaataggggaggggagtcccggacgtggccggtaggggcgagattttgctggccaacgtggggagtgggggaggagagagaggcgggattcgaaaattgaatcccggccttctcgggcgcgggcgcgagcgcgagagagggggaagtgggtgcgggagatgcggcgcacgcgcgggcgtggccgacgcggcccggagaaggcggaggcgtgggcgtggcggaggttgcgggcgcggcggcgccggctaaaggaaggagacgggcccgacaggtggggcccacctgtcggcgtcccgaggagagagggaggggcggcttgggctggcccacaaggaggagggcgcgcgcgcggcggggtggactgggccgacggcccaagaagaggaaaaggagggaaaaggaaaaagaaaaggaggaaaagaatttccctgggatttaaaatattgcatgctcgattttaattggttaaaattatttcgagagctctgaaaattccactaaaaatcttgttagtgaatttcgacatgtagaactcaagaaaaattccacatgccaattccgattattatttgcattgatttaatagggttaactcttgctttgcaccggtattttcttagggtctcttattaattcgattttaggctaaggaggagaactcagggtgtgacaaacctaccccccttaaacggaatctcggccccgagattcggaggagctggcgaagaggtgcggatgggcggctttcaactcatcttccctttcccaggttgcttcctcttctgaatggtgactccactgaactcggcaaaacctggtgaccttgtttctggttcttctttcgctggtatcaagtatacgaatcagcttctccacatatgtcaggtcctcctggatatcaatgtgttccgaatcagcctgttcttcaagtactcttaagcacttctttaattgggacacgtggaatacatcatggatgccgatcatattggatggaagttctaactgataagcaacttctccccttcgttccaagattttgtagggtcccacgaaacatggtgccaacttgcctttggtttgaaaacggtgcactccccggagcggagtaacccaaagatacacataatcccctgcttcaaaagtgagctctcttcggcggttatccgcgtagctcttctgtcgagactgggcaattctcaacctttccctgatggttctgactttctcttctgcttccgttaatacctctgtcccgaacaattgacgctcgcctgtctgatcccagaagagaggtgtgtggcacttccggccgtataaagcttcgaacggtgccatctgtagactggcttggtagctgttgttgtacgagaattccgcatatggcaaacatctgtcccaagctccaccaaagtcaagagcgcaagctctcaacatgtcttccaaaatttgattgactcgctcggtctgaccatctgtctacggatggtaggcggtactgaaatttaaacgggtccccaattcttcttgcagtttctgccaaaattttgaggtgaactgactacctcggtcagatactatcttcttgggtaccccatgcaaacacatgatccttgcgaggtacaattctgccaatctctttcccgtataggtggtatgtactggtataaagtgagccaccttggtgagtcgatccacgactacccagattgaatcgtgacccgatgatgtccggggcagtcctgttataaagtccattccaatttcctcccatttctattccgggatttgaagaggttagagtaagcctgctggcctttgatgctctgccttcactcgctggcaaacatcgcagagtgcgacgaattcggctatttcccttctcatgctgacccaccaaaatttttctttaaggtcttggtacatcttggtgctgcctgggtgaatgtaatactgtgtctgatgggcctcggtgagtaccagatccttcagctccttgttgtcaggtacacacaatctttcccccatccagattgtgccatgctcatcctcaaggaaatcccgagcctttccgactctcatgttctttttcagctctgctatttccggatcatttacttgagtggctctaacttgatcgacgagcgtaggccgtgcttccagagcggctacgaacccgtgttcaacaattcccacgttgagatgctccaactcctgccgcaattcctcacacatgccctcgatgcatagagcagtgcagtaacttttcctgcttaatgcgtctgccaccacattggctttccccgggtggtagtgaatgctcatatcatagtctttgattaattccaaccatcttcgttgtaggagatttaggtccggttgggtgaagatgtatttcagactcttgtgatccgtatatacttcacaacggttgccaatcaaatagtgcctccagatcttcaaggcatgaaccactgctgccagttccagatcatgggttggataattcccttcgtgtggacgcagctgtcgtgaggcatacgccaccactctgccttcctgcattagaacacacccaagcccgtggcgggatgtgtcgcaatagacttggaagtctttcatctggttgggcagaatcaaaactggtgcggatactaatttcttcttgagctcctcaaagctcttatcgcactcagctgtccatttgaacttctcatctttcttaagcaactgagtcatgggtcgggcgatcctagagaagttctcgatgaaacggcggtaataacccgcaagtccaagaaaacttcgaatctgcgacacggtcttcggtggggtccatttggtaaccgactccatgttggatgggtcgacggccacaccctgagctgtaataacatggcccagaaatttgacttccgtcaaccagaagtcacacttgctgaacttggcgtataactggtgctccttcaacttctcgagtaccagacggagatgatgctcatgttcttcttcggactttgagtagataagtatgtcgtcgatgaataccacaacaaacttgtccagaaactccatgaacactttgttcattagattcatgaagaatgcgggtgcgttggtaagtccaaaagacataaccgtgcactcatacagcccgtaccgagtggtgaaagccgtctttggaatatcctcttcccggattcttaactggtggtagcctgatcgcaggtctatcttagagaacaccttagctcccttcagttgatcaaacaaatcatcgatccgcggtaaaggatatttattcttgattgtgacctcattgagtgcgcgataatcaacgcacatcctcttcgtcttatcctttttctccacaaaaatgaccggagcaccccaaggtgaagtacttggtcgtatgtaccctttctgcagctgctcatcaacctgcttcttgacctttgctagttcgttggccgccatcctgtacggtctcttgtaaattggtgcggttcccggtgccaaatcaatccggaattcaatctctcgcttgggtggcatggtagtgaggtcttcgggaaacacttctggttactcgcaaactatgggaatctcttccaatttcctcgaactcttctccttagtgaccactgggatttccgcctcaatctgattcaaggagaccccttgctttggtgagactaatgatttgtacactacggtttctcccttctcgttggtcaaagtgactgtgcgattcgcacaatcaatgactcccttgaacttggtcagccaatccatccccagaatgacatctaggtctttggaatcaagaagaatgaggttggctaggaatggtgatttttgaatttctattgttatagaagggctgaattgtaccgaagtggagctattccctggggtatgaacccgcatgggtgtgctaagttcctctcttattaacccatgcaccccgacaaacttctttgaaatgaacgaatgcgttgcaccagaatcaaaaagtactgttgcagggattgagttaacaggaaacgtacccagtacgacctctggtgctgcttgtgcctcctctgcggacgcatggttgacgcgagcctggacaaaccttggcccggtatgcctgggcttcgggcatttgtcagcgaagtggccaagctcgccacagttgaagcaggaccctggttttgtgccagtctccttcttggcttgcgcggacggggctgactgtgttggtgccattggtgggcgtggagctgcaccgcggttgggctgacctccatggtgctgactgccactggcgccctggtggaagttgcttgagttgaacgggcggtgctgcggacgatcatggtggtaggtccaccctgctatccgggagtgaagcgcggtcggtgctgactaccttggttggaccggagctgcgccgcctttctcttcccgtccattttgttgcgctgatcctcctgacggattgccttgtcaaccagcctttcaaaatcagcgtagtccccagatatcagttggttggtcagctcgtcatccagacctgccatgaacttttcctgtttctcggcgtcagtgcggacatcctccagtgcatatcgcgcgagacgattgaactcgtgaagatactcggtcactgtcctgttgccctgatggagtgcccggaattccctcttcttttgtgccacgaccccgtctggcacctgcgccttcctgaagctacgacagaactccgcccaagtgacttcagtgcctagcgggcgggtggccatgtgattgtcccaccaagctgacgcgggaccttgaagctggtgtgtggcgaaagcgaccttctcctgatcattgcactgcaggagattcaacttcttctctatggcatggagccagtcattcgcctccatggggttggtgatgctggagaaggtaggtggcctgacgcgtagaaactctggcaacttggactgagggggagggggaccaaactgctggtgctgttgttcggcatgctgcagcatcctctgatgcatctgctggtgctgctgctgcatttgctgcatcatggctgccatcatctgagtctgatgtgccataacttgggccagtgtcggattctcgggaagtggtggcggaccattgccggaatcactgttggggtgcacaccatcagcgcgttcttcgccgttgctgccctcgccagtcgtgcgggtgccagttctggtgtagaccatctggaggaagggcagacggggaaacggagaaaaacagatgctcaggaactaagctttattatatagaaatttaaactgcaattgttctgatctgaattaaaacactttaaacagcaagcaaaaatccttattgggacagccatatcataggcacatgatatcgaccatcgactgaccccaagcaagcaacctaaacacacaaactaacaagcagaaactagacagtcgataagctaatggaaaacgagcctaatgctcggaacggctcctgcggtcggtggagtcgaaggcgtcctcctgctcatcaccaggtccctctgagcgactcctagagcctggcagataagtctcgccgctgcctggctctgagccactggagctgctgctgctgcggtcacggctgccactgggagtagctggcaaccaacctccgttgccactggcggggcccctgacggctgatgcaggtgcgaaggagagcgcggatgctagagctgacatgggaacgggagctggagctggcgctggagctgcaggaactgctggagctgcgggtggaactggaggagctgctgacggaggtgggttcctgggcgcaagctggacgtgcacgggtgccgttgtcgacttgcgaggcgtagtgcggatccggactccccttggcgcgggaagacccttcaactgagcattctccctcttcaggcgcgctatctcgtccttcagagcgacgatcctcatgagcttcccatcattcaaggccttggacgccttgtgcaggtccgagtgcatcctgtccatccccctcatcacagcgcacatgtgaccgaaggtggtgtcgttctcaccggctgtcggacggaaagaactgacatcgctgccgctggctcgacgagggtggaagcggtacgccgtgtcgtggaagatgtagttgtggcgctcccatagtctggccatcatcaggtaggctgcctcctgacatgcgtgatctgctgtgcctcctgacgcctcaaccgccatgttagcgaggcaagtccccacgtagccatggacctccaagcggacacggtgaggaagctcgccactgagcggtggaatagtcgtgtactccggtgcgttggggtagcccaccaccagtgtcatgcgtgccaactctgccacgaagtcatccatgccttctccgtggtggttgggtgggtgctcggccatctggagaagacaaaggggtaggatcaatgcatgctcaaatccaaattaaataaagcaataaaggactcaaataacagaatcgaataagagcgaaattttatgcatagatcattttgcatgagagcgaataaataagacggacttacatagaggtaaaataatggggaaattagatacatacttataataacaataaaagcataaataccttacaacccatattcctgagctaaaacctagtgcattcgcccatcaaatcccaactgacggtcaaaaacatctcaaataatttttactaaaaccctagaccgacttgttttgacaaatctcacttaaacgagcgacacgatttttcccttgaaccacaagaacagatcccaaattttcccggaacaattccaattgcaaagaacttatgcaatgaaaaggattcagagggctcttaggtttccatttggcttgtcctacggtcaaggtcggctctgataccaacttgtcacgcccagaaattcccaaatagaattccaagcagaatgtgcattaaaacccccgtccaggaccggccggggtacacaaacgacaatgttgacatacagatccacgtcttacaaacattataaaagtcttacataaatgcagcgaaaaaacaaaagataaccggagctaatccttgacttgaactgcagcgggaacaccactccacaggcatcctcgacggcacggacgaagcctactcctcggagaatccgccatcggatacacactcgacattgtcgttcataagccgcttttctctgtaagtattgctcagtactttcggatgcaaaataccagtgaccttcttgtaaacaagtggttaggtcgaaaacgggattttctttatcgacccactcgatgtatgcgcaagccgtagtgcgggtctgccgaatagagtagtgttacgaagaataaagcgattgcccatacggaatgaataagcatatgcagataataaaatacctcacggtcatagttagggcacctaaaaaagcgtcttcctcgaatatcaggattcctcgaagccattagttggcatcgatcaccgcataggcagagaggacgctggcaccaatgtggtagtaggtatacacaagaatcgctacgctagttcggatcctcaacaccccgacgtctagccattgacgaaagccggtaggatttgtaatgaagcaagtggggaagagagtactgaatgtgactgagttctgaaagactgtgaggcctcactcgttaaggtgacttatataggcgcaaaaaatcgagtgatatccctgacatgtgaacgtggcggggcatggtgggtacgcctgatcggcgccgaaagttacattggtcgtatgcggcaaatggcgggcaaatactcgtatcgcacgcgaataaaagaggctgcatcggtgcggcagaaagtagtcgtgcatgcgccgaaaggtatcgtgcacatataatgtcacgcccagaaattcccgaatagaattccaagcagaatgtgcattaaaacccccgtccaggaccggccggggtacacaaacgacaatgttgacatacagatccacgtcttacaaacattataaaagtcttacataaatgcagcggaaaaacaaaagataaccggagctaatccttgacttgaactgtagcgggaacaccactccacaggcatcctcgacggcacggacgaagcctactcctcggagaacccgccatcggatacacactcgagctctgggattgggggaaaatagagcaaggctgagtactatccactgtactcagcaagtcataccggaaaggggggtatgatgcagggattcaacaagggatagctaaacaggttcatttgcataaatactggcatttataaacaggaattgaatgcgaaaacagttgtaataattaagcagtattaatcatccactgtccaacgttacaccacgttgcaacaggcccaaccatccacctataccatccaatttcattagactaaactaaggtgagtctaatcacggtgagtctggttgaccgcccataaccgcgggcacggctattcgaatagttttactctgatcagaggtgtacaactgtacccacaagacacagccccacgacacgtttccgtgcgtcgacatgccaccacgacataccggaaagaggccgtgacaggacccttcgcataaccccctctagccaagcacaccacacctcaggtttcacccccgttcccagcgggcaacgggcagtcccctctcgtgcctagatgaatctggaagcgacagaggccgtcgcagggcccgccccgctccatcacgcccacccttgcctggatgcgtcagctagagaaaagctacactacaagcccagccgttgcccacgctggcttgtggtaagtacgataagttcttccagggtttcccgcgaaccggtccttaattgccatgggcgcgactagcaaaaccatgcacccacagcccaccatgtgattcattttatttaaccaacaccagagcggtggtactaatccaacattatcatataaacctatagtctaggttttaaatgagatttccccattgtgtgctagttgaactaagcatggctaagcaattcctagtccaaagtctaatcatgttataacccaagctaacaaaggagcatggtatccaaaaagcatggctgtaacaataggtaatcatcccatagtataattgcaaaacaaatgcggtatttgaaagaaaacattaggacatttgcaatataggatcaacatgatcaagtgacaagcatgacttgccttgctctgctgctggaggaacctcggcgactatttcaaaatacaccggagcgtcggaagagccggaatctagcgacatacaaggcaaacaatgcaaacaggctataagactactgaaacagagaacaaaaccatttttaatggattctacacatttttcttgatttactgagacttgaatgggcttaaacggagctcggatgaattagttatgaattttagaagattcactgtgtttattactataacaaaaatccttaaataatttattgcgcaatattttccagggctgacgtcagcacggggggaggcgcggcgccgacaggcgggccccactggtcagcgactcaagggggggcggttcaccgtggaccgggaccacacgggtggtccaccgccggtccacgggaccgatggcccagatcgccctcggggccgatcggacgggcggcgataaaggcggccgccgggctcggctcggcatcaaagccaaccggccggccagggctagcggcgacgcacgcggccgacggcggcggcgaccggcggcacgggaggcggcggcaaccgacggacgggattcggggtgccctaagaaaggagaagagagagattagagggagggagatgaaccacggcgaccggcatttatggccgaaggcagcggtagaggttgaactcaccggagcacgaggggatgcgaattccggcgatgaatccggacggggaaggggtggccggggtggagcttagcctcgcaaacccgacggtggcgacggcgcggtgcggcggcgaccctagcggcggctagcggcggcgggagtagcggaaacggcagcaacgggtggttgcacggcgcgggagcgatggggagcacgagggagttcggcgagatggggaaaaagcgagaggggccgacggggaagcttaaataggggaggggagtcccggacgtggccggtaggggcgagattttgccggccaacgtggggagtgggggaggagagagaggcgggattcgaaaatcgaatcccggccatctcgggcgcgggcgcgagcgctagagagggggaagtgggtgcgggagatgcggcgcacgcgcgggcgtggccaacgcggcccggagaaggtggaggcgtgggcgcggtggcggttgcgggcgcggcggcgccagctggaggaaggagacgggcccgacaggtggggcccacctgtcggcgtcccggggagagagggaggggcggcttgggccggcccacaaggaggagggcgcgcgcgcggcggggtggactgggccgacggcccaaggagaggaaaaggagggaaaaggaaaaagaaaaggaggaaaagaatttccctgggatttaaaatattgcatgctcgattttaattggttaaaattatttcgagagctctgaaaattccactaaaaatcttgttagtgaatttcgacatgtagaactcaagaaaaattccacatgccaattccgattattatttgcattgatttaatagggttaactcttgcgttgcaccggtattttcttagggtctcttattaattcgattttaggctaaggaggagaacttcagggtgtgacatataacaacaacgtagtcattacacaagcatacagtactggaaagtgaagcaaataaacaaagagaagactgctctactggccctgccccgcgccgcgaccacgcttggtcctccgggcatgtgctcgcacgtggtcctgggagcaggtgaaacgatccggtggcacagcacgggtagcacgagagggaagaactgcctggaaccgatccctaaaatacctacatgtcccatgtaaaatgaactccactatgccaactagtggcagtccacggacacccagttgtaaacttctgccaaatttgttgtcattattccatatctagcaccacctgtgtcatacgccttggcccatttctcttttggttcatgcagaatccattgaaaaaatttccgaatctccaatccagttcttctaaccaatgttggactatccgttgggagaggtccaagagcttgaggagggtcagcatcggcggtcgatggagccgctgcacgctgatcactgcatttggctgtcaactcatcgaatctcttccaaagctcattgaattttttctcctggttctgattgcatagcctcttaaacatgttcataagctccttgttcttgaattgcttgaagaaattagctcccatatgacgcatgcaccacctgctctgtacatcttcccactcaccagggtatcctcattccatactcccaaactgcaactcttctatcgctcgcagaatgccagcgtgcctatcatgtatcaggcacacatttggcctcataccaacaactattgttttaaccaatttcaggaaccaataccagctgtcggtattctcactctcaacaaaagcaaatgccaagggcaatacctgattgttcccatctacccctattgctgttagtatctggccccgatactttcctgtcatgaatgtcccatcaatgcagagaacaggacgatagttcacgaatgccatcttgcatgcatgtagagctaagaacgccctttgcagcacactcttgccaggatgttcaattgaggggaatttcttcacttcgtaagagctcccagggtttctttcctcgataacaccaagcaggcgtggcaaattgtcatacgaggcttcgtaagttccaaatctcatctctattattttctgtttggccctccaggccttggcatagctaatagtatacttgtatgtctcttcgatgtgtcagattattgacattggtttatatgtgagattatcgatgacatgcgcatacatctcagatgcaacaaatgcacatgtaatgttcctgtggtatttctgaacactaggtagaaaacatgtatgcttggtaacgactgacaatgttcaataatccttccatttccccttgtacgcgtgcattctccagggacaaccatctttttccttaacacaccgaacttcatattgcgaccggttggacttggcaacccaaaactctctatgaagtgacactgcaaaatgttttaccgcctccttcatatcttctgctctactataaatcgctccctgaataacctcattttctttgtactcccatctcacactatcctcttcagagacgactagcccagaaaaatcctcactagcccattctgttggattaatatccgtctcatcatctgacaaatcaccttcctctacacgctcgttgtcagaatccttcctctccatttcatccacaatggcaccgacagtctccccctcgtcggccactccacctggttgaatgcccactggagctactacacccctgtcctctcgtgcgttgacctcctccacagaagtctcatttacttcagcacttggtccctcaccatcatccatgttcatctgcacacatggatccttcgggtgaacaaacgaaaccatagctagaggccacccgcgttgcaatgcattttccacataccatctccacactcgagagttttgaactggcattagttcccaataaaaaccctcagctgcccgacttactataacattgattgttatgtcacttgtctgtagatcaactctcaagcccctcattaaccatccttttatagaaggtacactctcctcagccggtctatcaattcccctttctgatacaataaaatctgacagatctacccagttggcccgtaacggacgtttcctgggccatggtaaacttggaatatttgtttgttcgacatatctgtcaacgaaataactagatcatattactctttcatgcaataaacatctacaacgtaatatcttcttgtgtatgccaatgcaacggtaaagtattgattccaaactagcagatctacatagttaccgatatctacaatacgcacttctagattagtacaactaaaaccctaaaaatataatgcatttattcaaacaaagttttaaaaaatacacactatttaactcaatagtcacatataggatctatgaatattacctgaaatcggcgtctgaatccggcagggcttcgccccttcttctcttctcctcccctttcttctttttttttcactagatttgagggggaggaatgagggctgggggctgggcagcaggccttttataggcagcgaggcttgccgcccgaccagagggcggcaaggggccgcctgcaaaatggtcggccccgactggcttttttgcattcgggccccttgctgccccaacagagggcggcaagggctttactgcaaaaaaccctccctccgtcaccgtccgtccctcccccgttcgccacatcagcttgccgccccagaggtgggcggcagggtctatttttgcaatttttttggccgatagattatttctgtaattttttttaaaaaaaaaatctaaaaatgaaaaaaattcagtgtagcactgctagattgtgatggccgatgggctgtatgggccttgtctacttaatggactatagtagacagttctgaataagttcacttgacgttcctcatttttccgtcgagtttatatggaatccctaaattgcaatatcgaaaatcttggaataagttcactttgactctctgttcgtatcttattggtatctctcaaccataataccggatatctcaacctcctaactattaaaattggtgtaatttgactcactcagcggttttggagggcgctttcccttatgtggcacctacgtgaagtttatactttttaattctaataatgccacgtaagcgtcacatcaacgtcatgtgaaacgaagaccaagtaacaccgccatgtaaccaccacatgagctaaacaaacgggatgcgaaggcacatagtcggattggggatttagggtggatccgagtcggaaccaacagactgcgagaggcgctcgcaccagaagcgcgaggcggcgcgggccggggaacggccacgttcaggcagcggggccaggggggacacgacgctgcccatggagcaagtcggcgcgcccatgaagcagcggtgcaactgttgcagcgctcgccacggggacggtttaggttgtgttcttaagggtgtgtttggttgcaagccacactttgccacagtttgccacgcctaaggttaggcaaatttgacaggtgtttggttgtagccatagttgtagcaagattcccctccaataaattgggtcccacgtgtcaatggctcaaaaaagtgtggcaagattctcttaggcttagtaagttgtggctaacaatttgatcacctcaccttaggcaagatgtggcaacttttgttggcaagtaatggtaaagtgtggctgggaaccaaaaagcccctaagtccatgatcccaacctcactctctcgtttaccgcgcgcacgcttttcaaactgctaaacggtgcgtgttttgtaaaaaaaaatttatagaaaagttgttttaaaaaataatattaattcatttttaaagtttttaagctaataattaattatccacgcattaatcaaaaatgcttctatccggacgtccgatcgaacataaaaaaatcggatgcctgcgcgcatgtccttaaaccgtgtaataagattaataatagtgcccatcgcaatccctcatcattctccctctcatatttatattgcgtaggcatttttctcttgaagtagcctatgtaactgctctgacataaagtagcccatattctctctctcgtatgcctctaccgctttgacataaagtagtctatattctctctcgtatgcctctactaccacacatgcttctactccttaatgaataactccaaataatcttatttcacaaattatttatctaatccgtaatctaaatataccattgtattcaccgcaattaaatcttcataacaagatctcacttaactatattttggtaattttttaaaaaagtttttttgttgtaatggattttttagttgttgcaataggtatttaataacgtttcaataggtcatttgggaatgttgcacgaggtgtttttttatgtttcaagaggtattttgtgatgtcttcgattgatgtttcactgtatcattttttaatgttgcacgtggtgttctttaaatgttacatgaggtattttgtgatgtttcagctaatattttactaggtcattttaaagtgtttcacatggtattattttgatgttataccaggtactttctgatgtttcattaggtattttgtggtgtttcagcagttacaactcattgttttcatatataatataaaaatgtttcagttatgaatgtaattaaaaatatataatttattaaaaatataattatgtgggatctctttgaaaagatttaattgcaacgaattcaatggggcaatcagattaaaaatcggataaataatttgtaagaaaaataatttatagtttgttaataaaatgcacacgataagatatttgcattcacaagaataaatgagagagaaataatgcgtgtatatgaaggctgatagataaaaagtgatacgtacatggtgcatgttggggatgcatgatgcgtgccgaggagtggccgtccgattttttctcataattcggacgtccgatttgcagtggctttccgcattaatccattgctccgttttccgttttccatagaactccagtaaatccgtgtgattggggatttggggtggatccgagtcggattctctctcgattccgatcggccgggacgcggagtccgatcggtttcttcatctataaagtctgcaggtaggggcgcgtttatctcctgatccattccccccaactcaaccgctgcggcgttccgcccttgtcgatctcttgtgcagggagggcggcgtgttgctgctgcagatggaggaggccgctgcggtcgcaagagggctaccaagggatttccctcccatcgagagctacgtcgatcgtcacggcttcttccataatagctggacggttggcagccgtagctactccagcatcatgtttcgtccaagaagtacgccgccattaacgctcgcagaagttcacgagagcactcgcgaggacgtgagggaggccatcagtgagggggtgatacgattggacagagccttcttccaacagcttcacgatcatatccagcgccagccccgtggcactggcactgccatggatggagtagtagattgtcaggatctcaagaaatcaacaagagaaacaagaacacacaaggattcaggcaactagtttggattgatctgctccaacccaacaggattgagccttccgccgccaccgccaccgagatgccaaatcatagttgtcttcctcgagttcatcttatttatacagtagcatctccctactcacacgacacacacagtagccagctgtacaacagatagctgggctacgcaacccactcggacccatggtaacgaggattgggctttggccctcttgtgggtcttgctcttcctggagtagtagtctgtatctcctctcctggacttcagcttctgcttcatcaggttctccttcttcaggttccttctctccctgttcagcttctgcttcatcaggttctccttcttcagtacccatagtgacaggcaggttcctgacaatcccctccccatgaaatttggcttgtccccaagccaaggctccagggaaacgcatcttcaaatcttccagatcctcccatatggcttgttcatgctgtaaataagatcgccaatgatcaattgccaataaaatagccatacattccttttcatatgtagaaagtccaatagttctgggccctagggctctgctaatgtaagctataggatgcttatcttgagataatacagctcctatcccacattcactggcatcagtctccactgtgaaagttttctgaaaatctggaagggcaaaaactggagctgaggctaatgcttgtttgagggtgttgaaagccttgtcagcttcatgtgaccagacatatgggattcccttcctcagcatctgtgtgagaggtttactaatgattccaaagttctttacaaactttctgtaatagcctgccaatcccagaaaacccctcaatttcttaactgacacaggtacagcccaatctaatacatcctgtattttagagggatcagtggaaacaccatgtactcctataatatggccaaggtaagatagctgctgttgtgcaaatgaacatttactgattttaactctccactgatgttccttcagaagttgcagcacttgtctgatgtgatccaggtggctagaaaaatctttactgtagatgagaatatcatcaaagaacaccaagacaaacttcctgagtactgacttcagagtgtcattcatagctttgagaaatgtggctggagccccagtcaatccaaaggacatcaccttatactcatagtgtcctgagtgagtctgaaaagcagttttgtactcttctccggccgccatcctgatttggtggtacccagaccagagatctagtttggtaaaccactgagcaccagtgagttcgtcaagtaattcctctatcacaggaacaggatatttggttttcacagttatggcattgagctgcctgtaatcaatgactaacctccatgtgccatttttctttttgacaagtattgcaggagaagcaaagggactttggctatgctgtatgacaccagaactgagcatgtcagaaatctgcttctcaatttcatccttgagagctgggttgtgtctatagggtctgaggttgattggtttagctcctgggacaagggtaattatatggtcacatgttctccttggtggtaatccctcaggttcctgaaaaatctccttataatcctgaataatgtgttgtacctggtctggaatgttaatatcttcctgtctagttataggctgcagttgaaccaggtactgagtgatccccttctactcattccattcaattgatggcatgtaacaggtgaacattgcacaggagtggacagcagtccttgtaccctgatgctggcacgttgatgattgaattccatccacttgtttgcccaatcaacctgcatagggctgatagattcaagccaatccattccaaggacgatatcatagtttcccaagggcaacattctgaaattgttgcagaactgatacccctgcatccaccatttgcagttagtaatttcatgtgtgcaactcatagttcctccatcagcaatcctaacaatgagaggttgttttagtttctgaattcctgataacttcagacctacttccttatcaataaatgagtgtgtgctaccagagtccaccaacattagtaattccatatcctgaacccaacccctgagtttgatagatcttgtggactcagttccccaaactgcttgctgtgaaatggccagtaagactccctgctgttggatctcactatcttcaggactggaatcagggtcagcttctgaattaacagttagagcttccaataattcctccaccacatgtaactgtatagaactggcacatttatgttccttgccccatctttctccacatgtaaagcacagacccttagctcttctataggacctcagagcagccaatttttcatctctggctctagctgcctctatacctctcctgtcttcagcactggtattgctggactttgtattgagcggattactgtaattactgatgggtctactgcccttaattccaagtactgagtctgatcttttaggagctggtgatttaatcccttcaattgcctcttcctgcaacagagcaatagcacaagctgtatcaagatcctggggtctttggaccattaccaccaccctaatttcatctctgagcccttcaacgaacttggtaataaagtatactggaatcagggaggagtcatatgccatcagttggtgcattaaaccatcaaacttctccacatactcagctacagtaccagtctgatttaagtgaatccattgtctaatgagggcc

SEQ ID NO: 23379 - DNA, 4458 bp, Oryza sativa
tggggatcgcggtgtccttcttgtcgcgcgccatcgtgcctttcgcccgttcctaggtggcggaggcagcaagaaggctagcaagaaggctatctcgtcgtcgtcgaggaggaggaggaaggtcgggctggagctaagcttccacgcggaggacggtgtgtggaggaaggagatactgatggaggagcagtgccagtcgttggacttctccggcatgatctactacgacgtcgcagggaggcgtctggagcagccgccaccgccgcgcacgctgctgtgcagcccgctgccgtcgtccatcaagctcgcagccaacgccgctggcggctactagccagagacaccccctgctctcacgggcttgcagcaaatctctgaacttttggagcaagcttagccagccgccttcctctgctttcttgctgcttttaattttaccttcttcgacatagcaataggtctctgcttctgatctttctttttctctccttcccttggtgtgtgtagtgacaagtgatcacagatcagtactatataaaagagttctatggaagcttagcttatgttttctgaaactagctcttgttttacaactcccactgtttacaactataattttgaatctttggtcatctagttgttcattagtaccatttactctctgactactttttagctctgcttttgtcgccgaaatccatgggagctccgccgccaaggaacgtctcggcgacacgcgcgggcggtcagcggggggcttgggggtggggacgaggccggtgccaacggcatgctacacaaccacgccgtcgactacgcgctagcacctgtccaccatgggcaagccaatagagcttgctacatgtgagcatcggaactcggaacaaactgaaagaagggaaaaaaagataagggcaaaattgtcattttatgtgatttctctctcattgattgagtggatattatattttaatgcgttcagtatccagcagcaaattaccagaattttgaagtgttctcgagcaaattcacatctttataatgttccacagctaattacgtatttttttgagtgtccttagcaaattttgcctagaaacaattgagatgatatgccatatttatgggcgatgcgcaaagatgggcatgaagaagaggtggaaagctattcggtggataacacctaccataagaatgggatggtgatcgaatggtgtgacggggttatgtatttagataggctcttgaaccggtagcttcactttggtatgaatagtcacggtgccatcgccgccgccaccaccaccaccaccatacaacctactatgatggcgtacaggaatggtagtttcagtgatgtccccgcgtacaggaacagtgggttcggtgctgtgcccgcgtcgagcacggccatggccgagctgcaggaggcttgggcgagcgaggcaaaggagctcaattgcatgcgctgtttaactggaggtctttgaggtgggagagaagctaacgaggatgtcctgctctcattgcttccgtgggccctgtatctcggattggctaagggtaagccatttctacctgctctgccaacagaagaacaatatatgaaaataactctcttttctgtgagaatttaatttcgtttgttcgttaaattcaaagaaccagcatgttgtttatttttggattcttaacacactaaacctttcttttaaacctttatttgtgatgaaaaatacaagggaaaattgtgtaccagtgtaacctcggcccaagcctatataacccatagcagtgaaatgggccaagattaataaacatgggaaagtgctgagcttttactggccaaaatcgtgatggacttcgagccactcccctcagccgccggcgacgccaccgccgacgagactcctcccggtcgcgccgtctgcagctccggctgcggccgcccaaccaccgtctgcctctgcccgtaccttcccgccacgccgctccccacctccaccaccgtcgtcatcctccaccacccgcacgccctccgccgcaacccgctctccaccctccccctcctcgcccgctccctctccaacctccgcctcatccccggccgccgcctcctcccttcctccgcccccgtcatctctcgctctcccgtcctcctgctcttcccttcgccggacgccgccgacctcgcttcctggtgccgatccacgcctccgcccgcgcgcgccaacccgacactgctactgctcgatgggacatggaagcaggccaaggagatgcacgccgctagcctcccgttcctgtcctccttcgccgtccccgtctcgctgcccgtcgactgcggcgttgacggcgacagcatgttcgagggggagcttgtggtgaagaaggagccgcacaaggggtgcgtgagcactatggaggccgtcgcgagggctctgcggctgctggagccggaggggaggggagaagagatcgaggagacgatggtgggggtgctcagggcgatggttgccttccaggctgagcatttgcagcatcggccgatgaaaccgagggtgaagatgaggaagaagaaggatattaagagggaggaggagatgaagaggaacacattggactggagtgactgaatcactgaactactgaagcatctctggacacattggactggagtgactgaatcactgaactactgaagcatctctggacactggacatacagtagctcattgccgaatcgttgctggtcattttggaggaatatcgctaacattatcaccaatgagcaaggtttgatctcttttggaagcatagtctacggttactagttctttatgaaaactaagtgagatgattacattttgatggctgtatctcaaaaattgcagcaaccatgcatgtttgactgttcgaaatgtttcaggattcaccagagtacctagatagactaaactataggaggatcatgaatcatgctgttctctgttctgaagacacttgtagggctgaagttctcattggaacttaggaaggaatgaactttatatttttccagagtaaacaacactgtttatgctactagatagcggggcttggggggtctacatgaacaattcatggtaattaaaggaattgataatcatcatgtagccaatgctaagcttgaccataccgcatatgtgctgaactcctgcttggctttgttctgcatcaaagaaaattgtatttgtttagattggtttagaaatgtttagcaatgttgtgctagctagcaattcagaaatgttcagaaatatttgtttagattagttctgaaatgttcaaatatgttcggaaatatttgtacagattatttctgaaatgttcagaaatatttggtccgactagttcagattatttcttgaattcgtataagttcggtatgttgctatgtatgtttttcagatgcacatgtacagaactttacaaatgtagtggcctagactagagcagtgtattgatcatcttcttttagaggatttatgagaaatattgtaagggctaaagggcatgacaattggtagtgcccctgtggggttactttcagtttcagtaatattaacctgtatatctgtacatgtgctagttatacagtaaattatctgctgtagctagcaactccactataaaacatgtcaaacttggcatattcttaacttgatgcaatacatgagagttactgatcaagtagtattcaattttgtaggcagatgctcacaagaatattcatgacttttgtgatttctgtaaacttgttcttcggttacaagaaacaaatgcgtaggttgatattgcctccatgattatcccaattctttatttgtttgattatgaacaaaatgccgtggagtgcagatttttgtttgaagtgcaggacattcataacagtgtactagtggcatgacatttggtttgttgcttactgagtgtgctccttccttttttattttgcaacttatgtgaccttgaccttttgtagtgatcaagagaaggagagggcaggagatgctttaagtgtttcttgagcaatttgtgcaacaggtattgggaactgttcttgagttttgcttttgcatgcaagttggagatgatatttcttcgacagaaatatgaggcggttgaagatggatttctaagcagaatgtgggttgaatgcagtttactgatgtcagattgttttggagctgtacctatgattttactgggttagatttccaaacagtactctgttgtaatgttctcttgtttgatgtaatgcttttctgccactatatgagttctgccttagtgaaaactaggcacaatctaaaatttcttgcgaggtgacccaagtcgttttgttaactttttttttttcgagaatacgctcaaggcttgcgtatcattgtatcacaagtgacgccgggggggggg

SEQ ID NO: 23380 - DNA, 10027 bp, Oryza sativa
gggggggggggggggggtctgagcagcccggagggccgcttccctccccctcaagctttgctacctcggcccaggatttgctaagggcctagacctatattacactacgacatgggtatgtaggggagtcgcaccgtagctatggccagcgccatggcatgccacaagagaggatccaccggtcctcgatcatcttctcctcctcttcctcaaactctctcttgccccctcctcccccgaagatcacgcaaaccctagctcctgaccacggcgagacttggacagaagatcacacaaaccctagttcctgaccaagttggaagctaaaagcgagaggagaaaggcttggagttggaagctaaaagcgagagcgagacttggagttggaagctaaaagcgagaggagaatcgtgtggcctagcctctccgcctgctcgccccgctctcagtggagttatggacgagtagaagaatggaataaattcattttatgacccttaactttgacagctacttcgattttcgtcttgaaccgatacacccgatatgttaaaaccagtgcaatatagattttaaggtggtttgaacaacggtttcaactaacgtgatgtctacgtggctaatttgatttggtctttatctggcgtggcatcgacgtgtcacattaagcaaaattcaacaatttaaaaaataaaacaaaatatgtgggcccatacgctagttaaataataagattaaaaaataatgggatccacatcagtgggcccatttccttcacctcatcgcatcaattctctatctcctcccatttcctcttttttcttgctccgactacggggtgagcaccagcgtgtcgaggttggactgcagcttccgctcgtcgcgctgctcctttcctcgttgttcgccgtgcctctccatgccgccctcggcggtggcggtttgcgggggcatgcgcttgacaagaggtcaccagacccaccaccaccatcttcgcctcgaccttggccgccattgtgccaagttgagctccgctcacatgcgtgtgcccacacacacacaccgatttaagaacaaatacttaaaaataaaatacaacgaaaaaaaccataaagcttataagctaaatcctaaatgatgggttgtcaatgttgagcaagaaaattgacattctaccattctcaaatgggtgctttgctaaaataccactccacaattgaaattcgccagaatgtcactctcaactgggggctccgcccaaatgtcattttctttcaattaaaatagttgtccctttcctccatctttgatgaccaaaatgcccttggttgtgtggcggtgtgacgtagaggcgggctagtgagcgtgagcagcagtgtggcgacagaggcgcgagcaatgggcggtggctggatggcgcgggaggaggtgcagcgacggacgacgcaaggggaggggcggcggagaggcaaccagcgaacgcgagcagtagggtggcgatggagaggcatgaatggggatgatggttggatggcatgggaggaggtgcggcgatagggcggcgcgaggtgggtttaactatttgccactcttacaaagtgacactcttgagatgccactcttccaaatttctttacagaaatgccacaaggagagagagctaatatttatgaattaccaattttacctaattagaacgccatgtcagctttgcaagtatgataggagacttaaaatgactcttttacccttgggtcaaagtaatattgattatcatatgagataaattattatggacaaatattcattgaaatatgagggaattatatacaaagtttgtatacagtattcgttgaaatatgagagaaatttatacatgatcttgttatgcgtacacaaacatcaaccaggaaacagacacaagtatgtattaaaacagacaattggtagattaatttctcaaatcaatctactaatttcgtagatatatgcgagatatatctacataggtacgcaatattttatatacaatttatcgtaatcacgtggttttcatatataaatgcaacaccgccttggccaacaggagtagggctattacatgtgtgcccgaatctgtataaaaatcattgtctctcgtctcttttacttcaatcttgcgtataccatagctccaatgatccccatactctatgttggcagtatctcatgagacccttcgaccagatctgccgaaaccgtgcgaccagtcaggattcaggctcaaggtgttaagttcatcggggcaaagccccatggtgaaggcggtgaagccacatggcgaagacaatggagcgaggacggcaaaagatggagccccatggcgaagactgtacatcctgggcgaagggtgcccgccaaaggagggtgacttcgccatcctggccgctttggccggcctttgggccggcattcgccaaccaggcccattagaggcccatgtatgccaatgacactgtatacccatgtaaatgtccctttcacaagggcaaccatataaattcccctgtaaaacctaaaccctaataggggggcctgtaacaaggatataaatagacccctagggccatgtaaaggggatcctaagaaaaattctcaatctaatacactttactgttttccaaccatcgttgagtaaccacgtccttcgacgtatgcagttgtcatttcgacaacagctggcgccgaccatggggacctccaagcgaaactactgagagcgaatgcccaccaaagagggtcgtgaaggagaaggttacaaggtgaaaggaaagcgaagctgggggagagatggccaccgaagagggtgtagagccttcggcgcccgtcgccgaggatggcggagcgccaccagcttcagcacccgcgccactgctgccgtcttcggctcctatcgcctcgctggggcaggtgccgaacacgcctgacacgatgaaggcggctgcagcagcaagggcactccaaaccagggcggagatcctttcgacaagccatctgctggcgccccaagccgctccatcacaaccggcaatggtctcgactgcgctcgtcgccgcacaagtaaaccctgaccccgaaacacaagccgaagccgacatggaagccatgcgacagaatatgacacgactccaaggcatgcttcgacagatgcaagaacagcaacaggcgtacgaggcagcgaggcgggccaaggccgcttcggccccaatcctccagtattcggcaggctatgtcccaccccaagtctacccacaagccacgcaagtgccagcatacttcgtcgggcagccttcgatcgcagcggtacatccggcccctcgcgggcagccgcaagctcagccggtcactgttcaagtacacccacaactgcccggccaagtgtcacaagcaatggcaaaaggggcttcgactcggcaggcacagcttcaagctttccttcagcaacttagccaacccagaacacaagtcagggtgcgcccagttggttgccgtcgaatcagccaggtctgggggcttcgccttggagtcagggaccgcagttcgacttcatcaatgctgctcaggcaccagctgttcggccgcaagcaccaacgccaggcttcggggcgaaccaagcaccaaaccaggccgccatggcgtggccccagccaacgttcgactcatccatggcggctcatcaagcaccaccaattggaaccgcgcagccgaacactgtggcccaaccttacgcgcaagccgttacctcgcctttcgccacgccatatccgcaacaaggtgccgtgaacagggcaggggcgaaaaggggctaccactgagtgggggaatcaagatccgtccaatcccaccccagttcaagttcctacccgtcccacgctattcaggcgaaactgacacaaaagagttcctatccatctacgagtccgcgatcgaagccgctcatggcgacgagaataccaaggcgaaggtaatacatctcgctcttgacagcattgcccgttcttggtacttcaatttactagctaacaacatttactcatgggagcaattgcgcgatgtctttgtccttaattttcgaggcacctatgaggagccgaagacacagcaacatctactcggcattcgccagagaccgggggagtcgataagggactacatgcgtcacttctcgcaagcatgatgccaagtgcaggacatcactgaggcatccgtcatcaacgctgcttcggccggactgctcgagggcgaactcacaagaaaaatcaccaacaaggagccacagacactcgagcacctgctccgcatcattgacggatacgcgaggggcgaagaggattccaagcgacggcaagtgatccaagtcgagtacgacaaggcctcagtcgccgctgtccaagcccaagtacaagcgcaagtatccgaaccggctcctctcgctgttcgccagtctcaaccaccggtccaaggacaaccgccaagactaggccaagctcctatgacttggaggaaattcagaactgaccgtgcaggcaaggcggtgatggctgtcgaagaagttcaagccctccgcaaggagttcgacgcccaacaagcaagcagccatcaacagcccgttcgcaagaaggtctgaaaagacctctactgcgcttttcacgggcgctcttcgcacaccaccgagcaatgtcgaaacattcggcagcgtggcaacgtgcaagatccaaagccaccacaaggacaagccaccgaaccacctcgcgaagctattcaagagcaagcgccaccggccgaacaccgccaggatgggcagcgcagagtaatccaagtgattacaaggaccgacccgccgaatcagctgtcaaaacggcaaaagaagatgcaacagtggatggtgcacaacatcacttcggcaggcgaaggggccccgcgatacctgaactagcagatctctttcgagccagaggatgccgaaggggtgctgttcccacatcaagaccccttggtgatctcggccgaggtagctggcttcgaagtccggcgaatcctggttgacggggggagtttggccgatgtcatctttgccgaagcatatgccaagatggggttgccaaccctagccctcacccaggctccagccttgcttcgtggttttggcggcgaagtagttcaggtattgggccaagtacaactggtggtagctttcggcataagtgaaaacaggcgcgaagagcagatactgttcgacatcgtcgacatcccatacaattacaatgccatcttcagtcgtgcaaccttgaacaagttcgaagccatctcccaccataactatctcaagctcacgatgccgggcccaattggtgtgatcgtcgtcaaggggcttcaaccttcgaccttatcaaagggcgatctggtagcaagcaggacagtggacaatgttgaggccgaaccacatgaccatgctaaacgcatgccgaagcctgcacctcacggcaaggtgatcaagatgcaagtcgacgacgccgatcccacaaagtttgtcctgctagggggcgatctaggcgaagaggaagctgaggatatcctgaaggtgctcaagaagaacattgacatcttcgcctagggccccgacgaagtgggaggtgtttcgaaggacctcatcatgcaccatctggcggtcaagccgggtgccaagccaaggaagcaaaagctgcgcaaaatgtccgctgatcgccaggaggcagcaaaggccgaagtacaaaaactgctcaaggcgggggtgatccaagagatcgatcacccagagtggttggcgaacccggttctggtgaggaagtcgaacggcaagtggcgcatgtgcgtcgacttcacagacctcaacaaggtatgcccgaaagatgacttccccctaccacggatcgaccagcttgtcgactcgacagctggttgcgaactcatgagctttttggatgcgtactccagctatcaccagatccacatgaatccggccgacatccccaagacagccttcatcacgtcgttcggcacgttctgccacctcagaatgcctttcggcctgaggaacgccggagcaacattcgccaaaatggtgtataaggtccttttcaagcagttggggtgaaatgtgtaggcttatctcgacgatatcgtcgtaaaaagccgcaagactctcgaccatgcgtccgacctacaggagaccttcaacaacttgcgcgtggctggtatgaaactaaaccctgagaagtgtgtttttggtgttcgcgcgggcaagttgttgggttttcttgtttctgaaaggggtattgaggcgaaccccgagaaaatcgacgccattcggcaaatgaagcctccgtcgagcgtacgcgaagtacaaaagctcgcaggccgaattgcggcgatcagtcgatttctctcgaaggcagccgaaagaggtttgcccttcttcaagaccctccggggcgcgggaaagtttagctggacacccgaatgccaagtcgcgttcgatgagctaaagcagtatctgcaaaacccacccaccttggtcagcccaacaccaggaagcgaaatgctgctttatctagcagcttcgccggtggcggtcagtgcagctcttgtccaagagacagagtcaggccagaagccagtatatttcatcgccgaagctttgcaaggggcaaagacaagatacatcaaaatggaaaagctcgcttacgctctagtgatggcttcgcgcaagcttaagcactacttgtaggcccataaagtcactgtgccatcgcagtatcctttgggcgaagtactatggggcaaggaaatcaccggccggctcagcaagtgggcggcagagttatcacccttcgacctacattttgtcactcgcacagccatcaagtcccaagtcctagcagacttcctggccgaatggacaccggcgttcgcccccgaacccgagtccgtcgaacagccttgggtaatgcactccgacggctcgtggtctcaaaagggggcgggcgcctaggcagtactcacttcctcagggggcgtgccgattcattatgccgcacggatgcagtacggcactaccaacaacatggccgaatacgaacctgtactattgggcctaagataagcataagaattgggggtacggagcttgctcattcgaacagactccaaactagtggcaagtcatgttgacaagtcttttgacgtcaaagaagatggactgaagaaatatgtggaggccgttcggtctatggaaaagtgcttcgctggcataacggtcgaacacttacctagaggccagaatgaggaagcagacgccctggcgagatccgccgcctgtggaggcccgcattcgccaggcatcttttttgaagtcctatacgcaccaagtgtgcccgcagaaagcctagtcatcctggcaatcgaccaggcagaactgggcgaagatgcagaggactggcgaacaccgttcgtcaagtacctcaagaacggctggctcccggaggatgaagcagaagcgaagcgcttacagctcagagccacaaaatacaagcttatctctggccagctgtatcgctctggggtgctccaacccttacttcactgcatctctttcgccgaaggagaggaaatggcgaaagagatacaccaggggctgtgcggtgcacatcaagccgcaagaacggtcgcctccaaagtgtttcgccagggagtctattggcccactgtgctgaaagtttgtgtcgagcaagccaagaagtgcgaaagctgccagcggcatggccgaagccaaactgcacctcagtacgagctacaacctatcgcaccagtatggcctttcgccagatgggggctagacatcgttggcccattccctgtggcgagaaatgggtacaagttcgcaattgtagccatcgaatacttctcccgctggattgaggccgaaccactcggtccgatcacttcagcagctgtgcagaagttcgtatggaaaaacattgtctgccgtttcggagtgcctaaggagttcatcactgacaacggcaagcaattcgactgacaaattcagagaaatgtgcgaagggctaaacctggaaatcaggttcgctttggtcgcacacccacagtcaaatggggcggccgaacgcacaaatggcaaaatccttgaggcactcaagaaaaggcttcagggggtggcgaagggtaaatggccagacgaaatgctatctgttctctgtgcccttcgcacgacccccaccagaccaaccaatttcagcccgttcatgcttctctatggcgatgaaacaatgaccccaactgatctaggggctaattcgccaagagtgatgttctctagaggcgaagacgggcacgaggtgtcactcgaactccttgaaggggtaagagtcgaagcactggaaaacatgcgcaaatacgccacaagcacttcggcaacttataacaaaaaagttcgcccgatagagctgttgcctggccatctcgtcctaaggaaaaaggcgaaccctgtggcggtcgggaagcttgaatcgaagtgggaagagccataccttatcaagcacaggtccaggacaggctccttttgcctagcgacgctggaaggcgaatagttcgaccattcctggaacgctgcttcacttaagctcttctatgtctagaacgggtggcacccaaattgccaacttgtaaaaatgtataatactgttatgtaagcctttcggcactatgtaagcccttcggcacaaaaatgcaaaaaaagaggaaaataaaaaaagagaggaaaaaaaactggatgtagggttattatccgccgtggaggcacgaaccaatataaaatccttgtgtttttcgcctctttacctgtgtgaatgataattcgtggaaaaaccccaaggcaaatgtcacgcccagaaattcacgaaccataatttctaagctgaatgtgcattaaacccttgtccagcaccagccagggtacacaaacgacaattgttgacatacagatccacgtcttacaataatataaaagattacaaatgcaacggaaatggaaaaagcgagctaagcctgaagacttgactcttgcagcgggcgactccattccacatgcattcctgatggtagcgacgaaaccaacctttctgagacagctccaactgagaagaactttagctctggagtaggggaaaagagagcaagactgagtactacccactgtactcagcaagtcataccggaagaggaggtatgatgcaggatatatccaaaggaggctagaggttcatttgcataaagctagtatttaaaagcagtagttgaaggaaataaaacagttgaagtaattaatcaatattaaccaatcactgtccaacactacactacgttgcaacaggcccaaccaaccacctgaactacaccagttcattagctaactaggggtgagactaatcacggtgaatctggtcgaccgcccataaccgcgggcacggctattcgaatagttttactctgatcagaggtgtacaactgtacccacaagacacagccccacaacacgttcccgtgcgccgacatgccaccacgacataccggaaagaggccgtgacaggaccttttgcataaccccctctaaccaatcgcaccacacctcaggtttcaccctcactcctcgcaaggcagcgggcagtcccctctcgtgccacggtgaatccggaagccgatcaaccggacaccccggccgacccaactccatcacgcccacccttgcctgggtacgtcggctagaggaaagctacactacaagcccagccgttgcccacgctggcttgtggtaagaacgataaattcttccagggcatcccgcgaaccggtccttaatcgccatgggcacaactagcaaaaccatgcacccacagcccaccatgtactgtattttaataaactaacaccattg

SEQ ID NO: 23381 - DNA, 16090 bp, Oryza sativa
tgggccttggccttcggccggcccagcggggaggggcaggggggagagaatgggccggcggcccattcgaaaagaaagggagggaaaaagaaaaagaaaaagaaagaaatgaatttccagggattaaataatgcttgtgctcaattttaattggttaaaattatttctagagctctgaaaattccactaaaaatcttgttagcatattttgacatgtagaactcaagaaaaattccacatgccatttctgattattatttgcattaattcaattagggtttctctctcttttacacaggtaatttctcgagaccatttattaattactttaggcttgggagaagaacttcagggtgtgaaaaacctacccccccccttaaatggaatctcgaccccgagattcggaagagctggcgaagaggtgcggatgggcggccttcaactcatcttccctttcccatattgcttcttcctcggagtggtggctccattgaaccctgcagaacctggtaaccttgtttctggttcttctttcactggtctcaaggatgcggactggcttctccacataagtcagatcttcttgaatgtcgatgtgctccgaattggcttgttcttctggtactcttaagcacttctttaactgagacacatcgaacacatcatggataccagccatgttggacgggagttctagctgatacgcgacttctcctcttcgttccaagattttgtatggtcccacaaagcgtggtgccaacttgcccttcgtctggaaacggtgtactccccggagcggagtaacacgaaggtacacataatcccctgcttcaaaagtgagctcccttcggcggttatcggtgtaactcttctgccgagactgagcgatcctcaatctttccctgacagttcagactttctcctctgcttccgttaacacatctgttccgaacagttgacgttcgcccgtttgatcccagaagagaggtgtgcggcacttccgaccatacaatgcttcaaacggtgccatttgcaaactggcctggtagctattgttgtaagagaattcagcataaggcaggcttttatcccaagctccgccaaaatcgagtgcacaggctcgcagcatatcctccaatatttggttgactcgcttggtctgaccatcagtttgcgggtgataagctgtgctgaaattcaaacgggttcccaattcttcttgtagtctctgccagaactttgaagtgaactgactccctcgatccgatacgatcttcttgggtaccccatgcaaacacatgatccttgagaggtaaagctctgctaatcttttgtccgtatatgtggtatgcactcgaatgaaatgagcgacctttgtgagacggtccacagctacccagattgagtcatgtcccgatgatgttctgggtaaaccagtgaagaaatccatcccaatttcctcccatttccattccggaatctgaagaggttgaagcaaacctgcgggcctctggtgttctgccttgacccgctgacaaacatcgcagagtgcgacgaattcagctatttccctcctcatgctggcccaccaaaatttttccttgagatcttggtacatattggtactgcccggatgaatggagtactgagtctgatgagcctcggtgagtatcagatctttcagctctttgtcatcaggtacgcatacgcacaatctttctcccagccagattgtgccatgttcatcttccaggaaatcccgggcttttctgaccctcatattctttttcagttcagctatttcaggatcatttatttgagctgctctgacttgatccataagcgtaggccgcgcctctagagcggccacaaacccgtgttctacgattcccaagttgagatgttcaagctcctgctgcaattccttacacatgccttcggtgcccaaagcattgcagtagctcttcctgcttaatgcatctgccaccacattggctttgcccggatggtagtgaatgctcatgtcataatctataattaattccagccatcttcgttgtcggaggttcaagtcaggctgagtgaagatatacttcagactcttgtgatcagtgtagacttcacagcagttgccaataagatagtgccgccacattttcaaagcgtgaaccactgctactaactcaagatcatgagtaggataattggtctcgtgtggacgcaactgccgcgaagcatatgcgaccactctgccttcttgcatcaaaacacatcctagcccttggcgagatgcatcacagtagacctggaagtctttcatctgatccggcagaattagaactggtgcagatactaacttcttcttaagttcttcaaaactttggttgcactcaactgaccacttaaaattttcatctttcttcagcaactgagtcatgggtctggcaatcttagagaaattttcgatgaaccgacggtaataacccgcaagtccaagaaaactccggatctgaaaaattgtctttggtggggtccacttagtaactgactccacattcgacggatccactgccacaccttgagcagtaatgacgtgacccagaaacttgacttccgacaaccagaagttacacttactgaactttgcatataactggtgctccttcaatttctcgagtaccagacggaggtgctgctcatgttcctcttcagactttgaatagataagtatgtcgtcaatgaacaccacgacaaacttgtccaaaaactccataaacactttgttcatcaagttcatgaagaaagctggtgcattggtgagtccaaaagacatgactgtgcactcaaacaacccataccgagtagtgaaggctgtcttgggaatatcctcttcccgaattctcaactggtgatagcctgatcgtaggtctatcttagaaaacactttggcaccctttaactggtcaaacaggtcatcaatccttggcaaaggatatttgttcttgataatgacctcattgagtgcgcgataattgacacacatcctcttggtcttatctttcttctccacaaagataatcggggcaccccaaggtgaagtactcagtcggatgtatcctttccgcagctgttcatcaacttgctctttgacttctgctagctcgttagctgccatcctataaggcctcttgtagatcggagcagttcccggtgccaaatcaatccagaactcgatttctctcttcggtggcattgtagtgaggtcttcaggaaacacctcaggatactcttgtactatagggatatcctctaactccttaggacttttctccactatttctgtctgttccttaatagcagcctgattcagacttgctacggacttctgcgacactggagaacggaaggtgatcttctcccctttgtcgttggttagggtgatggtgcgactcgcgcagtcgatcactcccttgtgtctggtcaaccaatccattccgagaatgacatctaggtctttggattcaagaaggataaggttggatagaaacggtgaccttttgatctctatagtcatcgaggggcagtagtgtgcggtgttcatgtcatttccaggggtatgaacccgcattggtattttaagttccactaccgacaatccatgtgtcccagcaaacttcttggaaatgaaagaatgcgttgcacccgaatcaaaaagaactgttgccggatatgagttcactagaaacgtgcccagcacgacctctggtgctgcttgtgcctcctctgcagacgcatgattgatgcgggcctggacgaacttgggtccagcacgctttagcttcggacacttgctagcaaagtggccgtgcttgccatagttgaagcagggtcctggctttcctgcagactccttcttgagctgttctgactgggctgacatagctggtagttctgactcagctggtgccattaatgggggtggagttgagttgtggtggtgctgctcactactgttgtgactgccaccgttgtagtcgttgttgaagttacccgagtggtagggacggtgctgacggacgatcagggtggaaggctcacccagctgtcccgtcatgaagcgaggcttctgactgttcccctgaggagtcctgaactgagctgcctttcttttacggtccattttgttgcgttgctcttcctgatggatagccttgtccacaagcttcttgaagtcctcgtaaactcctgagatcagctggttggtcaattcatcatccagaccaaacaaaaacttctcctgcctcttggcatcggtgcgcacgtcctcaggagcgtagcgcacaaggcggttgaactcatgcaggtattctgtaactgttctggttccttgttgcagtgcacggaactctcttcttttgtgccatgatcccctcgggaatctgtgccttcctgaagctttgacaaaactctgcccaagtaacctccgttgcatctagacgggttaccacgtagttgtcccaccaggcagaagcgggaccttgcaactggtgtgtagcaaaagcaaccttctcttggtcgttgcattgcagaaggttcagtttcttctcaatagcatggagccagtcgttggcctccattaggttggtggtgcttgagaaagtaagtggcttgatatagaggaagtctaacagcttggacaaatgtaatggtggaggaccagactgctggttctgctgcgcctgctgcaacatctcatggtaatgttgctgcatctgttgcatcatcattgtcatcatctgaatgaccattgggttctcgggcggtggagatggaatgttgctagatgcaccactggtatgtgctccattgatctgctcttcgctgccactggcgccgttggagtcacggggatcattccttgtcttcaccatctggaggaggataggtagaaataagagaaaggaagaaaacagacggcttagaaactaatctttcttatatatttatgtgcaattatcttaatcttgattaaaacacttaaaaggaagcaaacaactcctaattaaggcagccataccactaacacatgatatcgaccgccggctaacccacaagcagcaaacctaaacacagaaactagcaagcaacagactaagaagacgataaagctaagggcggtgactctgaagctcggagcggcgcttgcgatcgaggaataggtctgacatctaaagaggacagagggataggaaccaatacatgctcaaatccaaattaaacaaagcaacgaatgactcaagcaactagccaaacatgatgatttttatgcatggaacatttttcatgaacccaaacaaaagatactaatgcaaccgactaaacaataaattaatgcacgaaatagatgcatagctataatgatacgcataaaatctccccattgaacctagacacgacttagtgcatatcacctaataaattcccgactcactgtcaaataaattccgaataaaattttactagaccctagactgcctctagccgagaaatccgattaaatagcgatcaagatttttcccacaaatcaaaagaacaaaccccaaaattttcccgaaactaatccaagtgcaaagggcatgtgcagatgaaaaggtttcagagggctcttagggtttccaattggcatgtcttacggtcaaggtcggctctgataccaacttctcacgcccagaaattcacgaaccagaatttctaagctaaatgtgcattaaacccctgtccaagaccagccagagtacacaaatgacaattgttgacatatagatccacgtcttacaaaaatataaaagattacaaatgcaatggaaaaggaaaaagcgagctaagcctgaagacttgactcttgcagcgggcgactccattccacaggcatccctgacagtagcgacgaaaccaacctttctgagacagctccagctgagaagaactttagctctggagtaggggaaaagagagcaagactgagtactacccattgtgaatctggtcgaccgcccataaccgcgggcacggctattcgaatagttttactctgatcagaggtgtacaactgtacccacaagacacagccccacgacacgttcccgtgcgccgacatgccaccacgacataccgaaaagaggccgtgacaggacctttcgcataaccccctctaaccaatcgcaccacacctcaggtttcaccctcactcctcgcaaggcagcgggcagtcccctctcgtgccacggtgaatccggaagccgatcaaccggacaccccggccgacccaactccatcacgcccacccttgcctgggtacgtcggctagaggaaagctacactacaagcccagccgttgcccacactggcttgtggtaagaacgataaattcttccagggcatcccgcgaaccggtccttaatcgccatgggcacgactagcaaaaccatgcacccacagcccaccatgtagtgtattttaataaactaacaccattgcggtggcactaatccaaaactatgccaataatcaaagtctatgcattaatgtgattccccttttgtgtactagttgaactaagcatagctaaacatttcttaaaccaacatctaatcatattgatacccaagttatcaattgcataaggtaaacaatatatggctgagtagtaggacccatcccacatgatattgtaaaacaatgcaacatttaatagaaatgcgggacatttgtaaattgggtacaatatgatcaattgtgatgcatgacttgccttgctctcgcactgatgaaaccacagcaacgtcttcgagaaaccgcagatcgacgaaacggccgaaatctacgcgacaaacaaagcacacaagcaaaacatgctataagtctactgaaacaggaaacaaaaccatttttaatggattctatacatttttatgaatttactgagacttgaatggacttaaacggagctcggatgaattagatatgaattttagaagattcactgtgtttttactataaacagataaatccttaattgatttattgcgcaatatcttatcccagggctgacgtcatcaaggagggggcggcgccgacatgcccgacccacgggtcagcggctcaagggggaggtccacggtggaccggttccacggaccgggaaggagacggcgcaccacgtggtgcacacgtggcgccgacgtgccgcacacgtggcggcactggcagccacgcgggcggcgggattggacggccccgatctacctacgggcccggctcaagccggcccgacgcccatggcgcgcggcggcgcggctcgacgcagcggcggcgaccggccgacggcggagggcggcagcgtcgcggcgacgcggacggcgctagcggcggctaagcggctaggcggcggcgcaaggctaagcggcacgggagagagaggaaggggaggaggggcctcaccgacgacgattgacgacggcgagcgacggagggcgacggcgacggcgggacgagctccgggaccacctagcgaacacaaagaaaggggttagagagagagaggaagatggaagagggtgaggaagccgaccgaaagcggcggccatggcggtgctcaccggcgcacggtgcggagtgggttccgacggcggaatccgacgggagaggggtggacggggtggcccgctcgacggcgaacgcggcggcgtcgacggcacggctcggcacggcggctagcggcgactggagcggtggcggcggcggtggagaggagggcgacggcactaggacggtggagggcacgagggcgagtggttgcaaaacaaaaaagagagtggcggagacgggggtgctttatatagacccgcgggggtcaatcgtggccgggatggccgcgatttcgccggccgacgtggggaggtgggagaggagagagagaggcgggattcgaaaatcgaatcccggccgtctcgagagcgggagcggcgggatagtggggcggcggttgcgggacgcgcgggatgcatgcggggtgagggcgacgtgggcgcgggcacgcggggaagagcgcgagcggcggttgcgggcacggcggctccggccggaggtgggagacgggcccgacaggtgggccccacctgtcggcgacccgaagggaggagggaggaggcggccggctgctgggccttggccttcggccggcccagcgggaagggggagggggaagagaatgggccggcggcccattcgaaaagaaaaggagggaaaaagaaaaagaaaacgaaagaaatgaatttccagggattaaataatgcttgtgctcaattttaattggttaaaattatttctagagctctaaaaattccactaaaaatcttgttagcatattttgacatgtagaactcaagaaaatttccacatgtcattttttattattatttgcattaattcaattagggtttctctctcttttacacaggtaatttctcgagaccatttattaattactttaggcttgggagaagaacttcagggtgtgacagcaaacacccgatcagcgaaaacgctaggggggcaaaacgaatcggccgaagcatcgctcgccgaacgttgaaaccgcgacagcttgtttcgaaaaaaaccaaccgaacaccgttatactcaatccatgtgaaaacgtaactgctctcagcacgaaatgtcacggattgaaagcggaagttgaaagctaaaaagtcagcatacctatttcgctaatatacgcaaaggggccgacatgtttcgacctaacgaaagcacgaaaggtgccaatgcgaaaaatagcgaaaaggaaataaaacacacgtttattaacttcggaaaaatgattgaagaatactgccatacaacatggtacaagcaaagaaagcaatggcttcacggcctacctcacaaataaattacatcttcgcccccaaagcaatccccactcccaaagaaatggttcggcgaacatggttcgtcgtcactactaatgtcatacactaccctaaggggggaagggggcgaaacacaaactagactattttcacgcccgaaaattcactagtaattttcgaacttatttgtgcataaaatcctcgtccaggaatcagccaaggtacacaaactgacaatttaatatacaaattcatcaaattaactagaacgataaatacttacttaagaggcacttagtcctcaccaagaagtaaactgcagcggaaaataaaatctaacgaagctccggctccactcccacaggcagctcaactggggtataagccaaacgtcttctccttcgcaacttgtcttcaactgaggttgattaattattgcaaggtgagcatatgacatactcagcaagccacacagcaaatatgcaagtgcacaaggataccaaaggatggcataatataggctcatttgcaaaagcagcacttagcaaaacatttaagagatgtaaaacagtggagtaattaatcagaaattttaatcaacactgaacaacacacccatactgcacaggcccaaccattctgaacaaccatacccggctgtacagatctaactccaaaccaggagctaagcaaattattaccaggtataacatccataattattgtgagaggtgtgagactaatcatgaaaaacattgctcaacccgcccataaccgcgggcacggctattcgaatagttttactctggccagaggtgtaccactgtacccacaagacacagcctcaacatcatgtctaccatgcgtcgcgatactggaaagtacccgaatagaggctgtgacaataccctctgcacaacacaactcaccacagtgcaccattcctggatcataatcaccccctcaaaaaccagaggcatggactccccagcgacccccgtgggcttatctccgccacttctcagtctggtgctctgcaatgaatcatgttatacaaaaggtaaagccgttgcccacgctggcttgtggttggcacggttaatgtttcacaatagtagctcgcgaaccggtccttaattgtcatgagcacgactctcaaaaccatgtgctcacaacccaccattatcaagttttagttggcaagtaattaattaaccaatcacgattgaccatcgtgaactatcattaagccatcattaaataatagtgaatcataagttatcccaataatgtgctaatgtttctaagcatggctaagcaatcatatctaatatctagctgaaccaatatatatagcccaactagtcaagttataataacccaaggtatcaaggaataaagtaatcaatgcaaattggccataacaaaggaataggttcacaccacccagtgacattcgaaaataaatgcacagttgaaataaatagagaatttaaatataggatcaatatgctcaaaggattgtgtttaggatctgtgtgacttgccttgcaataatcggtcttcaattaatcttcttgaatacttccggcgcactcgcgaaccttcgcaacgacagaaacgacaagctaacacgcaaaacgaagaaaaagactaataaaaaccaaataaacaatacataaaaagtaaacaaacatgtagatcataattttagatgaattatgagacttgaacggcctcattctgacttcaaatgaatttattatgaattttacaagattaaatatatttaaagcccatttaaaaagaattaaataaatttaattcaatttatggacaattttaatatgtagatctttattttacacaatttttgcaacttgaaccacattaaactgagttacaatgaattagttatgaatttttaaagattacatcgattaaaacacttatatggattttaattgaattatgacgcaataatgaattatttttgaaaaggaaaaggaggattattgcgtcagcggctagggttttcggtggaccgggtgcacggcagcggttcacgggaacggacggccgagatcaaccctatccaaaacggacggccgagatcgaacggatccaccgcggctcacgggaacagcgacgatgacgtcagcgatgacatcagcgatgacgtcagcaccggcggcggctcgggagcacaagctcgctggcgaacgacggcgcgacgacgcaaacagagggcaccaacgggtagagggcgacgcggcgaactcaccggtgaccaaaacaacggcggaaaagcaacggacggcgccggcgatgaggaagaagcggcggcaaccttcgggtcgacggtgacggcgatgctccggcggtctccggcggcggcgaaggggcggacgaggacggcggcgacttggcgaccacgatggcgatctccccgaacgacggcgacgacaggagcgacggcggcgcacggctggagcggcggcgacgacggcggcgcgaggcggcacggcgctagggcgctacaagcgacgagaggcgaaggcgagggtggcagcgggtagaggagagctcaggggtccttttaaaggggcaaggaggcggcggcaaaggcccacggtgaccggcgacgacgaaggaaagctagggctcggagagagtagtcgatccgaatcgaactcgaatccacggatttccaaatgaaattaggcgatgattccaaaagagaaaaggaagaggagatcgagaagatcatttcccctctaaagatttcaccggagaaggaaagacgcggccgaatttggaaggagacggcggcggcttacgctagggtttcgggcggcggcggactgggccggactgggccgagggaaagagagagagggttttgggccggctttcggcccaaagccaaaagaagacttttaaaaacctttttcaatttaaattattcatgaaatgcaattccatttattaaaaatacttccttagctcaaataaatcccagaaaaatctaggaattatagaattaagcaaagtatttaacaaaattttatctagcccaattttatgttgagatttagcaaattaaaattagatcttctcttttaggcttttaaaatcatttctaataattccttttaaacaacaatttataatttacggatttttaaacaagaaaagctcttaacaattataattagatcattaatgatcaaataattactgaactgttctttgtatcatttaggaattgagctctgaaaaatccgagaaaatttcagagagttgacttaatcatggagaatttaataaaaattaaatccatccatgctttatatttaggaaattttatttcccacatttaacttcacttgtaaattaaagaacatttaatataaattctaataataatttattaaataatttataaatcctaaaacgaaaatcaggatgtgacaactataacgacgctgggcgattgcttcctgacgatcggatttctgatggtttcgccaaaagcgaaccatatcctcccgacgttcggtatggacactatcgtagtcttccagggttcgcccgggtgcgcccgcatccagctggcaaccttcaaaaccttgtagctgttgccgttgattatcatctcacggtaaactggccgaaacggacaccacaccttcggcaaacccttcaccgctacgaacttttcgtttttacttcgccaataaccaaagagggcccgaatacacagtttccggcgagcaccctgataaaatagcacagcaaaggcaaataggaaaaacgctgagttaagacatgaaaaagtgggcaaaatggaaaaactgtcgtacgcgaaaataatgcgaagataacgcgaaaatgatacaagcgcatatgccgaaggcttcaagcacaacagttggctaaactagggtcattcatttcatatgttaaaaaagccgcttttggctacaactagaaggacagagggccatcgaccaaatatacattgttcgccctccacgacgaacacaaaaataaagccacaaaatctaaaaagcaggcggagggcctcacacctctgggtgatcctcggcatcgcctctgcccccgccggccgtcggctcttcgccttgatccgccgcctccgcctttgccagttgcttgagcaggcacgccttagcagtggagcggccgtccttctgccagaactgcttacgccaagctcgcagagcgggcgaaacgtcctgcggactaatttcccagtcccctttcgcaaagttggggaactcggcgacgtgctcgcagccgaactgctgcagaaggcccaaggcgaaagtcgcggacacgcgcgcacagctgtcgccatacgtagtggcgcagtccgagaccgcaccgccggcctgctgagtccactcggagaagtcgaaggcggaagcaccttcgccagggactccgcgcattctcgcccccatgtcagaaagggcgaggcgaagagtttggctacggtctttgcggactcggtggctttcgccatctccagcgtgaaccgttgcgcttccatcttggcattcgtctccgcttcgacgacctcttggcgaagagcctccatctttggctcggtaaagttgtagtagtcggtcagagcggcggaatgagcctgctcttttttgagctcggccttgaggcgctcaatctccgccttcgcctcactcccctcctccagttcagcccgaagccgcttgttctcggccttcgtctctttgagggcgtgggcgaggccttccatttccaggctcttgcggcccagttcgtcatctttggctcggagacggttcttcaaaccatcaagacgagcccgcatggttcgctcggtcgaacagtgggccgcgaggatctggttcaaaggtaagagagatagagcgaatgttaaagacaaggtgtcgaaaggtggcgatcaaaataaaaaacgacaatcaagctacgtacccgaaccgccaagctcttgacggcagagcagccctcgtcgaactcgttctgctctgtgaacagactcgagctgccagccggagaaacgagtttgctcaccccctcgacaaacgggataagttctgcccgggtttcgaaatcgccaggggcaaaatggggcacggcaagggagtaatccgaaacggatgtttcgaccgccgttttcttctccttcccaggggcgagcggcgaaacaaccggctggcgaacagggctgccgaagaccctagccgcggtcttcgcaacctgatcgattgaggccgaagccccggcgacactcccgccaaccctgcccgcatcgaccttaacgccgggagcggtcgaaagacccaagcttcgacaggcgggcgaagtaggggtctcgtccgaggactcgtcgtcactaaagacgcgaccgacatcgacgagcctcttcccggaggtctttttaattgaaccccccttcgccaccttggccgcagcgatcgcgaccagcgccttcgccccctccacatccttttggcggagaggggagcagttcgactccaccccagtctcgacaggctcggggctcggggttggagtgtagccgggcgtctcggcgcgattatcggcggcttcgccagcggccttttcgcccacagcttccgtctcccccacatccccctcctcctcttcgtcgtcatcttcgatggtctcctcgtcatcggtgtcggagtcgggggcccttcgcttatgaggggtcctttttacctgccagcgcatccgcttgcgcgaaggccctgcatcgtcatcggtcctgtgagggttcgcccggggaggcagttcgccaccataaacccggttcacccggccggccgcctgccgcgtgagcagctggctgaactcagtgaccgacacgtcgccgatcatctttcgggcttcagtgtcggcctgtgcaagagtcaaaactgcgaggacgaaaggtgcaactatatcatgcgtcaaaccgggaaaaagagcgaagcacaaaagtatggttaagcatagactcaccattcgcccccgcaggcatgacgagcttcggcaagccgtcgacctcctcgtcttggtcgatcccgacttgccacgactgggaaagggggaagatgtgaagcatgcataactcctccaccaagtcgcggcagctgaggcgagagcagatccggcatagcagaacgaaccgggcctccatggcgccatcgacgacgaccttgggcttcctgttcggcgagatcgccccgcgtcgccacctgagggcattcgccgcatcagacccagcctcgaaggggatggagtggtagaaccactttgccatccaatggcgatcccacttcgacatggttgcgttcaccggctagagatcggagcgctcggggcgaacattgaagttcacgctcccgaatacagtcttcttcgtcccggccggggtgaccaccgtcttcgagttcacagtggcgaagaataccacgccgaagaggtcggcgctcggttcgaatccggcggtctggcacgcccagtcaaagatggcgatgcggacgagcgccgacgggctcaggtggggaagctctgtcacgcccagaaattcccgaatagaatttcaagcagaatgtgcattaaaatccccgtccaggaccagccggggtacacaaacgacaatgttgacattcaaatccacgtcttacaaacatcataaaagtcttacataaatgcagcggaagaaaggaaagacaacaggagctaagccttgactagaactgcagcgggaacaccactccacaggcatcctcgacagcacggacgaagcctactcctcagagacaccttcttccaacacatactcgtgctctgaggttgggaaaaatagagcaagactgagtactacccactgtactcagcaagtcataccggaatagaggcatgatgcagggaatcatcaaagaagagctagagtggttcatttgcataaagcgagcatttataaacagaagttgaaagattaaacagttataatacttaattaatattaactatccactgtccaatgctatcccatgttgcaacaggcccaaccatccacataaactatcggg

SEQ ID NO: 23382 - DNA, 18078 bp, Oryza sativa
ggagtgggcgcggggaacccggcgctcgtgcgggcgtggtcgacgtggcccgaaggaggcggagacgtgggcgcggcgacggttgcgggcgcggcggcgcggcgggaacggcgggaggtgggggaaggacccgacaggtgggccccacctgtcggtgaccccaggagaggagggcggcggggcggcctggctgggcctcggcctgcggccggcccgggaggaaaggagagaatgggccagcggcccattcgaaaaaaggaggaaaaagggaggaaaaagaaaaagaaaaaggaaaaaggattttccctggaattaaaatattgcttgctcaattttaattggttaaaattatttctagagctctgaaaattccactaaaaatcctgttagtgaatttcggcatgtagaagtcaagaaaaattccacatgccaattccgattattatttgcattgatttaaaagggtttactcgtgctttgcacctgtattttcttggggtcatttataaattaaattttaggcttgggaggagaacttcggggtgtgacaaacctaccccccttaaacggaatctcggccccgagattcggaggagctggtgaagaggtgcggatgggcggctttcaactcatcctccctttcccaggttgcttcctcttctgaatgatgactccactgaactcggcaaaacctggtgaccttgtttctggttcttctttcactggtatcaagtatacgaaccggcttctccacgtaggttaggtccttcctggatatcaatgtgttccgaatcagcctgttcttcgggtacccttaagcacttctttaattgggacacgtggaacacgtcatggatgccgatcatattggatggaagttctaactgataagcaacttctccccttcgttccaagattttgtatggtcccacgaagcgtggtgccaacttgcctttgttttgaaaacggtgcactcctcggagcggagtgacacgaagatacacgtaatctcccgcctcaaaagtgagctcccttcggcggttatccgcgtagctcttctgtcgagactgtgcaatcctcaacctttccctgatgattctgactttctcttctgcttccgctaatacctctgtcccgaacagttgacgctcgcctgtctgatcccagaagagaggtgtgcggcacttccggccgtataaagcttcaaacggtgccatctgtagactagcctggtagctgttgttgtacgagaattccgcatatggcaagcttttgtcccaagctccaccaaaatcgagagcgcaagctctcaacatatcttccaagatttgattgactcgctcggtctgaccatcagtttgcgggtgataggccgtgctgaaatttaaacgggtccccaattcttcctgcagcttctaccagaattttgaggtgaactgactccctcggtcagatacaatctttttgggtactccatgtagacacatgattctcgagaggtagagctccgccaaccttttgcccgtatacgtggtatgtactggtatgaagtgagcaaccttagtgagtcgatccacgactacccagatggaatcatgacccgatgatgtccggggcagtcctgttataaagtccattccaatctcctcccatttccattccgggatttgaagaggttggagtaaacctgctggtctttggtgctctgccttcactcgttggcaaacatcgcagagtgcgacgaattcagctatttctctcctcatgctgacccaccaaaacttttctttgaggtcttgatacattttggtgctgcctggatgaatggagtactgggtctgatgagcctcggtgagtatcagatccttcagttccttgtcgtcaggtacacacaatctttctcccaaccagattgtgccatgctcatcttcatggaaatcccgggcttttccgactctcatgttctttttcagctctgctatttcagaatcatttactctgctctgacttgatccacgagcgtaggccgtgcctccagagcggctacgaacccgtgttcaacaattcccacgttgagatgctcaaactcctgccgcaattcctcacacatgccctcgatgcatagggcagtgcagtaacttttcctgcttaatgcgtctgccaccacattggctttacccgggtggtagtgaatgctcatgtcatagtctttgattagttccaaccatcttcgttgtcggagatttaggtccggttgggtgaagatgtatttcagactcttatggtccgtatatacttcgcagcggttgccaatcagatagtgcctccagatcttcaaaacatgaaccactgctgccaattccaggtcatgagttggataatttccttcgtgtggacgcaactgccgcgaggcatacgcaaccaccctgccctcttgcattaggacacatccaagtccatggcgggatgcatcgcaatagacttggaagtctttcatctggtcgggcagaatcaaaactggtgcggatactaatttctttttgagctcctcaaaactcttatcgcactcagctgtccatttaaacttctcatctttcttaagcaactgagtcatgggtcgggcgatcctggagaagttttcgatgaatcggcggtaatatcccgcaagtccaagaaaacttcgaatctgcgacacggtcttcggtggggtccatttggtaactgactctacgttcgacagatcaactaccacaccctgagctgtaatgacatggcccagaaatttgacttccatcaaccagaagtcacacttgctgaacatggcgttagctggtgctccttcaacttcttgagtactagacggagatgttgctcatgttcttcttcggactttgaatagataagaatgtcgtcgatgaacaccacaacaaatttgtccagaaattccatgaacactttgttcatcagattcatgaagaatgcgggtgcgttggtaagtccgaaagacataaccgtgcactcatatagcccgtaccgagtggtgaaggccgtctttggaatatcctcttcccgaattctcaactggtggtagcctgatcgcaggtctatcttagaaaacactttagctcctttcagttgatcaaattcgaacaaatcatcgattcgcggcaaaggatatttgttcttgattgtgacctcgttgagtgcgcgataatcaacgcacatcctcttcgtcttatcctttttctccacaaaaatgatcggagcaccccaaggtgaagtacttggtcgaatgtaccctttctgcagctgctcatccacctgcttcttgacctcggctaattcattggccgccattctgtacggtctcttgtaaattggagcggttcccggtgccaagtcaatccggaattcaatctctctcttgggtggcatggtagtaaggtcttcggggaacacttctggatactcgcagactatggggatatcttccaatttccgcaagttcttctccacggtgtcctctgggattttcgtctcaatctgattcaaagagacccctcgctttggtgagtctggtgatttgtacactaccgtttctcccttctcgttggtcaaggtgacggtacgattcgcacaatcgatgactcccttaaacttggtcagccaatccatcccaagaatgacatctaggtctttagattcgagaagaatgaggttagctagaaatggtgatctttgaatttctattagcactgaagggctaaaactgactgaggttgaactatttcccggggtatgaaccctcattggtgtgctaagctcttctttccttaacccatgcatcccgacaaacttctttgaaatgaacgaatgcgttgcaccagaatcaaaaagtattgttgcagggattgagttaacaggaaacgtacccagtacaacctctggtgttgcttgtgcctcctccgcagatgcgtggttgacacgagcctggataaaccttggcccggcacgcctaggctttgggcatttgtcggcgaagtggccaagctcgccacagttgaagcaggaccctggttttgctccagtctccttcttggcttgcgcgggcgggcctgactgtgctggtgccactggtgggcgtggagctgcaccgcggctgggctgacctccatgatggttctgactgccactggcgccctggggaaagttgctagggttgaacgggcggtactggcggacgatcatggtggtaggtccaccctgctgcccgggggtgaagcgcggcctctggtgacttccctgaggtgccctgaacagagcggccttcctcttcctgtccatcttgttgcattaatcctcctgacggattgccttgtcaaccagcctttcgaaatcggcgtaatctccagatatcaactggttggttagctcgtcatccagacctgccatgaacttttcctgcttctcggcgtcggtacggacatcctctggtgcatatcgcgctaggccattgaactcatggagatactccgtcaccgtcctgttgccctgatggagtgctcggaattccctcttcttttgtgccacgaccccatctggcacctgcgccttcctgaagctacggcagaactcttcccaagtgacttcagtacctggtgggcgggtggccatgtgattgtcccaccaagccgacgcagggccttgaagctggtgtgtggcgaaagcaaccttctcctgatcattgcactgcaggagattcagcttcttctctatggcatggagccagtcattcgcctccatagggttggtggtgctggagaaggtgggtggcctgacacgtagaaactctggcaacttggactgagggggagggggaccaaactgctgatgctgctgttcggcgtgctgcagcatcctctggtgcatctgctggtgctgctgctgcatctgctgcatcatggctgctatcatctgtgtctgatgtgccatcacttgggctagcgtcggattctcgggaagtggtggcggaccattgccggaattgctgttgggatgcacaccctcagtgcgctcttcgccgttgctgccctcacccgttgcgcggctaccattcctggtgtaaaccatctggaggaaaagcatacggggaaaagaagaaaaacagatgctcaggaactaagctttattatttaaactgcaattgttctgatctgaattaaaacacttaaagagcaagcaaaaatccttattaagacagccatatcataggcacatgatatcgaccgtcgactgaccccaaacaagcaacctaaacacacaaactaacaaacaaatgctagacagtcgataaactaatggaaaacgagcctaatgctcggaacggctcctgcggtcggtggagtcgaaggcgtcctcctgctcgtcaccaggtctctctgagcgactcctggagcctggcagataagtctcgccgctgcccgactctgagccactggagctgctgctgctgagatcgcggctgccactgggagtagcagacaaccaacctccgttgccactggctggacccctggcggctgatgctggagcgaaggagagagcggacgcgggagctaacacgtgaacgggagctggagctggagctgcaggaactgccggagctgcgggcggaggtgggttcctgggcgcaagctggatgcgcacgggtttcgtcgtcgtcttgcggggtgtagtgcggatccggactcctcctggcgcgggaagaccctttaactgagcattctccctcttcaggcgcgctatctcatccttcaaagcgacgatcctcatgagcttcccatcattcaaggccttggtcgccttgtgcagatccgagtgcatcctatccaatcccctcatcacagcacacatgtgaccaaaggtggtgtcgttctcgccagctgtcggacggaaggtactgacatcatcaccactggctcgacgagggtgaaatcggtacgccgtgtcatggaagatgtagttgtggcgctcccgtagtctggccatcatcaggtatgctgcctcctgacaggcgtgatctgctgtgcctccagatgcctcaaccaccatgttagctaggcaggtacccacgtagccgtggacctccaggcgaacacggtgaggaagctcgccactgagcggtggaaccgtcgtgtactctggcgcattggggtagcccaccaccagcgtcatacgtgccaactctgccacaaagtcgatcatgccttctccacagtggttgggtgggtgtccggccatctagagaagacaaaggagtaggatcaatgcatgctcaaatccaaatttaaaaaaagcaataaaagactcaaataagagaatcgaataagagcgaaattttatgcatagatcattttgcatgagagcgaataaataagacagactcacataacgataaaataatggggaaattagatacatactaataataacactaagagcataaataccttgcaacccatgttcctgagctaggacctaatgcatttcacccatcaaatcccaactgactggcgaataaatctcaatagttttactaaaaccctggactgacttgttttgacaaatctcacttaaacgagcgaccaagatttttcccttgaaccacaagaacagatcccaattttcccggaacaaatccaattgcaaagaacatatgcaatgaaaaggattcagagggctcttaggtttttccatttggcttgtcctacggtcaaggtcggctctgataccaacttgtcacgcccagaaattcccgaatagaatttcaagcagaatgtgcattaaaatccccgtccaggaccagctggggtacacaaacgacaatgttgacattcagatccacgtcttacaaatatcataaaagtcttacataaatgcagcggaagaaaggaaagacaacaggagctaagccttgactagaactgcagcgggaacaccactccacaggcatcctcgacagcacggacgaagcctactcctcagagacaccttcttccaacacatactcgtgctctgaggttgggaaaaatagagcaagactgagtactacccactgtactcagcaagtcataccggaatagaggcatgatgcagggaatcatcaaagaagagctagagtggttcatttgcataaagcgagcatttataaacagaagttgaaagattaaacagttataatacttaattaatattaactatccactgtccaatgctatcccatgttgcaacaggcccaaccatccacctaaactatccaatttcaaaagattacactagggtgagactaatcacggtgaatctggttgaccgcccataaccgcgggcacggctattcgaatagttttactctgatcagaggtgtacaactgtacccacaagacacagccccacgacacgtttccgtgcgccgacatgccaccacgacataccggaaagaggccgtgacaggaccattcgcataacccccctctaaccaagcacaccacacctcaggtttcacccccactcctcgcaaggcagcgggcagtcccctctcgtgcctaggtgaatccggaagccgcataggccgtcgcagggcccatccaaactccatcacgtccacccttgcctggatgcgtcggctagaggaaagctacgctacaagcccagccgttgcccacgctggcttgtggtaagtacgataagttcttctagggcatcccgcgaaccggtccttaactgccatgggtgcgaccagcaaaaccatacacccacagcccaccatgtgatttattttaattaaccaacaccaaagcggtggcactaatccaacaaaaccattagaaccaacagtctaaacattaataagatcttccccattgtgaactagttgaactaagcatggctaagcaatccctagtccaaactctaatcatgttataaccccaagctgacaaagagacatggttcaacaacagcatggctatgacaataggtaaacatcccatagtaacattataaaataatgcaatatttgaaagaaaacaacagagcatttgcaatataggatcaacatgttcaagtgacaagcatgacttgccttgctctgctgctggaggaacctcggcgactatttcgaagtacaccggagcgtcggaggaaccggaatctagcgacatacaagacaaacattgcaaacaggctataagactactgaaacagggaacaaaaccatttttaatggattctacatatttttcttgatttactgagacttgaatgggcttaaacggagctcggatgaattaattatgaattttagaagattcactgtgtttattactataacaaaaatccttaaatattttattgcgcaatattttctagggttgacgtcagcacgggggaggtgcggcgccgacatgcggggcccactggtcagcggctcaggggagagcggttcaccgtggaccgggaccacgcgggtggtccaccgccggtccacggaaccgacggcccagatcgccctcggggccgatcggacgggcggcgatagaggcggccgccgggctcggctcggcatcaaagccgaccggccggccagggctaatggcggcggcacgcgcgcgtcgcgttgccggcaacggcatccggcggcggaggcgacggcgcaaaagcgacgcgaaagcggcggcagcggacggtggcaacgaccgaaggcgacggcgagcgcgggcggcggcgacgcacggggaattgggaaagaaaaggaaaggggagggagtcctcaccggaggggacggcggcgtccggcgacgaggagcgacggagggaggtcaacacgcggcggacggcgaccgggacgacctaaagaacgaaaagaaagagattagagaggaagagaggggccataggagacgggaatgccggccgaaagcggcggacatggcgaccctcaccgtcgcacgatgggaatggcgctccggcggcgaacctcgacgaaggcggggtggacggggtggatctcggccacgcgaacccgacggcggcgacggcgcggtgcggcggcgaccccagcggcggctagcagcggccggagtagcggaaacagcggcggcaagaggttgcacggcgcgggagcgatgggaggctcgggagagttcggcgaaatggggaaaaagcgagagggggcgacggagaagcttaaatagggagagagggggccggacgtggccaagagaggcgggaatcgccggccgacatggggaagtggggaaggagagagaggcgggattcgaaaatcgaatcccggccatctcgggcgcgggcgcgggcgggagagagaggggagtgggcgcggggaacgcggcgcacgcgcgggcgtggtcgacgtggcccgaaggaggcggagacgtgggcgcggcgacggttgcgggcgcggcggcgcggcgggagcggcgggaggtgggggaaggacccgacaggtgggccccacctgtcggtgaccccaggagaggagggcggcggggcggcctggctgggcctcggcctgcggccggcctgggaggaaaggagagaatgggccagcggcccattcgaaaaaaggaggaaaaagggaggaaaaagaaaaaagaaaaaggaaaaaggattttccctggaattaaaatattgcatgctcaattttaattggttaaaattatttctagagctctgaaaattccactaaaaatcctgttagtgaatttcggcatgtagaactcaagaaaaattccacatgccaattccgattattatttgcattgatttaaaagggtttactcttgctttgcacctgtattttcttggggtcatttataaattaaattttaggcttgggaggagaacttcggggtgtgacaagctccacctggaaaaggcgaaggatctcaggcaacagtacgttgcacggaaaccgaagccctgccttgaagaacatggcgaatacaaccgtccggttgtcgccgggcttcggcaccacggccttccccggggcgaaagcttgcccctccaccaccgcgccagagctgaccaactttgccaactcgtccttatccacaagtgaaacccctaaaaaggcggtgttgtcattgtcgatctggccgggatcgcggcccgtcgcggaggccggattcggtttgcggggagccatggcgagaagcatgcgctgtggcaaaaagggtgaacgggcgaacgacctagcgactctaagggcgctgtgaagaaaagagagagaaagagagtgatcttgcggtgaaaatgacgggggagcggcggtgaaaaaggggaaggggagatatatatagcccacccaggcaacagttcaccttccacccaaccacgagccgccgcgtgtcataagggtaggcgaaatggtaaattcccattgaccaggccgcacagtgacaagcccacgaaggaaagcccatcactgttcaacccggcccagcgaaagaataataccaacttcgccgattcgcagagtgtgaaagctgtaacacattactaaccacaggaataatgtatgcgcagtgcacacatcctttacaggattccaagacaggtttcggtaggagcatcggtcaaaagggggcgtctcataccataccacatagtttgcatggtctcggccgaagctcctatctcacccttgcccgtgaggggcttgttggcagtatgtcatgagacccttcgaccagacctgccgaaaccgtgcgaccagtcaggattcaggctcaaggtgttaagttcatcggggcgaagccccatggtgaaagcggtgaagccacatggcgaagacaatggaacgaggacggcaaaagatggagccccatggcgaagactgtacatcctgggcgaagggtgcccgccgaaggagggtgacttcgccatcctggccgctttggccggcctttgggccggcattcgccaaccaggcccattagaggcccatgtatgccaatgacactgtatacccatgtaaatgtccctttcacaagggcaaccatgtaaattcccctgtaaaacctaaaccctaataggggggcctgtaacaaggatataaatagacccctagggccatgtaaaggggatcccaagaaaaattctcaatctaatacactttactgttttccaaccatcgttgagtaaccacatccttcgacgtatacagttgttatttcgacaacactctataaataccatctgcgggtatagcccatcatataaaaacactatttatcatatatataaaaaaaggttatcatgagcaaatattcgtttgaacaaattcaacacaatataataatagatttaacatggtcacgcccatacaaaaccgaagcatccacgctagttcaatatatattactaagctaacatgttcacaggtccatgataacattttttttagatataataaataatatatttttcatatgtttgtatataatttctctcatattctaacgaatatttgcccataataatttctcccatatgataaatagtattactttgatttgacctaggggtaaaagagtcatattaagtctcatttcatacttgcaaagctgacatttcattttaattaggtaaatttggtaatttataaagagtagctctctctgctgtggcatttatataaagaaatttggaagagtgtcttagtgtctttccgtaagagcggtgaatacttaaaaacccctggggggggcagcatgaaccctgccctcccaggctactgctaccttgctgacgcaaaaggatggagatattttgatgatttaatcaacaaatagggacaaaactattttaattgaaagaaaataatattacggttaagtccccagttgagtgatattcgtggcgaagtctcattttgataatagtagaatgtcaattctctccatcaaagcgagggttgatgagaagacactcgtaagaaaattaccctcttcaaatatttgaacgtatcattgtgatttgtgaatgtcacggcaaaaaatccataatggtgattttgtttccattcttattatcggcaataaatgtaggtgaacagtagtatgagaaataaaatccatgagatagaatatagtctcggattacaggtttcatctaatgctaaataagttaaccacaagactattcgaaattacactgtattccatatagtattccgaatattccaaattgtgcctactaatgcggaaatgtttttggcagaggcaatgattatatgaaaccaaacatttcattcccattagtaattacactctattccgtagagtattctgaatatccctaattgtacccactaatgcagaaatgtttctggcagtaagatgatatgaaagtgaacaattcatccccaccagttctccattcttgttgatcaccggagtcccgaactctgccgaaacactcaccgcgcagttgtgcgagaactcatgtccattcaatgtcctgagcacaaacaaaatcagcattttattattatatagacgactattgctgtagcttatttacttgattatatggataataaatcaaatattttgaaaaataaacttaacaaatattagtttaaaacaagtggttaagcaatgaaatagaagttttttttgagagaacgtatttttcaaagcacgaagcaaataatctgctgattaagctgaaaatgacagggatgatatacatacatatgtgtgacatttcctggaattagttgcccatataagccattatatacatacactgcttcggacatctgaagcggctgattgcacatttcgaccctcttaaaaagatcggtattgaacttttcatcacccggacagcaatagattccaaccaatccatttgtaatattacagtgcttgggaaggggttttatgcattgttcccccggaaagtcaaccgtgattttatcagctgcaatatttccctcaaacgcacgagcatctgctacaatatatgcataggtcggatcacactccacaataataccattttgccgaatagttctttctggagttttttcgatggcaatgttcaccacacttctataaatgccattatacacctggggcacaaacagacaatttatgtacttatgtagtgacccgtcaaattagataatacggtactgtagtaggcactagttgctcaggatgctcagttctctgtgtgtttgtgtgtgtgtgtgtgttggggggggggggtagccaaggcaccatagaaacacttgccgattccgtgattctgggatccacctgacttaagcataaatctactaatctaaagccgacagttttgctggcatcctatttgtccatttggcactacaaattgcaagagatttggtgaaatcatgtctctcgcacttggtcactctagatcaatccggaaggtggaacgacatattgaccattggaaaaaaaaacatagagagaaagaaggcaggccctggctgctctctctactaggaccgtatggcccaatatacacatatgggcttattgcgcatggacggaaaaagaagaaaaaacaaaagaacataacgcataaaatcattcgacaaataagatatactacaggtaaagatggtagataaatacgatataatatgggttaatttcagaaattgagacaagtatgatgactatatttataatatactacgctctccgtccctaaatatagcaacttctactaatgtatttggacatggccaatgtgctatattttgggaaggagagagtatatttctagaaagaaacaataaacaacaaaattaaatgatataaattatgtaacaatattgtatcaaactttgcattcctaaaaatccttttttaagaatatttagtttccgatagattctcatacatatagaaaagtacaaatcacagcaatttcgagataccatatccttccttttatttttactaatagtatatatagttatttgtcaaacttaaagagactcaatccaacaaaattaatggcaagcatatattattattactatgttattttgatttacaatccattaacacgtctttttagtgtatactttctgtaggaattaaactaagttagatagtaacaaaaataactaacccatgtaaaaattatacaaattattttctgtgctatagaagagctctaaataatatgcaagggccataaactaaccggcgccaactggggcgtctatttttctagtaaatgagtaaacactcaccggatctggcgccggatccataggaggcgggctagaggcggaggtgctggaagcgcaagggaacgacggcgtggagcgagagacttcgttggaggcggtaggggcccagcgcctccgccgcgcagccagtcactaggccgcaccagatccagacatggatggatggagacgaatgaggagggaacagttgacgagcgcgtgcccagactccgccttggcctgcgcccactctgggctgggcaccgccgaccggccgcctgctcgccgcgaggggggagctagcaaagggagacgacgagacgagagaagaggcggcggcgctcggttcaggggcgagggagagagtgtagtgtgcgtgtgcgtgtgcgtgtgcgctggtctggtgggcttcgaggagggagggtaccacggactgtttagggcttgtgggctggtcgtttagtgctacttactaggaataagtctattttgcctcccacaagtcttgctcttggatgaatctcacccctcaaccgtaaaaccgggtataacgcatcccccaacttctaaaaccgatgcaaatagagtcccttggtgattttaatagcggtgtcatcatacgtggcacttacgtggcgggttgacttaatctttatcccatgtagtattgacgtgacactaaaaataaaaaacctagatagcatccacatgttagtgagtaaaacaataaaaataaatatcagacccacgtatcagttaccctttctttctctcaggtcttcgcctcttccctgcgagtgacaggggatagatgccaggagggagcaccgtcttggcgttgtccgtcccgtcgagagggcggcatataacacacggccacggcgctcctcgaagtccagccggcggcgacgttcccgtggactgcgggatgagctggcgtctcagaaggtggtgctcgccgagatggcgcaggaagtgggccttcccaccagtgagtgcatctagtgtatcatctcgacggttattgtcgggaggtcctccttggggatgctagtgtgctccccaacattattgtattcaacaccttgctcatgggctttctcgaggacaacaaacactaagccgttttctgacgttgttagcaaactgagctcacaaacactaaaccattcccgaatcttttttctgctagctcaagaacagtaaaagaaaacgattttttaatctgcatcttggggttcttgcagattcttgggatgacggagcgacgcaaggcccgggagggcaccgccacctacttgtcgtcgcaccactggatcaggagagggctatcgccaaacattgcctatgcccatcgcctcattgccgctgccaccaaatctgcttcgctgcccttgctgcgggcctgcgtcgtagtgacgagcatgccaccacttagagtcaatgacgcataggccatcatgtatatgtgacatatatgagtacagcggtaaattattaattaccacttataggagtgacaaataattaaatatctcaaatttaagagttaaaactctatcaaacatactcttatctcattacgttttgttccgtacctagacaaggcacggccaatcctgtccatccgatcttcgaatcaaatagaccagatctcctcgacgcaatccccttgatccgtgcctccacgcctctcccgagggtacgcctaatgggcgatcgatcgccctggggatggggtagcgatcagattcgctccccacctccccctctctcccttcacctggttttctttttttggcaccgcattacttttctattttagtaaatttatatacctaaagtttatacacctcaagtttacacatctaaactttagagaccaaaagtttataagtcaaaagtttatatatccgatttaaatttgaatttgaattcaaatattttttatatatagtatttctatacatctaaagtttatacacctaaaatttatagacctaaagtttatatacccgatttaaatttgaatttgaattgaaatattttctatatatagtatttctatacatctaaagtttatactcctaaagtttatagacctaaagtttatatacctgtttcaaatttgaatttgaattatatccgattcaaatttgaatttgaattcaaatattttctatatatagtatttctatacatataaagtttatagacccaaagtttacatatccgattcaaatttgaatttgaattcaatttttttatatatagtatttctatacataaatttttctaactttttgtttttttaaaaaaaattgtggagatgtgtaaacttgaggtgtacaaactttagatgcataaatttactaaaataggaaagtaatgcggtgctaaaaaaaaaaaaagaaaactaggtggagaaagagaatcagatctgatcgcccctagcgaggtagcattctcgctcccccgaggccccgacgcgcatcgctccgcatccggactttgtccccagtccccatcccacacactctcatcccgccgcctccgccactttcgcgacgcaccgactacgcgtcccctccatgtcgcgcccacgcctccgtagcgtccctggcggcccctccacacgccggcgtgcgcccccgccttctccaccaccgtctccgcgctcaaggagttcatcctcgctcggtggccgcaaggtcaggcaggagattcttgatagagtagatggattttgtcacctgatctgctgcatatttgatttgatgaaaacactagggcttgtgacctgatctgccgtcgtttttctcgcctggtgtttgtgtgggcgtttctttccctccctgttcctaccctctcctgtggttttgctcgtgtccgatgactgttaaatcggtaatttatccttctctgaatggacattctgaccaactgagtagcgcgcaattagtccttctccccgtagcttcaacagtgttctagaacttgataattccccttctgagtgtacttgcatcatccataaaaaaaaccttgacctcgcgaatttggatattgtattgtgggaagaatatatgtggcagagaaccggaaagacacattttaggcaatgattcggaatttcagatcataaataagtgcgatgatgggccaaacaagaaacaatgtcgtcttcctttgccctatgtagagtaaagacgaattaaatttgaaaatatactgttcatactttttttttcagaaatattcgtgatgaaaatctttttgcagaaatataccgtcgatctcacataaccattgagcatgacgtcgtgggcggtatcgtgcagggaaagccggtctcgctgattgaaatagcgataccggactgccaccgattcaattagtgattaattatcatgattagcgattaattaattaattattaatcactaatcaggataattagtcactaaatattattagttaatagttaattaggtaattaatcactaattaaaaagtggagatcattgcatcagtgagacagtgtcgctgtttcaatcagcgagaccgctcttccgttccgcgagactgcgcggtctcgcccttttgcgcaacggttgtgcgagatcgatggtatatttctgcaaaacaatttgcatcctgaatatttcgaaaaaaaatgaatgaacagtatattttcaaatttaattcgagtaaagactcaaagaagatggcacaatgccatgttttataacagtattatgcgcttttcgtgt

SEQ ID NO: 23383 - DNA, 556 bp, Oryza sativa
cgcgtcgcttttgcgccgtcgccttcgccgccggatgccgtcgccggcaacgcgacgcgcgcgtgccgccgccgttagccctggccggccggtcggctttgatgccgagccgagcccggcggccgcctctatcgccgcccgtccgatcggccccgagggcgatctgggccgtcggttccgtggaccggcggtggaccacccgcgtggtcccggtccacggtgaaccgctctccactgagccgctgaccagtgggccccgcatgtcggcgccgcacctcccccgtgctgacgtcaaccctggaaaatattgcgcaataaaatatttaaggatttttgttatagtaataaacacagtgaatcttctaaaattcataactaattcatccgagctccgtttaagcccattcaagtctcagtaaatcaagaaaatatgtagaatccattaaaaatggttttgttccctgtttcagtagtcttatagcctgtttgcaatgtttgccttgtatgtcgctagattccggttcctccgacgctccggtgtacttcgaaatagtcg

SEQ ID NO: 23384 - DNA, 824 bp, Oryza sativa
atgctactgtataaataagatgaactcgaggaagacaactatgatttggcaactcggtggcggtggcggcggaaggctcaatcctgttgggttggagcagatcaatccaaactagttgcctgaatccttgtgtgttcttgtttctcttgttaatttcttgagatcctgacaatctggtatcagagcctctcttgcttctcaaattctcttgattctgcggtgaaattgttccttggggtggattggagctgatcttcggatcggcaccgcgaaaaggaaacttgccccctaaggttcgcggaattcggagcgagagcagtaggtacctgatccagatccgaggccatggagactgataagaagttggacctccttctgcaacttgtggaagggaatgagaagaaacgagttgaggctgatgagcgcaccagggcggagtaccaagatctcaagcgtacggtggagtcacggattcctgccgtggagaagagggtggatgaactgggagccgcgttccaggagttgaatctcaaggtggacaagctcgagagtaagatgatgcaagctgccaaggtggagatcgggacaggaagtcagctcaaagaggaacaaactaatggtatgggtgggagcacacaaacccacccctctggtatgcaagacccaaattcaactccctctgcttttcatttctgtgaatcatttgcttagaaatctggtggctgtggtggtactatggaaattagtggtagtgttcccccaatgatatgcccacaattcagtggtgataatcctcagatgtggaaggccaactggggtgcagg

SEQ ID NO: 23385 - DNA, 709 bp, Oryza sativa
ttacaatattgagcgggttttgtgagcactgcatcaagatgattctttgttagaagatgcaacagtttattcagtaatgaaatgaatttgtacagaaacttacatccatgatcgctgtttgaatctttgggttctggaatgcaacagcaacttctgggtttgccattattttcgatactacctcctctggagtcatgccaacttgcgctgagcaaacacaaaatagattgatgtcatatatgctcatttgaatttgaataactttttacaaaatgcgatggaacaattttgcaatagatgaattgttgcaaacaatagaaaactagttcagcacaatggaatcacaatccagtttaattatctccacccacctaccaagtatgcaaggacataataatgggagcaggtgcgaaaaactctgctaggcgtatctagcaccagaaagtgacaaagggggtaaaagaacatatgctccatatgacttcactatagcccaaaaagaaagaaaggaagacagaaaagaaataaaaaacaggttcgcattaggggggaatagcacatatcatcgaattgctcactgggatagggtactaaagcatagcatggaagctaaacagaattccagtgttccaatcaggaactactaggtaaatgtggaaatgtttaattcactcaccaaactgctgcctgacttctggactgctaaggt

SEQ ID NO: 23386 - DNA, 11430 bp, Oryza sativa
cataggccctgaattgcctacatacataatcagtttaggacatttatcaacagcagataactaaaaatccttaaacagaaacacaaataaaaaaactaaatgtgaataataaaaatgtgctaatgataatagtacttactagattcagttgtcccgctagcagaaccttcattcatctaaagcagttccatttgttggagcctatgaagatcattgaaaatgattagttgaattgtacttggagcctattacaaagcttcttcatgcaacttactttttgctcagtatcctccatagtttcactctgtttactctcactttttacatccactgtctccagtgaagattgaagttccttttgctgcaactcttcaggagaaacgtcaacaaaggctgcaaacattttgttacaataacatgagatatgcatgacaaaagtatgaagaaaacataagattagacactaatcacaagctccatcccctattcactgatagttggagaagaattctcagagataaacggccaataccaaatttcttctttggctgttcagccacatcagcctcttccaaagttccagttgcttccactttagtagctgaaacatcgacagttgcagattgaggagaggtatctttccttggttgtgagtatgggtaactgctaggagctgcaggagctgcctgtggtggcatggcaaatgggaaaggcgagtttgagccaaaagtgtttggcggtgcctgggtcatcattgacttgaatgcttgttgcattgcatatttctgcatcagaattagcaatgtgtcaaaactggcaagcaagggagagttatacgattttaagttccaacaagacattatacagatcaaacctacaaagagaacattgtattaattaaatcagtgcaacaatggatacatcacgatatactttcgagaaaagaagtggtgcaacaatgttaactctctagtaattaaaagaactagtggaagtgatgatgctgtatcatcctcactttggatcttttatgggtgaatttatgtatacatgtgtgttacttataggttttttttgtaaaatattgcactattttacatgccaatattttgaagctgggtgaggtgatatgatcatattttacatgcagaatttacattagaggacttcctttagtcttttatatataaaaaaatttgatcttagtgagtactccctccggctccataattcttgatgttttggacaatgacacggtcttcaaaatatatctttgactatgtttttctattataatatataataaatatatatatttttacttttattattgtactttataagacaaatctaaatatgctgttctagtacctttaaactaaatatttttaaagttattggtagtcaaagttataaaaatttgacctcaaccttgtccaaaacgtcaagaattatggaatcggagggagtacaccaaattgttttgacatccatcacaatgcatggatattatgctattttatcaatattgaaaagaactagaaattatgtgataagaaaatgaattgtctaacaaaactacaatactccctctgtactcgtaaaggaagtcgttctggacagcgacacggtctccaaaacacaactttgacttcttgtttctataaaaatatttattgaaaagtgatatatgtatacttttatgaaagtatttttcaagacaaatctattcatataatttttacattttcaaactcaacaacttgagagttattcatgatttatattcccaaggtttgacttaaacattgtcctaacatcttcctttacgagtacggagggagtacactgcaacagtaccacctttgctagaacatatgccatgcattgcttcaaactattaagaactagaaaggaaggcatggctcacatgtgggtatgtaggttcatcacaaaaaaagctcactaaaatacctctcttgcttatgtactagtatgcagaggtgaccatgggtcattctcaagatcaagtatgcaattgatagggtacataccatttgaagatgtagaaacagaggaaagttgtgaactcacctttaccatcgaagagacctgatataacagccaacaccaagtattaaaatacaactctaagaacatttaatcacaaaaaagcattacaggtaattgtattcacaccatagaaaatgctgcggacaatgctacaccaactccaatccagaaaacaggcgaaccgctgcacaaaggatttacatgtcatcatgcagtgtaagttgagaaaattgtagccagacaaaagaagggaaactggcgcacatgtatgacgatgggggtggcatgggaggtagggaacccgttccagttgacatattctcactgttggtcgaagacgacatgcttgcaaatccatttgtctttaatccctcgaaacctgttgttacaactaaacaatcagaataatggagatcctccggcagcataagattaaaatgggggaaatcctaagctgattgggattgtctattcgtcggctattactacaaacaaggacagatatgctgaccattttgtactcatcatttgccacactaccaatactggataaggtggccattactaactcaccaactgccaccatactacgaaaataaagacagtattccatcacggatgcatgacttaaggtcactaaattcgcaaggataacacactcaattccactaacgaagcccatggcacagcgatggatccagctgatacacagagtataataaaattcctgacaatcccacaaaaaaaaacactatagcacggacacttgaagcgagcgcatacgagagctttcagcgcgcacctacccaaagagcgcatccggctcgcatctaacgaacaaacctaaaacggaagcacacccacacagaagcacaccacccccctcaccgttcccggacccgcgggccgcggcggcggcggcggcgacgacgacgagcttggacctcccagctcccctccgcccggacgccgcagccgtcgccgggagagtctgcgaggaggggcggcggcggcgggccgcggagaggggaggcaggcggggagaagcggagcaggaggaggcgaggaccaggctctccatgccgcctgctgcgcgcgcggggggagggaaaaccctagcttagctctactgctgctgctactacaactaccaccccctcgcccctccccactcgcgctagggttttgggtgggtgggtgcgcgcgtgagtcgacgagagacctcgggctcgtgttgtgtaggctacgttcccccttttacccctgcggtgagtgataggaagctgaaacggaggggagtcatcgccttccgctgcgtggggctagtatccatcgctatcgggacattcagagtttcagactgtcagcggctcatttcaggcactaattgcagacagcaacatttaaccactgatgaaaaaaaataatactactactaattaagatgcgatgtttcaaaattcgaatatctcaaaatgcaattcgggccagttcaaaaaatgaaaagggaaatccagtaaagtcgaataaacaacttttatgccttgttattaactgacaaagttcaatgttttggttctgaatttgagagaagagagaaaattaaagtaatcccgttcaccatggaatggagtgtaactagtagtagtaatttgtgccattgcagaaatcatatcgcgttcaatcactcaagttacaaaagtacaacggtatacatgaatgagaacatatgcatacaaccttcagttcactgtgctaagttatttcccatcttacagcagaacaaatgttcagaaaagccgaacgagatattctaacgttgaagggttgcctgcacatatattttgatcaagcaaggtagagcatcatgcagatcaaaccaaggggattatctcctggaaatgctagaagggtgaaaccatccatcattttacagtcttcccgaaacctcaaacaagaatatgatgaccttagcctataagaaaaaactcggtgagtatctctgcctcgtacttcatatctgctgcgctttggctttcttccgcgccagagctctttctctggcagcagcaagtgcatcagcatttctcttatagtgttcatccgtgatctgtgctggttgagtattctgtggattctgggtctgaggagctggttgggtattttctggtgtctgggtctgaggagcatccaaggaaacatctgcatttttctcggtagatctagcagcagctgaatcccttgattgagttgtagcaggttcttccacacttctactttcattggccgtctctgctccttcaccggagtcccttttgtgcttaggagagcgatcggatacttcagcaccaaccttgctagttttagcatcttgaactttctcgtctaacttttcaggtttagcatgttttgtattgtcatgtgtctgtgcaccgaaagcaacattcttactaagaccaaagtaaaaatcactcaagtctttcttcttagtaacctgtacaaaaatagacgaaggaaacgtaatcagttacagtgagccaaaagaattttttgttgtgaaccattagaagtaattttatcttagcaaatactccctctatcccataatataaggcgcggtcaaagttggcacggtcttcaaaacgaatgtttagcttataatttctcatataccataaggtttgtagtaacaaaattataaccatatgaatgtaaatttaaatctcgatctaatggtataatttttaacaaataaaattcattttatattatactaagtgttggtcaaatgtttgaaatgttgaaacttcaaatgcatgcgcgccttatattatgagatggagggagtatctgatttggagataaacaaaactattgcattaatttggtgatcaacaaacatatttcagattcccgaaaggttgcttgtgtaagcagcaaccagaagatagtgtttttcgtaaccagcaaaaagcaaagtgaagacagtcctttaaaaagaatgctaaaaacatataaaaaaaggtaggtttacaattttgcatagcaatataacataaaaataagtgaaaaggtcctctcttttctctctcgtactcttctagcaagacagatggggcatgcagcacactagtgtgaatttgaagattgtgaactcaaactaaagagtttgactataaacattacaacaattcaattaatatcaagtttaatgcataattttgttatgaccaacctcacaagagacaacacaagaagcattggtagaaataaattatggagataaacatgcacataatcaagagtcatgaaaaaaaattgagaaaagcttacatcttccttttcttcttgaagctgccgccgcttctcttcctccagccatttccgctcctcctcaagtttcttcctgtaggcagatgtaacaaatttgtctttgtcaccatataggtggtcttccttactcctctctttttgaagcttcctctcataaataatgtcctgctctcgtttacgttgttcggctttctccttaagtgccgcaatgtattttgactgagagaagcatagcattcaaacgatgagtagccatttacatactctctgtgctagtgcacatttgggagaaccaaacaattccttgtaaaaatagcaaatcacaaacttgcactaccgacaatcaaccatgaaggtagatttcagttagccctgaagtatgctccaatatacatctagcaaacataccagctggcagctgctaatccccaaaaatgaaactccctatgctcaagcaacaactactgctttttttttatcaaacagcacaaaatctctaagcttcagcaacaaaagtaaaacccgactgcctcacatccatcattaaatcagtaccacgaggggaaataatacaaccccttcactaaaaattaataatgtatactctttggaacatcccggtgaccataaacaaagcaccaagagaattaagtaatcaaatcagagggagacttacctcgcgaactaccctgtcctgcatcttggggagggcggccttctgcttcatgtcgtcataaacctcgtcgtaggcgaacaccgagggatcctcttccatcgccttcttctgctgctcttccaccttcagcacgcaacgcaaaccccaaacaagggtaataagtaagtcaatctactcgtgacccgcacggcccagccggcgacggtggaggggttggggggaggggattcgagctagttaccttctgctgggatcgcttcttgtacgactgccggaggatgtcggcctccacgtcatcgtcgccatcgtcggcgaaggccgccagggggcgggccggcggcggcggcggcgcccgcgacgacgaggacgccgccggcttcgtgcggagctgcagcccgtacctctgcatcgcggcggcggcgtccaggtggtgcgcggattcgacgcggagcaaaccctagtctcgggcaaggggaggaggcctcctgacgcggagaaatccctaggattcggcaagggggaggagacccgtgatgaggcgggcagcgagcgaaggaagcaggggcgacgagccggcgaccgacggcgacggcggtgagggtcgccggcggcgacctcgtccagcgactcgcgaggaagaggagcgaagggcccgagactccgagaggagttaacggcgaaatccagatgggtattttaggttggatccactgatactaaaatccagcgcgacccatacagcccacctccgcgaattgggctgcgataccagatttcgaggcccaatacatgagatacaaactggccccgtacgttttcgtgagattaaaatcccgaaaactatagcttaatgagcacactaatattgagatctttctttcctagctattgtcatatcgaatgcaatgaaaattttactgaactgcgagatagtaacaatttaaacacttgatagtgttgaatatatttggtttccaagcttaaacaaatttcggttgtgtttttaagagtagaagctttcaaaattaataattttcaacaggttagcattggcaatggtatgtagtttgaacactgctccctccgtttcacgatataagttattctagcatttctagcatttcttatattcatatagatgttatatatatctagattctttaacatctatataaatgtagaaaatgctagaatgacttacattgtgcaatgaaggtagtaccaaattttggtagtgttaaaagtagcaaaaactgaacaggccatagctccacaagaacaactgctcttttcctagcaggagaaaaatacattcagaaagaagagattaaggcacccaacgaattgttaacaatcacatttcatagaagcacgacaacttgctcaagattaaaacagcaagcacctttgatgctgtacatcatatcatcattcttaacaatacccccataattatctggtgaaacattaacaggaagacgcacaccatcaacatccacatgtcaaaacaataccacatcccgttactcagggggggcaggggcacaaaaccaaaatgagatgccactttgcactctagggtaacttctgttggtgaccacggtcgcagccgcctaaacagtggattctcataatctatcaactaattcacttttatttagcaaaccaggcagtctgataacttttttttatctcttttgtagatacatggcaccgctaacctgcgaacagaagtcagaaccagacctcttctttctctagagatatgtacacccatctctgattagttgaggtcgtgtatattctccaggggtctcagaaatatgtgaccactgtcacgagggtaatgatgccaacctaaatccttccattgctccagaatagcaaccttgggcccaaatcaagtctcacccaaagcaatcaagagctacctaaagtgggttatgttaattcactattgctgtgaatcaaatcatataagctcccttttcagctaaagctgagatttcgattgacaaatctgagattgcacttcatggaagcatatgatcgggggcattttgttaacagtacttcacaggatcaagctgcaaaatccagaactccacaacttgcaatatttgttttgatgagtatctgcaaaagagcaaataaattagcgtgtatttggtgacacacttctagtaattctttttcttgtggtgcatgtgttttgataaccaaagaccaaaacaaaatttctggaccacaaatagtttaccatcattggacaagatcacgtcgccgagcttgatttttgaacccacacttgcctctacatataacattcatatattataagaaatctagtgaataaaaatcatttcacgcaaaacataggcccttgaaatgtcaaaggcagaataaaaaactatattctgatcacacctcatgagcaccatattggcagaggctctctttgaaggctttccatcagatgtgcttgcagaaatttccatctccttcagaccacgtggaggaccacggcggttagcatgtctatgtcctgaattgaagattgacagtattaaccatagtacagaaaatgatctggagaacagtttgcatcatttttcatggtcataattgcaacaactaaatatacaaaccattttccacagggcctccgcgaataccaccatgaccccttgggtctatttttctctctccatggcctgctttgcatcatcaagtcacataattaataatagggtgaataaccaacatgatccttgaactttcacttaaggatcaatttagtccttgacatttcatattggccaaaataagtccccaaactttatagtgtgatttaatataatccttggacccataaaaatgccacgtgtacatgccacatcacatgtgcatgcaaattcaacatttaaaatgtccattctacccttatacattctccataggaaataaataaaaagaattaagaaaaagatgttgcattggtaactaaagaatgtgtcatttttcttttgttttaagattgctttcttcatgttttccttttttttttcttttttctatagaaaatgtaagggtaaaatggatatttaattgttgactgtacatgcatgaatgatgtggcatgtccatgtggcgttttaagccacatgataatctttagggatttgtttggacaacgtaaaacatcaaggactaatttgacccatgagcaaaagtttaaggactgaattggctattcaccctcaataatacaataactcaagaactcaaatgaacagtactaaaatcgcttcaaaaggaatcttaccatctgcttgctgacagaaattttcaccagaatgttgctgcattggtgagaactcagatgacgaggaatgcgtcccacctgatgcagatttgtcatagcgacgaggggcccatacaccacgatcaggcctatctctatttctagcatgtctttcagtcttttcactgatgagcccagaaccatggagatgactatgtttgtcatccaaatggtttttctcagcattttcaactacctgatctttaacaacggaacgtgggtttggaatccgtggtgggcgcttctcagctgtaattatgtgaccttcctgatcatgttgagacgtaaccacatgccgtccttccttgtttgaaagtatagtcttaataattctgccactgccctcaagccgcggatcttgcctagaactagattgtgcagcatttttcataggggtccctgactgctgctgagatgtgacatcagatgtctggaaaaaacatatcaaatgacagtcagtacagttaccaacaaaatggtcaaactattcgtggagcttatatacttacattagaatcgacccttgctcttcctttcaaaagcacaattttctcttttttgttttccgcgacatgagcagaaccagaaatcccgccacttgtagcatctacgagacaattgaacgaaacagcaatattaacaactaaaaaggaactttcatcaagacatatgggcagaaagtgcaaaaatagcatacatcaacaatttacaaattggaaggatagaggctaacagaagacgacaagaataatactatacacttcttggaaaggtaactgactaatagaactccatgcaaagacaaaatgatggaagttcaaaatgaaatccattttctataggataggacattgacgtagtgtagcaaaagtagatgtcacccaacaaggtacgccattgccataattggatggcaggtagccatacaaatgtccacaggcctatctcaacacaatagctattatgccaaataagtaaacaagcccaaactaaacttgtctatgttgatggtgcttttagcattgcagtggttttagtttttgttttggaatagtcataaaaacaactaagatttaacctatttacttaaattgtacaggtttcatatagctagatttcaccatgcaacacagcataataagatcaacttgatcttgcctcagttctcacagaattgaatcaatcagtgtcatcaccctattacctaactcagctcaaactatacattagttgatacaaccttttatcagcatatataggcatggatatgttatagcagagaacagatacttagtaataatcaataaaataaaaggacatgttgatatgaatggttacaacaaagttatagtgattatctatttcttgaatcagtaccacctgaagttccagcagtacctttttccctctgcgcatgctcgtctctctttggcactaagatataagttggcttctccttagcattctctcgtagaacatattgctgaagatcacatgaaaaaaagacaaaaacagtagcttgtcataacctcatggcatagtttttgtgcggaatgaactgggtactttttataacaatgcagcatgaaacccaaaataaccaaactgagacacagtgcactgttcaaaggttgaaaaagaatagatgaaaactcacaacaatagcccagaaataaaatatactccctgcatttcatattataagttgtttaactttttccttagtcaaacttctttagaaaaatataatgatatttttaacacaaaacaaacatattatcaaaatatattcaatgctagatttaatgaatctaatttgatattttagatgttaaatttttctataaacttggtcaaacttaacaaagtttgactagaaaaaagtcaaaacgacttataagatgaaacagagggagtataaaacatataagagcatacaatacacaaacagtagcacaaacagaaatgcacactggggacagga

SEQ ID NO: 23387 - DNA, 3886 bp, Oryza sativa
agccggatagtccgacatgcattgttggacagtctggctcaacgtttgtttggctgtcactgtgtaagttcaagtgccttaatttggttttggtgattaatgacaaatctagttatatgagattaacatttttatgagcttttgtttgactagtctcatttggatatgaaagtaaaaaatgattagaggtatgtattaaacttcacatattctaacttggtctctcttgtggatccaaaatatagtgtgagctccctcattgatcttgattgattatgtgcgtatgtgttcctttatatccatatgtatgcacatcttgagggggaggttattctatattttgtttattataagatttctatcttgatttgaaatcatctttcatctcatctctctatattgtttatatcggattattatctatcacaaaagagagaaaagattgaaagatcttggattaaacaatttgtgtaattgttgctttagtgatagatgataaaccgatgtttatgggattaacctctcttttacataagttttcaacaaagttatttcccgataatgagatgtggtagatatgcattctttggtgatggaccttaatcatgacaaggatgaaattcatggagataaagcaatatgtatcacttcttatctcctactttttgataggttcatatatatgatttccatgttattgttatataagtgtgagactaatgtttacttgagtcttatcttatttagtctcctttacattgagaacatggagatcataaaggtatgtgttttttgctttatctttatcattgctacatgccttctccatgtgtataggataaaccccattggttcttcataacttatgcatacacttgcctctcttgtatatttatttgtatgcatatatttagggggagcaaatcctatacatttattgtgcatgttttagatccacgttgttcacctattatttatattggatctttgcatttgagcttgcatacgagtatatgacacttgcgatgttaatgaatactcaacaaacatatccatatctttcatatgcaaccggttggtcaccaagtggaggatgacaaccgatttgttggtactaatgttcttctttgagatgtgcaaaggaataggtctaattgtgatgaagctaatggatgacaccatgggttgatggtcaccaagccaagggcatcgccatgtcaacaagaatgaaatcaagcttgtgatgagaagaaagtcttgacaaatgatggtaaataccttggtataaacatggttgaatcaaatggtcataagtattgatctcgactcaagcttgaccccaagatggatggcgcaaggcaaaggtactaagaatgttttcttagtcttttcccggtcttggtgtttggtgtagaccagatttgctagataggtgccgtactatcaagaggggtctataaagcgagcttgtggatgatcttgtgccatgttagttcatatgcatgtaggtgcatttggtgggcttgtctagccaagtgtgatgagttttctcaagtcctaaaccaagagagaagtgggcatgtccaataggagtgagtgacatcttatgggtatgtccggtggatatcctttggagtttgagccctttatccttgacttaagttgtatttcttggatggttttttcatgggttggatggccctttgaataagctttccatagagtccaagaacgccaaattccgagacccgagtcaagagatatcgtcgttttactaacggtcggttaagctgaaaagtgacctgcggtctgaccgtgggccttaggccggtctggccgggcctattagccggtctgaccggtgtgataaggccggtatgaccggccgcactggtctgttgcactggtctggtttttggtgacgatacagagccgctagaaccacaaccggtcagaccgagccgatggcggtctgaccgagccgtggacaatctgaccgcctactacactgcggtcagaccggccaggttgagtgggctcaatggttgccctgtaacggctagttttctagtcgttacaaagtagtccggtctgaccggccactctatggcgatctgaccggcagagcacaaagttggggatttcaacttcaacggctagttttggtggttgggggtatatatactcactccccagcagcaagggcaaggttttggcactccattgcattatcttgaacccttgcaagagctctcacacccttgtgcacttagtttatctagtgaggtgttagagagtgagttaagccaatccaagtgcattgcttcattgttatagctagtgtggcacttgatcatcctcggcaagtatcctagacttgttactcttggaggttgccgcctcctagacggcttgtggaggtgttgcccggtgacctctccgaggagattgtggaggaggcccggcaccgtttgtgagtggtttggagttcaccaccttcagagtgaaggaagaactaccccgagttatcaaggcttggatagtcctttccgtgggccggctcccgccttgcccaccccttgacgaagggggcgtgcggtggcttcgtggttgagcggtggagttgggctcgcctcaacggggattaggaaactggcgagtttctgaatctcggtgaaaaattccttgtctcttgtctcatttatttgtcgcatttacatttgtgttatttacattcatagagacatatttgagcccatatcacttaggtttgcaaaacttaacttagttgcttagttaaccttgcacctcaccttgcctagcaacttaggttagttttgtttaagtgccattaagttttaaaaccgcctattcacccccctctagtcggtctccttgatcctacacactgggcaatggtattgaactaaccagatggtctagtgtcggtaccggacaatgggcaatggacagtccaagtgataccagattgtttggctctttatagcccaatggctatttggttagttaccgtttgaaaggtgtaaagagcctgactgtccgttgcgacaccagactatccaacccaatatattttctagaaacatgttcgaacggtagcaaatggctagttagtgcaatagagcaacctaatggagagtcccttgagcttatttgggatcaaatccttgtaagtttaatgctcatagtggcttagtgtgcgcccaccgagagttccgttcttagtgtttcaagtgaagggtgcatcttattgttcttgacatctttgtatgcctagctagcctcagaggcgaaccctgtgacgcctcaagatgcttgtggaagacccgatgtgattgtgaagggtttggggttgaaccatcaagaagagagcgccgttgaaagggagcaacactcctgtgtgtgctccaatgaggatcaatgaagattgtgtttgattccttctctctcttcactctcttgcatttagatttctagcttgaactagatttgtgtgtggtcagctgtaggttgcagtccattctttgaaacctgggcacttaggctaagtttatgttagagtttctaattttggccaatttgtttagaactaaattggagctcgccattccctgtcttcgaaaaggagcggcaaggtgacaatttgagagagctttatcccccctggcaccaactatatcaaatattatgaccaaatgcagcagtatttgtcttcttttgtaaagtgcctagaaaacatagacatatattcatccaagagcatatttttagaaacagtctaataatttaaagagtaaagtgcattggcggtccttaaacttgtagaattgtgtcatataggtccctaaactctcaaaatgcatat

SEQ ID NO: 23388 - DNA, 3333 bp, Oryza sativa
ctgaaaatgcgatactcctataaggatgaccaaagtacactgcctagtcttcatctggcaaattggtacacactgcacactataaacctgcagttctactctaactgaagacctatttacagagttacactactactacggtactaccacaaaaaaaaaagaagggggagggggatctgtacacagccaaaccagctgaccaaggccgtatgccccgtatccacattcacatattacaacgacaatttataggcttgccatcaagttgatttcagccggtccaatctgaacttcgcctgaaaaatgagcagatgctatataaattcaccgacagaaagcccttaatctttgcaagatgaattcagaatcagtgcaaggcgctactgctaaccatcatggcatggatatcgtcaaggaagggcttaagcaactttgcgagctttcgaatctcctccttcagagcagcacaatcttggcatttgccaacgagcaggttgatgaacatcttcctgtcaggaatgagtttcattgcgatctgttcaccacgtttatcaaattgtgtcagccaagtgcaatggaaccaaggattgatcattttcgacaaaatcgatgccccaagattcagtaaaccctgaccttgtaggctgctgaagagatccacccatgccatggctttagagtgaccatgtatgcagattctacaagctgtgcaaaacacttctgatcagaatcctcctccaatctctgtaatagtgcaatagtgaaatccatggatctggtgacgttagaaaaggtaaatacaaatgagaagaggcatattaagcagcctacgtattgcatatctcataatgacatgctatgaaagatcgaaattttcaagcgtaagtgcatatataagagaagaacggaagctcattacatgggctgtcttgttttacctagtaagccaaagaatagctctcgcgcagctatcaaccttccttgcagtgccctcatctacctccttctccagtatctcctctagattatagtatttggatgggtccaacaagtacaactcctgcagcctctgcaataggcagtaacagatcagaaaacaaaaggttgcacctggattttttttcttcaaaattcacagaaatgttcaaaagatatacactgaagtcagccagagtcacccattagtaaatagttggcaccaattatttgcaacctactagcataataacgttcacattttcatgccaagacaaatcaactctccacttggccatcactatcatgaccctgtcaatatgctctttccaagcctagaaaaactttaccttcaccctctcctgataatcttgatcttgaaaatattaaggtaaaacaaaacaagaaaaaaaacctcatcctctcgtagaggaaaataaaaaaggaacaaaacaacaagagagggacaccgaagtttgcgtctgaaaatgccccacggatgaacggacggatgtgaccagagcagttgaaggcctgtgtgaggcacacgcaaaagcaaatcttgaggagaaaatgatctgatcggatcagatatttacaacttttgcatcgagaggaaagccctaatcctatctcctttgttttatctcttgtcctgccttccaaattccaatcagtcgccgtctcctagtccaagaatcgagagcgccggaaagagaccgtaaataatactatgatgcaaagactttgcatgccgagataaggttcctggtgtttgtggtgctggaacttgcaagtgattcctctgcagttgaagctgcagttataagctcacgcaaggagggctcgtggtgtgctcgaatcaatatgtgtttggctgaagggacacgatgggtcaggatagagcgaacccatatttcagaatgtttggtttgatgaaagtcaggtcaagtcaacaccattggagtcatgacctgataattctatgctagtagtacacaccttgaacaactcggagcaggggcggatccagcatgggggcggcggggtctcgagtcctcacgaagaccccacattttaccatacgtagataggagtggggactataactttatctataactttatctagtttgcttagaccccaccgctatttaaccgccaccgacttggaggagtaagaagagattatcggctgtcgaatcgtgctttgagattagtgcgaatatccagaaggtggggggcctcaagaggcagctctcaactttggcaaagcaaagcagtgactgtgagcccagtgacagtgtcaaaaggaaaattaattagaggttagcctagctatctacgtggcttaattaaaacgaccggttgctttcggtggctactggctagccgtgtggccggcacgggacaggggaagcagccacaggattacgcttccctacatgggaccgcgccaacagctctaatctataaaattagtagtagatgtgaattcttggggtatgattatttggattcacaacttgcaaccttttttgtttcggtttcttgctctcaagtcgagcagcaggtaggggtgtgattgagactctgtgcctaccaaccatacaagaaggcatttttagttagctaggattttcatctgatcagggaactaatgctttttttgagagagagggaactaatgcttgactagtaaaacctttcttctactaactctgtcttaaaatatagcaaattagacataacatgtaacacgaatctgtacaagctccttattcgtcgtagaattttgaatctgtacaagctccttattcgtcgcataatttttcacgatctcgcagatatatgtatttttttatcatgatttacgctaagaaatggtaatgatgaaaaactgtaacatggcgaaaatatttttagggacaaatatgtaatgacaataaaattaaatactagttctaaatatttgtaatcagtagccaaactctaagatcatgcagattactagtaggtcattaggtacagaaggaatgatttttttctttttgtacctcgatgtttcgttggacgtcgagcctcagcacagccatggtcggaccgatcttatctgcaaacgcccatgtaggagtatcaccagagaacagtaagaacaagcaaaagcaacaacgacaaagcacgcaggtcaccatgtgttcaaatgaagaaacgggatgcgatacagattactggcaggtgatggcagatagaggagtaaaccatgcaatggcatgtaaaaaaggaaaaaaaatggaagaattggagaaggaaggatgaattatttttgaaatttgaaccaagaacaaggttgaaagag

SEQ ID NO: 23389 - DNA, 600 bp, Oryza sativa
catacacagagcgcatacaacccttagaaatgtccaaatcaaatttacctaagaccttaattccttatggatgttctgtccattcaaaacagctggagcaatcatatgatgttttaaggttgcaaaattttgtttgccaactgatcatgtgggtaatatagcatgtacctatgaaatgctagcatagactagtactctttccatgcaaagaggtatagcattgttgaaaatgtcctctaaaatgtgctaattttgttcaccatatggtcatgccatttgatatatactgttgaatgttttaatatgagataacttccgttgtctttgattaaacatcagctgccattgtggtcagttctattccttagttccattagtgtttcttgacatattaaccacacaacaatgacatattatctattatatgagtatagtgtttcagaaaattatattagtttgtggacttggtctgcaatgcaggctgatgtttgatgaaatgatctatgatatgttatcctccaattattctttgaagtttggttgtgataaaatgaatctttatttcatgtcatgaattcctatcaagtgaagttcaatttt

SEQ ID NO: 23390 - DNA, 3627 bp, Oryza sativa
tcctgcacccccttgggcgagccgctgccctcgtacttctggattgccttgcacccggacagcagctccagcagcacgacgccgaagctgtacacgtcgctcttgtccgtcaggtgctgcagcctgtagtactccgggtccatgtaccccaccgtccccgccgtcacgcaccgctcctcgtcgtctccgtcgccggcattgcctccgtcgccggcggcggcattgtcaccgtccagggtgttgaggagggagaggccgaagtcggagaccttggcggtccagcaggagtcgaggaggatgttggaggacttgatgtcgcggtggatgatgggcgggacggcgtaggtgtgcatgtactcgatgccgcgggcggcgccgagcgcgaggcggaggcgggacggccaggaggcgagcggcggggagagcggcgccgccgccgacgccgcacgcctgtggaggtggtcgtggagggtgccgttgggcatgaactcgtagacgaggatgcgctcgccgccgtcggcgcagaagccgaggaggcggaccaggttcttgtggttgacgcgggagaggagcgcgagctcggagacgaatgccgcctcgtggtcgacgcgccgcgccgcggcggcggaggaggaggaagggccccccgtgtcgcggcgctcggcgcgcttgatggcgacctcgcggccgtcggggagggacgcgcggtacaccgcgccgaagctgccggagccgatgcgcttcgccggcgagaagcagtcggtggcggcgcggagcgccaccagcgggaactgctcgaccgtcgtgttcgggcccttggagagcagcgcgctgagccgccgctccacgcgcggcgccgtgcccgtcggctcggcgtggatgcgcccggagaccggcgagctgctgccacggtgccggcgcaggtagtaaaccgccgcgagcgcggcgaggagcgccacgagcgccgatccagctccggcgctgatcaacgctatcgccagattgctcgggcgacgcttccccttcgattgagagctcgacgacgacgacgagttggacgtcggggacagcgccatcggaggaggggtgtagccgcaggggtaacaaacggacacgtctccgccgcctcccccgccgctgccggcgcagagctgcgcggagcccgaccagacgccgcacgagcacgacttcgacggcgcgcacggacccgggagcaccttgtcgaacaccttcctcaccccgcccgcgacgcctgcgccccagcactgcagcgagtagtcggacatgagcaccccgcacaccaccttccccttcgcctccagcgcgacgaactgctgccccgccagcgccggcggcggcgacgcctccccctcgggccagcacgagaccgtccagttcccccacagcacgcacgtgaccgcgtcgcccaccgccaccgtcgacaccgcgcggctgatcctcggcggcgacgcggccgccaccgccgccgcctccccccagcaacccaccaccccgccatcatccacgccgcacgcgtgcctctcgccggcggcgagcagcatgaacctcctccccgcgggctccctccccaccacctcccctccaccatagcacctcacctccccgctccccaccaccaacccgcacacgaacccgccacccaccgccaccgccgagaaccccaccctcgccggcgcgccctccccccacgggcacctccagcactgcatcctctccccgacgagcccgcacacggactccccgccgccggacaccgccgagagcacccgccccctgtacacccgcttcgacccatccccggcctcgttcagatcccaccaccgcatcgacattggcggcgacgacgtcggcgcagccgagcacaggtacccgtccccggcgaccaccgccgagtacggcgagcacgtcccgtccccgccatacgcgtacacgtgcggcgccgccgccgacctgttcgacacgctggcgcacgagatcctgtaccccgccgccgcgccccccgccgccggcacgagcccgcacgcgagatgctgcttggaggggttggagctggagttggagacggcggcgatggcgatggtggggagggggaaggaggaggaggcgaggaggaggggcggcgagaggaggagggctaggaggaggaggaggaggtgaggtggagacattgggttggaggagaggaggaggaggaggagtttgtggagacgaccattgttggcgcgagttggggaggaggaggaagaagatggagaaggggaaatgggggagggagggaaagggtggaggtttaaaggttggtgtctatgtttttctttctcctcttcatcactttttgttagatttttttttattttttttgttgttgtttgagaaaaagtaatgggaaagatttgggtgttttttgtttttcttctttttggctaacttggttgttgggtagtatggaaatatgaatgcactattggtatttctctctctctctcttgttgagtgattttttttttgagaactttgttgagtgatttgatgtgtgtcaatagcttgtcaagaggaaataggtggcttgttaattagttatggtgttgcattttggaggaccacgttgtgattagtaatgggattctttcttttttttcttttgtgcatatgaattttaagcaagctgtagtacatttcatcagaatcctctcttttgacatatagccactatcctttctgttgtgatgatagtacaatggtggttgtgacttagtgacaagtatcttccaatggggtcgcaatctatgttcgaagaaaaattctaggtccgccaccataatcggagatcttaatatgaactttttgttaagttcattttttttatgcacgatcttcacaaggtcatataagcagatgatcatttcttctgttgtatgattacaaaagggaaggatgaaattacttactgatattttccttctaatgtgtgaaagcaaaggtaatttctcatatggcattttgtgcaactcccacaatgtggccaggcctttcaaagtccagcgaagttggagaaaattattgaatcatcattgtgctcatctcactcagcagagaaaatggccaagaaactgtacttgttttcttttcttttttttcaggaagtgagatcatgggagaatactaggagcggtttccggatctagaaacacctcccctaatactttcattactcatcagaaaaatctattgtttccggatctagaaacacctcccctaacactttcattactcatcagaaaaatctatcttattgatagtggttattgtttaagtatcagatttggacgcaatcatcagagatcatcacatataaggtttcttctaggtcttctttgccttgccacaagcaagagtcccagctaagatccagattctccatccatggcatgtgtgctctgcagattgctgagacagccagctagtgactgaagagaaaaaacatttgattacaagtcaagatcatttctttaccctgcaagatggcaattaacaagccccaacactgcaattaaatacagtttaagtagctgtaatacttttctctctgtgggctcctgattccat

SEQ ID NO: 23391 - DNA, 19644 bp, Oryza sativa
tttgcgttgtgcttagctttgttgaccggggatttttgctgccctgacctcgcagctcgaatcgacaaaagcagaagagaatcatctcacctaccaagcgtttttattcctcctatcattctccattagggataacttgggcagctttagcattcgacgtggacagaaatctcaaaatgcacaagctaaaatatcgttttttttatggagtatagtttgttatggtggattgcttattgtgacgttcttttttatatttgaataggaattgacaagtgctattagcaatagttttattaatagtgtaaggatgcttaaacattttggacttgctctgaaattttgggacctaggcggctaatagagctgatgactataacttctaaccaccctgcccctgttgcttcacacggtaaacaactgcttttaaaaaacaattatttttctcaaagattaaccaaacatctctttttaaaaaaacaaactcttgtattggactattggagccggctcatctatttcagctgttcaatttccaatatggaaattacaggttttccttttgcgagggtgaaaattaatcaaattacaggttggagaactatctttccaagaagatagcaaccatgactaaactgaaacattgcatcctgcaactccaagagagtactgaaaatcttgatgttctatcgtggaacgtcgaaactgtttatttgtttttgacgttgggtttgacaataatgacatgtttacagtgaagtcgaagctcctatgtaacttgggtggcaagttcgcaatggtaacacatgccttgtgtagtcgaggctgttgtgtcacttctacgataagctcggtgacaatacctcacgttgggtttaggtcgtggtagtttaggttagattagttgttgtggttgtgattttcgctcaggttttcctaattaacagtgcactataaggtttattcgtatttactctttaaaatgtgtcacattgttttttatataaaacatcggcaacgaactgacgttttttttgggaaaaaaggaagaagagagaagagcagcgcaaagtctaattgggctttgtcggttgggcctagttatggagattgaaagataggctagaagtaaaattcagagtagcttttagcgattcattcattgggccaaattttgagtttgggcccaactattccttctatttcctgacagaataagtcgacttgtcgtccctcaactttaacgtcttgacctcccttatcctcgataccagaaatcttcgcccctaaactatacaaaaccgtgcgtaacttatgtcccatgacagtatagacccgtttttcctgtttttgctttcatgatagatgaccgggccatttggcaatctgagaggagatggcggaggcgccagtggaggagatcgagggccggagctcgcagagaacgacaaccagtgccgcggcccccgtcgaacatgctgttcctggcgacatagcagtctcgtcgtccatccagcaaaaagtattttctatacctagatgcctaggtgtatgcatgtaattcaaacagttataaaaaatttcataaaatttgataatatagtccatgataatataagacaatatgtaaacatgtaagtgtaaattcgatcgatatataaagaaacaaaaataacaaattttatctgcattgtacgggtactattcattatctgattttattatttttatttctctagttgtagatcgaatttagtcttgcatgtttgtatataaacttatatcatcacaaacaatgttactaatttttttctataactatttgagtcgtatgcaaatgataggtgtcatggtacttttggtacttatgtgttgaaaatcctttgtccgtccgtccatccagccccagctgtaccgctgctcgtggttcatgctcgctgcggtcgccacagcaagacgacggccagcgcgaagagctcaccctgcacatccgacacgcgcgccatcgggtggaggctttttacttggtgccgtaacagaaatccgcggcggcgccgcgttcgtggttcctcgccggaatcatggtttacccgcttgttgagaggagagctctcgtggttcactatggttcgtggcgtggtaattgttggatcggtcgtcgaggctaacggccaacctgtctgatgattctcgcctgtctcgtttagccttcttgttccatcctaaattgtgatgttttcttttgcatggctagcttgtttgatcctttggggattttatggattagtacgattcttcttttggttcttgcgtcccaggagggatgatggacgagtaggaggcgagcaaggggagtacgtgacacggcttcgccggaagagaaggtggcggcggcgaccaggaacggcggcgtgctcggtggggccgcggcgctgttcgtcgtcctccgcgagctccggccctcgatctcctccatcgcccgtgacccgcgcgaaaaatttgataatttgacactttttttcgttgcccaattatttaaattggcacttgtgaggatgataagtgggaccatctgagtgaatgaaagtggatcatgatgtcaaataatcaaaactcatttaaaggagtggtaaattatcaaatcgctcgacgtgcgcatacccatccagacatcgaggtctcctcctcttctaagaccgacaagtgggcccaatcatatgccagttaagaataaacataaaaagatgaggcctatatataatgccatgtacctaagttgtattttttttatagtttaagggtgaagatttcagatataaatcaaactcagcctaaagtttagggatggcaagtgaacttacagcatcatcgtttggcttatctgcggaataagccaaacgacatatttgcaaacgaaaaaaaaaattatgaataaaacttttatatacgtgtttttagcgatctaaaatcaaagatcgaaaaaaactttaatggaagaacctcaaaattaactccaaatttaaagttaaaaattaaaattttagctgataagtgtaagcacaagtaaaaagataatgccattattcctttgctgaccggaggaaatgaaggcccaggcctcaagtgggccccaaataggccgtgcgtggtgctgtacgtgcggccacgtgggcaactgcgtctccgagcccaattcacgtgtcaccttcgtctatttattttctcacgtgataactaatagggaaataaaattgaaaatatacttttgtttcctttcaatttacaaaaatatacttacaaaaatatatttgcgaaaatatacctcatcctaggttagcgggagcggtacggtaagcacggtcgcgcctgccggtcccgcacggcggttgcgcggaagcgatgcagcccgcggcacgagtatgcgggagcggcggggatgcgggagcacctcgggagcggcacggtcccacggaacgggcgtgcgggagcggctcggttccacatttttttacggtatcagtactgttctgcactgttcaaacagcggtgccgccgatccaacgtggaaccggctcatgaacagtgtcaaaacagtgtgcatgtgcagcttggctgcccgctcacgcgcggccggcctgcgtgaccgcggtgccgcttggccggtccgcggtaccgagcgtccgtgctgcgggaccaccggtccccgtggaatggtagtgcgggaccgcctcgatcccgcgtaaccacatcggggaataggtatatttgtgcaaattttcgctatataggtatataaacacaaaataataaaaaaatattttttcaattttctttcaactaatatacgcagtaattaattaaaaataaaccaaggaaagttggaaggtataattgggtgatgcacctcacacttgcaccgaataacatcacttcagctaaccaagcaatgtttccttttcagtacccattttacaaactcacatttacaccaaattttttgactagtggcggtcggtcacgcttagcggcggtcgatctggtgctagccttctcctgggcttgtgtgttggtgatgtcggtgtgtgggtggtgatatattttttcctttttcctgattacgaccctccaaggttgtaatcttgtaattttttcctactctatcaatagaacttcgcaccgtctcgtgcgagtcgtttaaaaaaattggcttgtttcttttcaccctctcttcagatttatagatctagttgtattgtcccgcaaaaaaaatagatctagttgtatttaagctaactctattttaccaataataaatcttcatggtttgtgtcgatgtttggcaataataaaagggtagcttaagaaattaacctaaaagaagatggatgaaaggagacaaaggtttagacatgtttcacactttcccgatgagaggtaacaccctaattccgtttagtgaattggccatcttcaatctttctcccctgtccaatgcgcgatattatttgaacttcactagctacaattgtgtggatgaaggtagtaggagtacatgaaacattacatgaactcacatcaaatgctatttgtaatgttcagaccttagtgttccagctagtcagtcacggactcacacattatgactatgagtttcaactataccgaacgttttgagatatatacttcctccgtaaaagaataagtcgatttttctacctcatcaaagtaatctcaaaagaattgatttctagccccatacctaacattggcagatcggctcatgaatcgagatatattaaataggctttatctcttcaatagccttacctaccttaccttacgtgagaacactacgagtatttattattagacaaaagttgaacatccaacgcaaaaagtgacacttccgatggactccacaatttttgtgtaattggctgtggacactcgagacaatatcttatcactctcgagagaaaagatgagagaaatttcaaaagaatataaatgctctggccttagtcctatgtaagcctgataaggtgtggtaaatcacactcgtcgcccacgctccacaccctcgatccccttccaatctaaccctaggtggtggcggtggtggcttcgacgacggctggcacgaacggcggctaaatactactttcgccattctaaaataataataatttagtaggggatgtgactccacatagtataacaaatctgaacagttctttgtctagattcgttgtactggtatgggagatttttttttctagagggagggagtattcattaatcatcaagtcctctggggacggtgggtgcagaaatactcttaaaaccgaggtacccaggagcaaaataaaacacctccacgagacgggagagattctccaaggaaacaggcccatttctggccacatcaaaaaaccgctataaatttcgcctgagccacgcgtcgctccctctcctcttctccgttgctgccgcctgcgtttctccgatttctcccccctccgtcctcctctcgccgtcgctgcctcgcctccggcccgcgccaccggagcccggcgaggccgccgggcgcgcgccgctcgctccgcccccgctggaacctccgactccgcagctactcccccggcgagcgtcgccttttttgcggcgcgccgtcggccgtagcgttccacccgggcccggacttctgggtgaggccgcctcgggaataatgatttgctctctttcgccgtcgtgttgggctgtggggtgggtgacgcaggatcgcgggtttgagttgtgcggttttgttcgtgcccgagggtggtacggactacggaggtgtcaggttggcggttgggtgcggcgggggtggtgttgtgttgtgttgtgtttgggggttgggttagggtttggagccgctcgatttggggggaattggggttttggggattcggcgtggggaatgggagagcttcggtgcactgaatgggggttttgcggggagcttgggttgatgatttgaaggtggggggcattgggtggtgaactggtggtttacccctaggtgttctcaatccttcaatcggacgtggattggagctgaggaatgactacttcatgctgcattcttgtctgctaaaagtggctactctgtttctaccataaatttgtgcttgtcgaccgaaccgaaggatggaaatgataagtgtgttttgtggctgtgcattcgggggcttgttagttcttgcggtatagggatatcaacacgttgctgctggattaacgaaacatgaagggtgtattgttgacttagtgttagtgcagctacaccaagtaaaagaactagttgctcattggatttatgagtgttgcggtgctgcattttagtttatatttgtgtggttacatcagataaatgttaactcatcgctgtttaattttgttgtgaagattagcatccacgtgaagcgttctaagtcggattgacacaaacgacaaaagaaaattgtattgactttttttaaccatttggtgctaaatgtgataaactatcatatcccatgcagtattgaactaatgttatgaaaaatttgacactatatgatatgccatatcttcttataagatatttatgctttatctgtgatttggctgttgctaatttagagcttcccatgaagaagtgaatagtttaaaaacttatggaggtgtcttttgttgaattacagggatgcaatgcctctcttaaaaaggagaccgttcttcttactggatccgccaaaggacttgaatccagaggacaaggtgttccaagttcggtataccaaggagatattccgagattaccagtatcctctttcatgccttaatggctgcttattgagttgtcctttatatgaagaataatttccattctaatctgatattatgtacttgtattagattatgttgaagtaatatggttatgtccttgactatttattagggaatacctgaatagggtaaacctttatcgtgaaagagtttggacatgtaaggtgtctggaaaatcaaatttaacatatgaggaagcgctggtctcagagcatcatgctgcagagaaggctcaacagttgccaagagagttaatagcgcctgttctacatatgattcaatacagtatgaccaccaagcttttcctaaacctgttacagttcttggcagcgttattatgattgcacatttccagaaaatgcaatggttttttatttctttatggtgcacactgttggtctgtgtccaaattgattagtattctgtctatgcattttctcatttttcctgtgctatatgaagtttgactgagctaatactgtttgaaagatatattaggtccgtagttttccccttggggtgtagtgtaacacgcagaaggctttctgtgtgacaaatctctcttttttataattttgatgagatgtcgtcctgtaattgtgcgcccatgtggaggttgtttgcctagtcctcaacttcactatagtttgcaaaagggacaatctgtgacttattgatctactgtatatttagtatctgtactatattattggtgttttgagtggtatcactgatgtgtatcattagtgttcttatatagttttttgaattctcttctgtgaaggcaagttaattattccctttacaatattttggattatttgatgattttgatagagtggaatttctactacatttgcttcaggcactcttagcttgactgaccttgtcaacaaaatatacagtattctccaagaagacttttttgaaggattagaactaaatggtagaaaagatggttctgtgtctgcttgcaagatcttaaaggttattattggctctggtaacaccaagatgtatgaggtgggttggattggtcaggacaatgcagagactaacacttcagttcttcaagccgatgatctagtaattcgcaagaaggcacgcgctagtcgtagcatgctgaaaatatatattagggagtcaacatcacagaattccccatggattatacatgcaaatcttgcaaagaaatatggaatacccactgagcccccaaaagacttattggtaaccatcttccctcattttatttactgtgttccttattatcttaaacctaaaaaaccatggcttgtagaatggtcaagggttgccaaaactgaggagaggactcgagaatggaaccacagatgatgtcagaaaaaaattgaagaaaggtgacttaacagataaccatgtcatcctctcagttcatttgatgttccatacaactacatttttgcccagcttcttattgttcactttttgcatgactatgcaggtgagccaattgatgatcttttattaaggcctacagcagatgatcccagtctgtcaaaaagacgtccactgtctacagatttcagagtgcctgtagattctgttggggatctacttatggtttgggacttctgcatgacttacgggaggattttatgcttgtctccattttccctctcggacctggagaatgcaatctgccacaaagaaagcaaccttgttcttcttgtggaattacatgctgcactcttccatttgctcattaaagatggaggcgggtattttatgtttctccagaacaagagaaggaaattaaaggtgactttgccttatccatcatttaagcatgcatatttttttgtcctttcttgttaacttgcactatgcgtaggtaacattggtcacctgggctgagtatctatgtgatttcttggaaatgacaagtaaagaagaattctccagtagtttatcaactgtaagaagggggcattatggacttgttcacactgccgtgaagcttaaaattctgcgggaactggtagatgaagccataacaacttctgctgtaagacagaatatagatgaaaagattgaccagcaacaagctattgcagcatcaaaaagagagcttgctagaaataaaaaggaagagcataagctggccatggaaggggtgacagaaaaggaaatgagtcagacagatgctgcagaaaatgtcaacgggaatgtaaatggtcaggttgtggaaaaagaaggaaaggagaagaaaaacatttatgccaacaagatgggagaggggaaagtacatcctgtgagaacctatacccttcttcatgtgaacttgcatatgcacgttcattcttacatatgcaaatgcatgtctctgctgaagctatccatgacagcaggtgcaagtcttgttgctaatctttgctttttctgcatagcagatgttagaatttcaatggttactctcattgagaagaggatggcactcgagatggggcaattttctggttttcttcattcactaaacacaaaagccatgtcctcccaaagaggattggatacatatttatagctgcttgtagcagccatgcagccatgctagtctaagagggtgctgtcagcatcccaacaaactgtcctagagcagagcatcccaacaaactgtcctagagcatctcaacaaactgctgtcctaactgtcctagagcatccaaactgaaagtagagatgctgtcctagaaagctgaaaagcaggaaaaaaaggcaccacaagaccaagaccaaccagccaagacttattcctacattctccccctaagtcttgtgcgccgtcttgtgggagagttgagccatcccgatccgggagcaaagctcaaggaacttgatcctcccaaggggtttggtgagcaaatccgcaagctggtccttggtgttgatgtagctcgccttgatgctcccttcctccaagtagcttcggatgaaatggtacctcactcggatgtgcttgctccgttcgtgaaaaacggggttttttgccagggccagagcggacttgctatccaccctgagctccaccgctccagtatctctgccgaggagatcactaagcagtcgagcaagccagagcgcctgggtcgaagcggcggatgctgccatgtactcggcctcgcagctggacagggccaccacctgctgcttgattgactgccagctaacgaggcactcgtcgaggaaaaagagaatcccgctcgtgctcttgctggtgtcgatgtcgccggcgtggtcgctgtcgctgtacccgacgaagtgtgccttgccaggacacctcgggtagtagagaccgtggtcgagagtccccgcaacgtagcggatgatcctcttcacagcctgctggtgctccgtcgtcggtcgctgcatgaaccgactgacgtagccgacggagaaggccaagtccggccgtgtgtgggtgaggtagcgaaggctccccacaagacgtcggtactgtgtagcatccacctcctccgctgtgctgtcgcggctcagcttcagtctctcctccatcggagtgagagctgggttgcaatcggtgagcccagccagctcaacgacgcgcttggcgtaggcggtctgtcgaagcgtgatcccggagttgtcctggtgcacttcgatccccaggtagaaggagagaggccccagatcactcatctggaaggtggccttcatctcctccttgaacgccgcgacctctgcatccttggtgccggtgatcactaagtcgtcgacgtagacacccaccagcaaggcatttcctccattgccccgccggtagatggccgcctcgtgcgggctttgctcgaagcccatccccttgagcgtggaatccaacttggcattccacgccctcggtgcctgccgcaagccgtagagggccttgtgcaggcgtagcaccttgccctccttgccggggatcacaaatcccggcggctggtgcacgtagacctcctccttcaagtcgccgtttagaaacgccgacttgacgtccatgtgatggacgccccagccttcctgagcagccagcgcaagaaggagtcgcacggactccatccgtgccacgggagcgaaggcatcgtcgtagtcgatcccctcctgctgcacgaaaccgcgtgccaccaagcgagccttgtgcttgacgatggctccggcttcatccctcttcagcttgaacacccacttaagggtgatcgcgcggtgaccacgagggaggtcagcaagctcccaggtgcggttctcctgaaccgcgtccatctccgactgcatcgcggcacgccatgccgcgtgtttctcggcctctgcaaaagaccgaggctcaccgtcgtcgcacgcaaggtgcaactgcgcctccaggttgcgaggcaccagtcccggcaccggctggtcgccgagaagatcctccatcgtacggtaccgtagctgctcgccgtcatggtacgcgtcgatgcgctccccgtcgtgggagagcggagtaacgaactccaccgggctgcgctcaacacgagctggcgtcggagtagacgtgcccggaggagtggctgttggtgctggagcgtgtggggacaccggctggggtggtgtcgacgaagagctcgtcgtagtcgaagtcgtggcccgagggtgtgttggtgttggagtcggtggaggctcggggactggggtagacacgctcggtgaagaagagctgcctactcccccagctccctcgaagtggacgtactcgatggtgaagtcgtcgtacgtcggagtcgaaccatcatccaccgccttgtcccatacccaccctcgcccttcgtcgaacacaacatcgcgcgtaatgcgcacacgctgtgtctccgggtcgaggatgcggtaggccttcgagccctccgcgtagccgatgaacacccctggggtgctcctgtcgtcgagcttgccgatgtggccaagctccttggcgaacgcgaggcagccgaagacccgcaggtgggagaccgccggcttgcgcccatgccaagcctcgtacggtgtcctgccatcgagggccttggtaggcgagcggttgaggatgtaggcggccgtcaccaccgcctccccccagaagatggccggcatccccctctgcttgaggagggcccgagccatccccacaaccgtctggttgcgccgctcgacgacgccgttctgctgtgggctgtacggcgcggtgtagtggcgctgaatgccctcatcagcgcagtacgacgcgaattcagctgccgtgaattcgccgccgttgtcggtgcgcagcacgcgcagcttgcggccgcactccgcctctgcagcagcctgcgcatgcctgatggcgtccgcagcctctcccttgctgccgaggaccatcacccacatgtagcgggagaggtcgtcgacgagcagcaggaaataacgtcgtcctcctggtgtggccggtgtcactgggccacacaagtccccgtgcacgagcccgagccgctccttggctcggaagctcgtctgctggggaaaggggagccgccgctgctttgtcaccacgcagacgtcgcagagctgctccacgtggtcaaggcacggcatgcctcgcaccatctccttggcactgagctgcttcagggcctcgaagtggaggtgcccgaagcgctcgtgccactgccacgcctcgtcgtcccgacgagcggcgaggcaaactggatgtgcgacctgcgcgctgaggatgtagagtcgattagtgcctctggttaccttggcaagaaggcgacgacggcgatcccaaatcctcatgagtccgtcctcgaccaacacgcgtgagccgttctcatccagctgtcccacgctgatgatagaattcctcaacgcggggatgtagtagactccggtgagcagcctgtgctcaccggacttggcggtgaaggtgacggagccaacacccttgatctccacgccggaggcgtccccgaacttgacggtgcctcggacgctggagtcgaactcggtgaagaactcccgtcggccggtcatgtgatgggtggcgccggtgtcgaggtaccacccatcagccttgtcgttgctggagccgtcacagagggagacgagtaccttcggctcatcaaggtggaggaaagccgctgcggccggtgccgctggaggtagctcgatgcttgcgtgagctaggagcagagccggctcttcctcctccacccgtgcgacgtgggcctggccgcgtcgtggctgtcgacagtctttggcccaatggccaagcttgccacagttgcggcaggtgtcgtctcgtgccggcttgtggttgccggtggcaacgccctgggcgcctctgcgggcgccaccctcggcacgtcttcgcgcccaccgtagctggacacctccccgcgccttgcgcggcttatggccgcctgtcggggaagatgactcccccttcctcctgtcaccctgagaggcctcccactgctcccgagtgagatggagcttcccgccgatggtgatgggccccgagagaggccgtggctcatcaccatcgacgaccttgaggcgacctaacgcctcctcgatcgacatcgtggagaggtccagcagagattcaatcgagcgagcgatctgcctgtacttctcagggacgcagcggaagagcttctcgacagctctctcctcgtcgtaggtgtcgtcgccgtactgcaccattttctgcaagagagtgttgagacggagagcaaagtcatcaacatcctcacctggcttgaaggccaggttctcccactccttgcggagtgcctgcagtgtggacttgcgggcgcggtcgctgccgatgcgtgccgcagcgatggcgtcccaggcctccttggcagtccgcttctgggaaagcgagaactgcatctcgggcggaactgcagcgatgagggcatccagtgcccgccgatcctcgtcgtagtcgacgtcaccgtaccggactgcctcccacatgtgccgcacctggagcctcaccctcatcaccgcggcccactcgatgtagttggttttggtgagggtaggccacccaccgccgggaccaaaatccctgaccaccgtctggacgccgtggtgaccatggcgccggtcaggggagagggagccgtgccgcctgcgagggccgcgtgcgggctccgggctgccgccggcacgcccgcgcccgtctgggttcccgtcggcgggcgcacgatcccttgggccgccgccgccgccgtggaggtgggctgctgcccaccgctctgctcgctcccgtgcccttcctcttgccagctcctcaagctccctgtcagcggtgatgtcgccggcgatggagccgttgatgctgctgcgcaaggtctcaacctctacctccgccgcacgtgccgcatcttccgccgcctccgcctccgcctccgccctggctgctgccaactccgctgccgccagtctggccgccctcgctgctgctgcagcggtctgagccgttgctcgcctgcgctcttctgctgcggcgagctcggcgtcctgctgacgccgagtgctcgaggcgaccgaacgccgagaccgagcgtcggacatggcgcacctccggggggctgctgtgtggagagggggaagggaaaggggaaggaggggcaaccggtgctgctgctgctgctgctggctgagagctcaaccgagcttgggaaggggtggaacaagagatgtttatggttactctcattgagaagaggatggcactcgagatggggcaattttctggttttcttcattcactaaacacaaaagccatgtcctcccaaagaggattggatacatatttatagctgcttgtagcagccatgcagccatgctagtctaagagggtgctgtcagcatcccaacaaactgtcctagagcagagcatcccaacaaactgtcctagagcatctcaacaaactgctgtcctaactgtcctagagcatccaaactgaaagtagagatgctgtcctagaaagctgaaaagcaggaaaaaaaggcaccacaagaccaagaccaaccagccaagacttattcctacagcagaggcaccttggaacagaaatggagaaacaatctgtacaaagcaattcccttggaaaagacaggtactacaacagatattggttttttaggcatgaaggacgactttttgtcgaaagtgcagattccaaagaatggggttactacagcactaaggaagaggtgatcactttgcaaactttgggaatccctatgttttattttctggctaacagttctgtttcaatttgtaatccacagcttgatgcgcttattggatcgttaaatgttaaaggcataagggagagagcactgaaacggcagcttgataagttctataatacgataaggtactcaattttcattcaaagaaaaaaatataagataattcactcattgctgtagttgggtactttttacatgtttgatggttgcttctgttaatttttggaagtgacagattagctggaaagaagttaatcatcccatgtcaattttttgaaggcctacatctaatttttttaaaaaacaaaatgttatttaatgtagataatggtccagaatggtctttactggtggaacattcagttcaaggcctaaataacacaccgtagcctccatttttcactgaatggatgcgctatacttgctagacatgatcgaagctcctaaaaatagatcttgaaagattaatcattgagtgtaggttttttgagacctgtttgccttacagttgcagtctttatttgtacaagtaaaatgttctttgtgtgtttctcaaacatgaaggaaaccttaagcatgggcaccatatgctctcatgttacttttcagcctgtgggcattggacacttatggtaaactctttgctctgtttgtttagcaattgacctttgtgttggccgatgtagcaatgctctggaaaaaagaacgaaggacgtcacccagaaaatgctactccaagaggctgcactgcggcgatcctctcgtgtacaggcccaaccaagggataacccttcgatgttattcctcaagtatgtcaacaaatggaaggaaaactgagctcttactggttgatatgatacttgataggttgacatcttctttttcttttttactccctaccctttgaacccttgtagcggtttgttttgggtccttgatagctgttgatacaccaaaagaggaaacctgtcatttagacatagtcggcttaggcgagctgcttgaaggaaagatcgcattcgagtggactcatgctgctataagctgatgatcccatatccattttggaggattgggtaactgagagttgttaagcagtagaaatcctctgtatagtgaagagagtgcagaggtccatccgttgtatggaactatggatatgattgttccgccttgtcgagttccatgaatctataccattacctgtttattatcaactgttctgttttgttgtctcgttattatgttttgttttaatgagaaaattaggctctaatcttcatattctgttttatcgtgagaagttggttttgttcttgcatttgtactttttttaagggtccacgggagatattggaggaacaggtatctactaaatcctaatgtagtatatttctgtaagagttaatcacatctatatgatcttagaaaaaaaataagaggatttctggtgaatgccaaccaaatttcaaccaccccactgcacaaccgatcgaaatttttacatcacaatatttaaatttaaatattcacattatttcagttcccagagcaaatacattacaccagatttaacttacacccaggtgcaattgagcacatctaaccaccgactaaattctggagtgagggtcatccatattagccctgcacccagaatcgacacactgaaatttaattagcctaccaatcaacacctatgtaaattcatgtacaaaatgcccaatatttcctacccatataaatttacattccataatccgtattgtaatatacattaacaaaactacacaaaccctattctgctaatcacaaggcaagcgccttgtaccattgtccatggaccttctctgatatgactgccatatttatcagcatctccccggccttgacaaccctgtcggcgagcttcgccgcggcgaggcgtcgcagcggcgcttcggccagcttcttgcccttgacgccgccgccgccgaggacgacgccgcggaacgcgcagtagaccgtacgggacaccttgccgaagacgacgtcgccggcctggaggctcttgaggagcatcttggtcgcgagctccgccgtggcctgagcctgcttctccggcagagagagagagccgaccgtcgccagagagctcgccatcgcctccacgatctcctccgtcgaagcgtcggggttgctgtcgaggagcttcacgagagcgtcgtagagctccgagatggcgttctgcagctccggagcagcgaccttcgacaccagaacttgatgcaggacgagaatgctggaacagacagacatggtagattgatttcagttatcacatgcatcaagtataaaaatcagttgttctgaatcgacagatttagttcaaaagttcaaggtggagaatatttatttacctcgtcgcgatcacaatcaccttctgaaactgatcttgcacagccctcaacctcggcagattaatttggaaggtctcaggggttgactgcatgttcaggccctccacattgctgataagttgcaacaagccaacccttgtcagcttgtcgatcttctcacccttgcattctgggagaccagaaccgctagctgcggacgaagaagcctgagccattggagcaccgtgaccagctcgaagtgccggaacaacaacgcgttgagcctgacaagacgggttaaaattcagtgtcagtcagagaaaaacttaagactgctgcctatgctaatacaaccgtaaaaattgttgtgatcgtagagagacttacatgatctgctggcaaagcttggagagactccaaatgtgagctccactcttgttccacgatgctcttcgttgccgaaacccactgcttagttatagggagagacgctgatgcattagcaggaggtccatagcgatccgcgaaagccttctgcaggtactccactccggcagagccttttatgattggttgcatgagctggatgcgagccttgctaacttcagattgcagttgctgttaaatcacagaaaaaatgttaggaaaacacggcgcaaagtaagtgcaatctatgtcaggactaagtcaaggtgttaacattgaacaaacctttatttcttcgagagtgaaacgcaggcccttgatgacagcaatgacaaaggagctgatgccattgtcattaacttcggaacttgcagccaactcgttcaataatttctcatgactcctcttcatgtcatcttcctttgcaggggcagatagtttcctgatcatatccagggagtagtgcataatctgccccagatatcgcgtgtcctgggagcctgactcgagcacctttcatccaaaaaaaaaataacaacattaattcaaaatatactgggtttaacaaaagcaaattaatactaactattttattttgtcaagaccaccgattccttacctgtgacaaaatttcgaggtcaatgttctcgaggatttcctccttcaactccttggaagccaactcatgtaatgaatccctgacttccttcacgaggttaattagttgggtataatctggtttgtcccctttcatcgaatcagtaaccagatcccaaaacgctttctccatcgtcgatttcactttggcctgaaactccttctccgcggaactgacgttatcagagttgccaccaaaagaaacatcgtcctcgtgaagcatctcattgagcatttgctcattgtccgtcggctgtttcatcagagatgaactgcttggcgatgaagcagctccaggcaaagattgggcagtgaagctcgatccagacgaaccaatgctcaaaggagtagatacgtttgcaactgatgcagctaatgggtttccgttctccttcgcctcaaagaactttgaccttgtgtccgaaagagcagagttcatccgctcgatgcctgcatcgccactcagttgatgaaccttctctcgtaacagcttctgatcatcagcaacctgtttctgaatcgccttcatatcatgagagaggccattatgtgactgcccatctgaacttagcttgcacgtctgcatcatcgacagctcaagcttgcacgcagcccggacaagatcgtcctccagcgatttcgcatccttcagtttccacaccacaaagcagtagaggtaagcgcaccatgctctatcgaaatcggccagctgagcactgaacattttctgaccggcagcagcatcagtcgattgcttctcaagcacagtcttaaccaatagctcaaactccttgacaaagcttcctgctgaatccataagtagcttctccttctccccttgtccactcaacactgcacccggatgagccaggatcatgtaggagcagaggactaccctcagcgagtatcgagacgcgctagcagcagcagcaggtggtggtgtcttcttcttctttggagatccaaggtgtttcaggaggtgatcgatgtttatgaccggcgatgaaagaag

SEQ ID NO: 23392 - DNA, 13577 bp, Oryza sativa
aactcgcttccttcgctgctttactgttcctctcctctcctcgacttcttcttggtttttctctctctccctcgagagagaagaagttgggtttgttgtgttacgctttcctctgtcgtttgaggtggcaatatatacacagcgggtgtggggggagtattcggaaacggattgggaatcccaaggcggatcggacggcgaggaggggggtccgagacggagatggaggacgcggggaggccctatttttccgggtttttttttcttttctcggtttcctctcggtattttttttctcttttttcggttttttaatacgtgtgtacgtacgcttttttttgggttttttctctccttttttactattttttaatatgtgcatctacaaagattgtataggtacgtagtatctcacacatttacatagtttgtagtttttttattggtttttaatacatatgtaaagtttgtatatgtacgtttacaaagtttatatacgtgtatatattttttattcactaaaaatgtatacatataaaaaattaaatatatctatattttttatatacagtgtatgtactccctcttctcattggatatccattagttgattatgaatagttagattaaaagagaaaaataaattactgttcccttctttttttttttaatttctgcgtgcatgcactccggccgttacatacgcaggttcaaattttttgatatggttgaggaagcacgttactagtatatgtatttttttttctcggcacacaagtacaaactttttgttttatactccctccgtcctaaaatatagctatttctagcacagtatcttgtcccaaaataaagctatttcttcacctacctcctcctctcaaccaatcgcaaccattcttcttcacctactttctcttttcaaccaatcacacacttcctctaattattctcacctactttcttaatacccatgccaacctaaaaaatggcttcattttgggacggaggaagtagtatgtacactattgcctcacaaattttgacaatttgactctttgcaaaaactaattatacaaatgaaccgtggtcaaaacttattttaaaaacgacccttttgttcaaacacctcagcgtcaaatagcatggcgctgaatgcaggttggcacgccgactcatactcccatccacgatggcacgacattcagcgccagttgacgtggcgctgagttgtctaagttcagcgtcatgagatttggcgttgaacaaaagggtaattttgaaataagttttggctacggttcatttgtataattattttttgcaaagggtcaaattgtcaaaatttgtgctactgcctagtagtttatatacttgtttgctttccatatagtattgtacggtgcctagtagtatatccaagaatgaacaatatcagcacttttatactactttgtaaatagtagtagcgatagatatagagaacttttaaagtatagctagaaaggtagcccgcacgaatgcatgggcatatgtcgtacgttaagtttaagatacttataaaagtgaaatattaaccggagaacacctcccatgatttctctataaattgttttcatggcattaattgcttttataagtttataacctattagctttatgttaatcatatttaagtaatatctataagcaattatttataatattcttcattatttgaaaagaaggtagacttattttcttcagaaaacatgtcagtaaaagtaagttggttttctttttttagttgcgtatatattatcatagtttactaaaggatgaattgggtgggacatgaagctccagtaaatatatgggtttatatagtctaaaatgattaatgtagtttgagagatgatccatctgaacattcatttcatatagagtgagtgagaggctccacgcaatctaacatgaatacgataacgacgaaatataattacgcagtaatatttttaaaatatgatgtaccatgaatacacacttgtttttttatatatataagatagatctaatggttagaaataatggtttcacggatttaaaaagcataggagtattccatatatgtagcttttggttgttttaattatgtagttggtgacttacgaacactccggagggcatttaattgattttgattgtgtacaatgatttagtataacacgatacatattttcaattaattttcgtgtttatttagtgttcatgcaaacggtagggtctaccttcaaatgatatattttaacttttatatagcaaaatatagctaatgaatgtttaattataaataaaataatagttatgactatttttatattatgttagttagaaaaatatagaagaggcgataattgcattggagaggagaggatgcgagaggcagagtgggaggagagtggcattacgaaagacaggatgatgggaggagattagatgtttttaaaatagatcgaatgtgcactataatttagagttatctatttttataaatacatttaatattagatctaatttaaatactttgggtgttgtattttctaattaaactacttaaattattctaattttagtgcattttgttaatcaaaaggtttaaaaatatatttgatataataataaggtctagtttgaatttaaataatatataaaaaaaggagggtggacaccggccttggaacacgaaggaggaggcgtacgtctgtttctacaaaagtgtataggacggtgatttagttttataggacggtgatttagttttatttttttaaaaaaatattattataaattgtgatttccatctaactaaaatagcatgaaaatcatgaaaataggagagagaatgaacagaggggaaggcgtacacagatggagttcacgtaaatggaaatgtacttaagcgggacgggaggggatcgatgctattttcttttttaaaaaaaatagatctaatgacgtataatattaggtccactatataactttaaatctaatagctaaaaatctaaatagtgggtccaccggttaattagaatgccacatgacggtttaggagtgtttttacgagtacacgtggtggtttaggagtatttgtaggaagatatggtgttttttatgtacggacatatgcatgttttctttttttttccaaataataatctcatgtacatgcatatatacatacatatattttctccggatgaatagtatagatttatttttctctctcacaaatacacatgagattagaagagagggattaattactttaatatgatttgatctaatctattctacacctgtacatgtgtaaatcaattgttgtatatttatacgtgactacatatacaagggaaagtgatgttacgtgtgggaggaaggaggtggaggtggaaagattttttttttagataaatctgacggcttgaaataatgggtccaccgattttaatgaaaacagatggacagatgttttgtttttttcttagaatttctaggaatttctattatttattagaatgtcatgtggcgacttatgagcgtttataggatgacatgtggcggtttgaaagcgtttttagggagtttaatggacttttagtatataatagatagatagatagatagatagaagatagatatactaacagtatatactacaagtataaccgatctaacggtatagattgatttgatatttcattgaattagattgtactataaaattttaaagggtaaattcgactttgcatgttatcccgtggacgtattttcttaccgctcgacaaaagaaaattgtcgttcggccctccccactccttcttcttcactacgggcgacgagcgaatccacgcgcgccgtgccaccactgccggcgaccgcaaccacaccgcgccgccgccaacgggaatcgattcgctctcctctcctcctcttcttgccttcccatccaccaaaaaacccaaggcatgcgctatctagaggaggagcagccacggcggacgcgacggcgctcaaggaggaagatcagcagcatgcatgcagagggtcgtgtactcaatggcagattttgtcttccaccccgcggcgacaacggcctcgtatgatcgtatctgattgctgattcgactctcgtatgactacggccaagtagcacaacgccacaaccaggctgggtacttaatgaggtttctccctctcgagacggaagaatttaagggcgtcatcgtttcgctttttttctaatacgccaaaacggcttattagggaataaaaatgaatttgtaaataaaatttttatatatgtgttcttggtgacttaaaagccaatgctgaaaaaaaaaactacgttgaaaatatctcaaaatcgttctcaaaattaagtttgaaaatttaaaatttggttttttttggtttatctaggccatccgatgggagcctaagtgaaaaggcatcatgaccggatggcggatgctcatgccggaacagttcagctatttgctcttttggcttgtgttcccaaaagtgaaaaaaaaacacacttgttttcttcatttgcttcaggactgcatatttgaagatacttctgaaccttctttttgatatgcatgatttctgaacttggtgaatgtgatacctaagaagcaaagatgataaactgaattttcagtacaataaaaccaaacaattccatggtactgaaagcagtactataaaatcttcagcacttcacaagcaaatactagcaatattacaagataagcacattcgaattgttataagtgtactgccttttcttgtaagggaagatatgaaaattgtgccatctttaattatattctaaacatccttcatgtgctcaactgcatgaacaattacacaagtttcaagagaacatatggaaacacatggagtaaggccgaatgacagccaagagaatgagtcgcactgctgcctagcgcaccaccgtcgctcgcgagcacaggaatgacgccggggacgaatcacaccgccgcctagcgtgccgtcgtctttcgcgagcgcacgaactgaatcttatttattggattggattaattctaaacgtagaaagctcttttccactttctgtcaaattcctaacatacccttctatataatgtaagtatatactcatagtataatatactgtaaaagttatatttctgtaagaagttaatcacacctatacgatcttaagaacaaaaaaggaggatttctggtgaatgccaaccaaatttcaatcaccccactgcacaaccgatcgaaatatttacatcacaatatttaaattaaaatattcacattatttcagttccaagagcaaatagattacatcagatttaacttacacccaggtgcaattcagcacatctaaccactggctaaattctggggtgagggtcatccatattagccctgcacccagaattaatttttgacactgaaatcagcctaccaattaacacctatataaatttatgtacaatgcccaatatttcctacctcaccccggtaggacaagaatttacagtccgtaatccgtaatgtatattcacaaaacaacacaaaccctattctgctcttcacaaggcaagcgccttgtaccattgtccatggaccttctctgatatgactgccatctttatcagcacctccccggccttgacaaccctgtcggcgagcttcgccgcgccgaggcgtcgcagcggcgcttcggctagcttcttgcccttggcgccgccaccgaggacgacgccgcggaaggcaaagtagaccgcccgggacaccttaccgaagacgatgtcgccggcctggaggctcttgagaagcatcttggttgctagctctgtcgtgtcctgaatctgttcctccggcagagagccgaccgaggccagagagcgcgtcatcgcctccacgatctccttcgttgatgcgtcagcgttgttgtcgaggagcttcacgagagcgtcgtagagctctgagatggtattctgtagctccggaggagcgatcttcaacatcagaacttgatgcaggacaagcatgctggaacagacagacatggtaaattgatttcagttatcgtagaaatcaattgttctgaatgaccggtttagttcaaagtattgggggttgggggggggatgatatttatttacctcgtcgcgatcactatcaccttctgaaactgatcttgcacagccctcaacctcagcagattaatttggaaggtctcaggggttgactgcatgttcaggccctccacattgctgataagttgcaacaagccaacccttgtcagcttgtcgatcttctcacccttgcattctgggagaccagaactgctagctgcagacgaagaagcctgcggcgctggagcaccgtgaccagctcgaagtaccggaacaacgtgctgagcctgtcaataagggataaattcgtgtcagtcagagaaaaacttagactgctgcctaagctaatacaactgtaaattgttttgatcgtagaaacctacatgatctgctggcaaagcttggagagactccaaatgtgagctccactcttgttccacgatgctcttcgttgccgaaacccactgcttagttatagggagagacactgatgcattagcaggaggtccatagcgatccgtgaaagccttctgcaggtattccactccggcagagcctttaataattggttgcatgagctggatgcgagccttgctaacttcagtttgcagttgctgttaatcacagaaaaatgttaggaaaacacggcgcaatgtaagtgcaatctatgtcaggactaattcaaggtgttaacaaggaacaaacctttatttcttcgagagtgaaacgcaggcccttgatgacagcaatgacaaaggagctgataccattgtcattaacttcggaacttgcagccaactcgtttaacaatttctcatgactcctcttcatgtcatcttcctttgcaggggcagatagtttcctgaccatatccagggagtactgcaaaatctgccccagatatcgcgtgtcctgggagcctgactgaagcacctttcatccataaaaaataacaacaacattaattcaaaatataccgggtttaacaaaagcaaattaatactaactattttattttgtcaagaccaccgagtccttacctgagacaaaatttcgaggtcaatgttctcaagaatttcctccttcaactcatttgaggccaactcatgtaacgaattcctgacttcctttacgaggttaattaattggctataatctggtttgtcccctctcatcgaatcagtaacaagatcccaaaaggctttctccatcgttgctttcactttggcctgaaagtccttctccgcggaactgacgttatcagagttgcgagcaaaagaaacatcgtcctcatgaagcatctcattgaccatttgctcattgtccgtcggcggtttcattggagatgtactgcttgacgatgaagcagctccaggcaaagattgggcagtgaaacttgatccttccacagtaggcttggaagtagggtttggaacctgtccagatgaattaatgctcaaaggagtagatacatttgcaacagatgttgctaatggatttccgttttccttcgcctcaaagaactttgaccttgtatccgaaagagcagagttcatccgctcgatgcctgcatcgccactcaggtgctgaatcttctctcttaacagcttctggtcatcagtaacctgtttctgaattgccttcatatcatgagaaaggtcatgtgactgcccatctgaacttaacttgcatgtttgcatcattgacagctcaagcttgcatgcagccctgacaagatcttgttccaatgatttggcatccttcagtttccacacaacaaagtggtaaaggtaagcgcaccatgctttatcaaaagcagccaactgagtcctgaactttttctgactggcagcatcagtcgattgcatcgaggcacctcctggtctatcaagtactgtcttaaccaatagctcaaactccttaacaaagttttctgctgactccataagtagattctccttctccccttgtccacttaatacagcacctggatgagccagtatcatataagagcagaggactacccgcagtgagtatctagaaagcttgcttgtctcggaacccttcgctggctttttcgcagctaccctagatctgctagcaggtgccttcctctttggagatccaaggcgtttcagaaggtgatcaatgttctcggctgatgatgaaccagttggctgagaaagaagcaaacgtttctcgaaccggtcaagcactgccttggtggtctggagagtcgttggagattccatcaacatagctaaattttcaaatggcatagatttgacagacatctcattaattcccaaggcgtcataagcttgaaccagtgcatatgttgtcttgttagatttcaaaaatcttttccagcatctgaagtacaacaaaatggaaaaaacattgccaattagttaaaactttcacatgtgcaaatgcaagaaaataatattccaaaaatcaactgtgtgacaccataccttgccagctttgttgaaagaaattctgcatgcttgatgtaatcagcatgggcagaactacggggacttacccgctgcttcaagtactcagctctctgcctttttgcctgttccattaagttaacttaactgtaagaaatagaatagaagggctaaaacaacaatatcagagtataatatgagagaacaaacataccttctgaagcttgctttctagctgttcttgcaactgtctcctctctgattctctcttgctgcatacagtcttggcagctcgttggatgtgcaaaatcctagcctgggctttcctcttctcagcttccagcaatgccagtcgcttcttttcagcagcattgcgcttttgtaagatcaaagacttgactcgctccgtgtatttcctctcagatgtctgtttccgcacaagggaccgcgccgttctctccttcattgccgcccgcttctgcatatgtgcatgcaaaagacgcatgcgatttgcctctgcttgacgaacacgagactcgactcgagtcccgagttcttccctttctttctcgatccgcatttccacgatgttcttcgccgcttgtcggagttcatccaacttggctagcctgttctgtgcctttgccaagaggctcaacctgcaagatacaaataattagtatcagactctcagagctcctctaattgcataagaccgcaaataactaatatcaggcactgttttttttcattaccttttctgctcggcggcctgaagcttcgcttcgaggcgctgaccttgatcttcctcttgtgatgaccatgatgggctccgcggcttcttcctcgctttgcaggacacccattcatggaattgctgcaaagtgcaaacaacatatgaccataagctatgttgatcaatcatttatcaataaatacagtaccaacatcttaataacaaatcaatcaaatatactagacccaaatacgagtcatacgatacggtcccaaaaagaagaagaaaaaaacttcaagtgaactgaacctaccaaatcacatcaaccaaaaaaagtttcacccctattacttactggtcaccaaattttcagtactacaagtgcgacgaaagttacttctaacttctaagcgaatccaagtgtggtcggtggtacacaaactattcataccaaactaccataatcttttcaccgacgggacaccatgtgctgaattgtttgctcatgaccctttttctacaacaaatattatcttcctaatttgaatataaaaaaaagaaattattttacaggcaacctgtcgtaactcgatgcagacaactaaatatgttactgatatccactgattactctttagcaaaccgcaggtagaaaccaaaagataattatatactgcattaaattattagtgcagtgtatatccaacaaacagataaaaacgggaccttttatatggggaaagtacgctttaatccagagccgcaaaatcatgcggctgagagaaaatcgaatggaaaagaaatcgaattcgaggcacacgtgaacccaacttcatctcacgactacctaccaagaacagaatcccccaaagaatgttacttcaactccccaccaggaatcccaaccaccaaaaacaaaaaagaacctcactgcacagaaatccttccacgtaatcccaactttgcgtctccactaatcagccaaaataagtttccaattaaagtagaacataagtgattaagaaagaactggtcgtgagtacccccccccccaaaaaaaaaaaaactgaaaattaaggactaatcctagtctaaaaatagcagcgaaattcatcaaaaccaccactctgaactgttcatcagcatgtaaagggcactatggtttaatcagtagtaaaacatttcttacgaaactcgaaaccgaaacaaagcaactcaaattaaatcaaaaggctccaaaagcttcgaattcacagttcactctcgtccccccacaatccaccgcgaaggacgaaatgaaagaaaagaaaaacaaaaacaaaaaaagcgacggaaagggaacccggacagggacacctacctgcctccggagctccgcctccttcagcttcgcctcgatctcctccgcgctcgtcggcgccccgcctccgacgcggctcccctccagcaaccgccgcctgatcctcggcggcatcctccccgccgccgacgactccaccgccggtatctccatcgccaccggctcccgcaccaccatcctcctcctcctcctcccccgatcaaaccaccaaaccaacccggcggaatcaaactctactacgggcgaatcccgcaaagcagactcgccttccttcctcgcgctgctttactcttcctctcttctcctcgacttcttcttggtttttcttttttttttttcctctctcgagaagaagttagtttgttctgttacgctttcccgccgttcgcgtgaggcgtcaatatataacggcgggtggagggagtattgggaagcggtttgcgaatctcgaggcggatcggacggcaaggcggggatggaggggtgtttcggtaatttgagtagggggtgtgtcactgacggcgttaggccttagggcgggggtgggggggttcgagacggttcggggcggtggggccccgcgcggttttctcgtttgtggatcgggttttggattggacggaattgcccctgtagtgtaggcggcttcgctttggtgtccgaatccggttttgcaaaggttaggctgcttttgcctgtggccaatgagttgatcactttgttatcctcgtggtggataataatggaggtctacgaggctatggaaaaaaacgtgcatagagaagatgtttttttttattttttctatgtgactaatatagaggtctggctaacacgtatgcgccaccgtggcatatacagagcgggttagacagcattttgatctccatgacactcattagacaaagtttggagacttgcatattacattttaagaatttagcgatctagatgacacacttatacaagtttagatataggcacctgtgtactttgctcattttctaattgtaatttaatcttgatttgaattttgatatttgagaaaaatttacgtgcatctttacttttttcctattaatcataggaaaatactagtaaaaaataatggaacaaagttaggaaaatactagtaaaaaataatggaacaaagttattgatgaaggattatttttacacttaaaatcaaatttaaaatttgagaattagctacataatacacttgtcagttgtggctgactcactgttggcccgacgttgcttcgactttgaccattgataatttttttaaatggttaaattgtgttagataaaagtgcaatggataaaggcggtatatatcggtttgatatagcgaccgataaaaaataccctcctctaaaaaaaagtgcaatggatagtacttcgtactccaacatttgccttgcagtgcatctgcctgagctgctgctgggacgggcacgtcagcgaggctcacgcctggcgtcggaaaccggaagcggataacgtccacgtgtgcctcctccacgtagcctgctggtcagtgacacgtggggccagatctacgatggccccacgggtcagtgaggaggtgcggtatattctcaggtgattgcgtttgctgctgctgctagttggggacacgcgtttccccactatgcaggaggggccaggggaaacgtggcacgaggagaacgcttactttctctcgtctaattacgcaactgccctcacgatcatttctggatttctggccagcttccctcactctgcacgtgtcacttcttttgtctttaggtggtgtttggttggagggactaaggccctgtttagatgagactaaaacttttaagtccttatcacatcaaatgtttgaaaattaattataaatattaaacgtagactattaataaaacccatccataatcttggactaatttgcgagacgaatctaatgagcctaattaatccatgattagcctatgtgatgctacagtaaacattctctaattatagattaattaggcttaaaaaatttgtctcgtgaattagcttttatttatgtaattagttttgtaagtagtctatatttaatactctaaattagtgtctaaagacagggactaaagttaagtccctggaagtaaacaccacctaaagtggagctaaactttagtccctctcacaaaaatataagtccctaccatagggacttataattctgtgagagagactaaatttagtctctagttcccaaacacccccttaaaatagcaaaatttgctacaggacacataaaaaaaatatgtaattagctgagagacacagcaaaaacgtgacactgcctatctaattggcctaggacaccagacgtattattttatcatttttaggatgaaagaggggagagaaatttctaaatgactggaatgccccctttactcctccttcctttcttctcgctgcagccgacatgtgggcctgcgcacagtgtcatcgtcctcctctcgccaacgctcaacgccggccgtgtccccgccctcgatgccgccgtcgccttcgcctgtcgacgcgcctacacccagaccacctcccccctcgccccacccgcaccttccctcctccgcgacaccctcacccacacccgcgcttaccccaccggattccgcagcggggacatcaagcgatgtccagatcgtccaattcagcggcaatatcaaattctgacggcgcatcgcccccctcgtcatgtccaagaaatccatcaggctcggcagcaagaggcaacccgtcttcccctatctcgttgtcggagaggcggggctgcagga

SEQ ID NO: 23393 - DNA, 18049 bp, Oryza sativa
tccatggtagtgtcacgtttttgcggtgtccctcagccaattacacgttttttgcgtgtcctgtagcaaaatttgccttttagaatatagcggcctggtttagttaccaattttttcttcaaacttttaactttttcatcacatcaaaacttttctacacacacaaactttcaactttttcgtcacatcatttcaatttcaatcaaacgtctaattttagcgtgaactaaacaaatccttagtattgtgttagacatattccagtcaggaatgatattatatgttactttgccatgaacataatcttatttctatcagcagaaatggatcaaccacatttcttgtttctaattacagtgacatggttaaaacatataatcattttgctcataacaagccgtttattagtaattaaaattaactttacaaatataatgtttatatatgtgttttcagtaatttagaagtaaatacttgaataaactacagcgaaaagaacttccaaatcaacttaaaataaagttgtaaaatttaaaattatacttatatttacaaaccgaaggctagatgatggggttgaatacttctacctaagttagaacaagtttataattgcagtagtgcaatagcatgggttaaatatataatgctggattttagtgaggtttgcgagtatgtaagtgtggtgtccgcgtacatatgtcttccatattggaaaaaaaataaagaaaagtcaaaacaggtgttagtacaatgtcattcatctgtcctaaaaaagtccatgttcaatatcttggatgggcttacattctttcctatccaatccaaggaacactgtaggaagtgcacaaaagttgacttcgattttcgagtttgacatttctacgacctgcaaaatgcaggtagcgagacaatatatttattgtataaaagagtagaccgggttttcatgatacacatggatatataatgcgaaggataaacaaagtttgattaattagcttactgctgtacagtcctaaaatatcagtataaattgtgaacctgttttggtctccttaacaattttgtactactaattaatgcacatttctctctgaccaattattcatatgaagccaaacactcaatgcgacggtgccggaccaagtccttgcagggggtaaggtttcacaggtgaccctagcaaaatcaagtactgaaagcgattgtgggtttggtagctcgtcgtggcctcgtgctacgcgtttggtaattggcagggcacggatggctgagataagctaacgccaccaaacttgtctacacatataactacctagttttgagtctaaatacctaatacacataaatcataacatgtatatattttgcctggaaaggtaaactactcctgccatgatattaccaacttctgcagatatattacaacagtagttggagttgtattttaaagaatacggtatgctttttatccaatacaacatgtttccctaaaccggtgtgatagctgtttggcgaagtcgagtttcacaaatttatagtctcttttggaaaaagaaaaggaaattaattcgtaggacctataaaagcttgaacttgttttataaaaattatgtaaaatttctgctgtatagattaaactaaacctagggaacaaattaaaggaaaagtgaagacaactctacgtaaaatgcaccttgctagctaagagacggtcaatgttgacgcttaattagcttaagctacttcttgatcaaatgcttgcacgcatgagcaaccgtttaatttgcacttaatctgctgggatgcgctaactaattggtacaccagtttggtagctagagcacgcactatacgtaattaggctaaaatatatatagtcaagtctctcttgttataacgcttttattgctgagattgatgcaccgactgaacttgaacgaacagtcgcaggaaccacactaccggctaatgctccgatgatcgagcatcattagtcaaccacgtacacggcctacttaaatgtagacaatgaaatggcagggaaaaataattttggtgtccttgcaaattgctacagcgaaatataaagcgttctcaatgcatcgagacatatatacatattcatgcatgcggcacataatttaatttgggggccgttgaaacagagcattcttacacaagaattttgctggaatgttatgacaagcattttgttttttaatccctccatactcgtaaaaaaagtcgttttggacagcgacacgatctccaaaacacaattttgacttcttgtttctataaaaatatttattgaaaaataatatatgtatacttttatgaaagtatttttcaagacaaatctattcatataatttttacattttcaaactcaacaaattgagagttattcataatttatatttccaaggtttgacttaaacattgtcctaaacgactttctttacgagtacagagggattagtacatattaagctcagtgaacatttttttttcgtgtgcaagattaatgcttgggctctttattttcagcttccctatcggattactgccgttgattatactcctcgcttctaaaaacgtgagttctcaaaagaaaaaaaaaacttttattgtgttgtactatttagaccgcttattctaagctggtagtatttgttcaactattttgaaatatttaatatctctaacttaagtagataattaacttgtggttgcaataatctggttcaaaccgcagagttatttactacccaaatcgatgtgtaatctcctgggagttttacctggttccttgtccgaggagactgcaaggtataagaacgtgccctaaaataaaaggcctttcagagggatctccggccggttgcatcagatacttggccccatgggacgggacaggggagatccctgggattaggtgccaagccgcggccgaatgacttgcaagtacagcgtctgttcaagcaaagcatttcctcgttctttagatgggctattttgggtgtgtttagttttttgggtgtaaagtttttagagtgtacggatatatatttgaagtattaaatatatactaattacagattctacctgtaaactgcgagacgaatttattaagactaattaatccatcattagtaaatatttactgtagcatcacattgttaaatcattgcgtaattaggctcaaaagactcgtctcgcaatttacatgtaaactgtgcaattgttttttttcacatttaatactccatacatgtatcaaatatttgatgtgacgtttttggtcaaaattttttgatctaaacaacgcctttatgttgtgtcccgtggttactatgcaactttgtcgagaacttttatggttctttaaagtatctcctaaaaatagtaaaacaactagtactattactatctccgttattacaaaataaattaatctaacacgagatatggcatattctattactacctccgtcccaaaaaaattgtatttctaactccaaggctttgtcccacaaaaattatatttgtagccatgtggggcccagcaaattgattgatctagataagattcctaatgcaagcagcaaatttttggtgccaaatccatttggcgctaaagcatgtaatttggactgctaatgcttgtaattaagtatgctgattatatgggttaattctctcgaatttccttttaatcattttgtatatatggaatgtgtgcatgcagtgggttcattaaataaggccattgtggtcattttccaatcatactgttttgtcctaaattaggtagaaatgtaatttttatgggacggagggagtactatgaatttggacaggtgatatatgtcttaccgttcatagtactagtatatgctacatttcgtactatattaacttattttagggcagagaaaatataacttatcatatctagcgagcgacaactcatgatgatactcactccctctgttacaaaataaaccaacctcctatgagatatgacgcatcatatacgatgaatatggacatgcttatgttcagattggttctttcaagatatgtcacatcttataccactgtaatagagtgtctaaattttgtattatgatgattccggacacgcttacgataatagatcaggctgcaacaaagcagatgcagcaccaataataggaagttaccacggcaacggaacaaacatttgcccggtgtccggtgatgacaacgacgacgatgattgatcgatggtttctgaatccgtgtgcacgcacgcgtccacgtacgcaccccgcatcatatagcccacaccgtacaggtccacagcacacaagtgacacaagaagtccacgtcgctgtagccgccgtggctacctcgccaaagcccgttgcgacggaacagacagctacggctaactaacgtacccccccccccccccccctcttttcgtctcgatcgaccggcaccgcaggaggaccaaccgaaaaactgctgcaccctccgttttatattatattaaatgtatttttattggtcaatttgatcaagattataaaaaaacttagcaacatatttattaaatctaatattaaatatatatttcgatattatgtttattttgtactaaaaatattattatatttttctatatatttatttaaatttaaagaagtttgaaaaaaaattataatataaagcgaatggagtacaccgatagattcaatatggagtatacagtttgcggactttataatcacgttttagagtcatgacgacgcacatgggcgatggatcggttggccacggccagatactgatcagattccaacggataacgcacacgcacacgcacacgcacatatcagagccgagctgccgtgtggccgatgccttctcctcctccttttcttgggtcatcgatcacctgcccattcgacgtgtacatgtatgaaagggaggattgaatgattaatggtcacttaattaattaacagtggtgcgactatgtaagctgatagcataacatacactgtatcaaagctgtcacgctgatatatcacatattccatccgtccaaaataaattaatttaaaatatagtagaatattatctttctatgcaacaaaacctgaacagtattttagggcctattcattttgatgaaaaaaaacttattaaattttagcatcaattttggtaactatactaaaattttagcaggatttcttatatagttaccaaaatttgacagcaaactaaatgtagccaatttttagcaactttaccaaaatttggtaatgttgaaaatgtcatcaaagtgaaacccttatattggtttattttgagataaaggaatagtatgcctgatggctggctggtaacgggcaatggatggacccaagcaaaatgagaggctgtttctttcgtgaagaggaaacgaaagaaccttattcttttttactctttccttgtcatgggttcgtgcgttcttcctgggccggggcccttgcgtgcggggcgagacctcttcgcttccacgcttccgtcccctgggaaggcaagggcgcgcggacagccgcgtttgacgccgcacacggcacatctgcaatggggattgggaaggcagcctcacgtttgcgacgacgacgacgcatactgcaacacaagttgtgggaaactagtaaactgctagcgtatgatttggccggggaactcgttgaccaatgaccatatctactccctccctccgtccttaaaaaaagataaaccctagtttccacgtccaatatttgaccgtccgttttatttgaaaaaattataaaaaaattaaaaagacaagtcacacattaaatattaatcatgttttatcatctaacaacaataaaaatacaaattataaaaaaatttcatataaaacggaccatcaaagttgaacacgaaaacccagggtttgcctttttttgggacggagggagtatctgtttatctgataataaagcaacgtgtgcagtacaaaagaagcatatgggcaagttccagtagattcgcttactgcacaagtatctgtcgttctcaggttgaaactgaaactctgatgtaagagtcatacaaacaacagtaaccgatgttatttctgcaccgagatatctcctcctcttcttctttagttctgattaatttcttcttgtactaaaacagctgctaggcaaagtcagtgtcaaattgtcaattgtcaagaacctgcacatattgtcaagcagattttaaccagagattccatgtggtccatattgtcatggatcgataagcgcaatatccaaatctctccgcaccactctttttagtttatcagtgggcagcaaacggcaacaacagcagatagtgctgaatcgatcgatgatagatagcctgatagacaggctaatgattctggggctgggagtggagcagagcagagttgggagacacaatccgagcaaaaacgagtgacgatccgtcctacatctacattcggatgcacgcgcgcgatactattatgcgaacagaccagaagattaaaagtggtctttgtcatcacgaagggcacacacatctggtccatggattgtgggagagaacgttctagctaggcccagcacgcatcattgattagtgcagattaatcatattgtctcgcattgttcaatgcactgtgtgtttttcctgtatctagcataaaaacacgatgacttttgccatcgttgatagtataaaatatctttgggcaatttgacatcaagagcactgtggacgagtctgatgtacgctgtagcctgtacgcatggcattttggtcctcaacttttggcctcggaacgtcagggcagtacctttgggttagcttaatccaaccctagctagctagctactctatccgtccttaaaaaggaaagataatttagatagagattttacatcctccagacaacgaatctatatgtaagattgttcagattcgttagtataggtgatgtcaaattctcacttatatccaaatttattattttagatggtgtcaaattgctatataaatttgtattatttttttttgggaatgaaaggaaggagtagtacagattgacagattctaggccgttttttctcagcattttctgacgatggaccatcgatcggtctcaccgttcgcctgtgcggtgtgtttgtccgagtgcgtgtcgcggtcgcggggatcggcgccggatgctgcgcgcccgacccatcaatggggtcggacccccacctcgcgtcttcagtgcagtggcgagagaagggaaggcgagggaccatgatggcggccgctgccggagtctggccgggtgcgaggtgtggtcaccggggcgaatgccgtaatgggctaagcctggacagtacgtgtccttgtcgatcaatgtgtcgccgtcgcacggggggctaagcgagcgtgttggtgccgcgtgtcgaggtagattttgcatgtgttggggattcatcgatccaacggccctcgcgcgcgcagttcatgcatagggccggcttttcttttttccttcttcagatgatggctgaaccagttgttcatgcataggtttgatttgtgtgatgcgagtatgcaacgtgaaggattatattgcgcacatctacactcactaaagactaaatcacctggtttcacaaacaaagtcatataacttaacttaagctcaccaaatagatgatgatggcagaacacacgcaattagagaaatgagaaaagaacatgtaagattaatgtaaagtactcggagataagactaaagacttggcagatgggcctaattttcaaattaatacaactcatatcagtaatacagggaagaaataaattcactttgaggacagcgtgagtcgcacatgtcagcagccaactttcttccttctttctctccctttcctctctcttcctcatctctttcctcaccctcctccttcgttatctctaaaacacacatcgacagtcgacctcctattcgagcttttctctgacccctgtggggtcgccatcttctccgatatgcttcgtcgcccccgcatttctatgtcttttttggttcttgatatgtgcgatttcgttgattcttgcccactactgttggttgctgcagcggtggcaacgagcggcagtcaaacaccatgcattcccgacctccttcgcatcccttcgatccctcgtcgaacactgacatagggaggaagagagagggccattaaatagatccagttgctcagaggacaccgccgctaaggctgcaaccatcgtcgaccccatcaagcttgctagcgatctccctcaccgtgctcaccgttgacctcttgtacatgcctcctcaaggaatcccaccgctcgccttttgccacaacccaccttctttgtgtcaaccaccgtccatctctacaccacccgccttccaacaacctagcctggtaagagatagggaagagggggagagaggaggaaggagtggcagctgacatatgtaaggtccatgctgactcagctaggttgattgtaatcaactggtcacattggccaaaaccgggcactatactgctctaaggtctctgatacaccagttttataagctgagggacatgttatatctggtattgcggtttgagaatgtaattcgaacttgacgtcaagatgaaggatcttaagtgaacttattcctacagggaatcacccagcccaaaaaattgggccatctggcccacggaggtaacctgcttcccaatttcccaaatctccgcgtcgcctccacgcgaggggctcgcgcgcgcgccttccccatttccccttcccgccacgccgagttaccgccattgggactccgactccgacttggagtcgacatgggagctccttgccctacatagcggcgtgggcctctcgatccccgcatccattccacctccgcctccgcctccgcctccgcctccgcctccgcttcttcttctcctcctccgacgtagcctgcggcctcgtgctgatggcgacggtgtcctcctcctcctcctacgcgtcctgctccgcctccgccgacgacgctttctactcgacgtgcttctgcggcccgatggtggtggcgcctccgcctccgcctccgccgcgcaccgccgcgtcgccggagtacaccccgtctaccccgtggcgccgggccgcgtcgccggattacaccccgtcgactccgtggcgcagggccgcgtcgccggaccacgccccgtccccgccgtggagcccttcgcgccgcgccgcttcgcctgactactcgccgtcgactcctccgcgtcgcgccgcttcgccggactactcgccatcgacgcctccgcgccgcgccgcgtcgccggattacaccccgtcgactccgtggcgccgggccgcgtcgccggactacgccccgtccacgccgtggagccctccgcgtcgcgcctcgtcgcggactactcgccatcgacgcctccgcgctgcgccgcgtcgccggactacaccccatcgacgcctcctcgccgggccgcgtcgccagactactcgccgtcttcgccccctcgccgagctgcctcaccggagtacaccccgttgagccctccgcgccgggccgcatcgccggactacaaccccagcacgccgcccccgtcgcctgtgccgtccgatgcggggtctcgcacttctccgccgtggcgccgccaccatccgtacctgaggagcggctccagcgccgcctgctcgtcgcgcgcggcgcgggtcgccggcggccggcatcaccatgtcttcctgtacggatactaggcgtcctgtaatagggcagattcatagtttgggttcttgatgtgagtgtgactaatgtatggcacaaaattatcttgtgcttcatctagtctttgataaatcgatctttgtattatatcattgatgtaaattgatccaattcaataaatatctgataatttgttgattttcctatcaattaatctgtgtctgtgattgatgattctttgtttgatcctctgatatataaactgaaatttctgttcgtctttgatgttgatctcaaattgtacaacatgtctgtgactagtgtaattgatatgtcccttgaaagaacttcttctttaagttgtgctgcctgtagtattgaatcatcgatcagttccagagtagaatatcaggctagtttcagataatagaatttcagactagtttaagataatagaatgtcctgactactgtaattgatatattatttgaaagaacttctgtagttgctgtgcctgtattcttgtagtgcagtttcagagtagaatctcaggctagtttcagataatagaatttcagactagtttcagagatcagaatttcagactagtttctgtctttcagaggatatattcagactagttttagagaagataacataatttcagactttgctacagacccactgttctttgtgacataaaaaacaacagcctgacaatctgaatatctgacagagtacattgtttccataaagggcgaatttagagctaacctccatatattggcagtaaaactgaactgaaatccttctcaaacagaattacggcaagtctgcaacttaatcccttccatccaaatgaacccttggagagttcagcaatgaatcgttgaacttcacagttaagaacaagtagcacctaacagcatggaaatcccttcttacgcctaataccctcgccaatcgactccttcatcgacagcatgatttccaagttccaaccttcaaacgaaaagcagtttgataatctgtctgttgctcaagctgtatattgagcattcccatccgttcgacaacacgaaagctctgacattgctcagattgcttcctccatgcgaacaagacaatggtcatagtcatagattcagcttcgttttcttcagaaatagaaattcaggttcagcttcatatttcaggggcccttgactacatgaggcccaacacaaatggtagcctggtaggaatggtcaagatgacaacagggaatcccagatgtccaccccaaaaccaaaacattcactctctccgttcaggttcgtaccagaatgcagtaatttaggatgggtatatccaggttcctaccagaatgtaactatcaaaggatttattaagaaatttcataggattgaaatcctataggaaaatatcctatttgggcctttgattcaaatgattggagttttcgaaatcctatataatttctatggaatgactcattgcatgtaggttttggagaaaatttaacaagaggtccaacctcttggaaaaattcttttgagtctttttctttcatccgattcttgcgtttttcctgtggcccaattaaacgatcattcatgtgttttacaatcctctattttacacttcacatttctgctcgaatattgtgtttttctattcatctattttttttcattcctacgatttaaaagggccctgaatagaggacaataccctaacttccatccatgtattgattgagtttggtcttaaattttataaatcgtcatgaaagtttgtaatttttctttaaatgtaagaggtcacgaaactggagtacgggggtcattgtcttttgccttgggccaaatttgctacaggacactcaaagtgagacacccaaaaaatatgtatttgcttgtggacactgcaaaaatatggtaattagttgctgaacacccacctcattattttattattttcggtggtaatggagaaagaaacattggttaaagacaagtttgcccatggcccacttgtcaatctctctttctctatttctatgttcatcttcttcggttcttcctcctgcgtgcgtgctgctggcctgctaccttcgcaggccaccgcgtcccggtggatgtgctgccccccgacgggaagctcctcgcctcgtttcgcacgtcgcttgggtcgttcctcgccgcccaccgctcgccgctgccgcgggaggaatgtggccggcgtgatgagggacctcacgggcctcctcgggcaccattacctgacctgcaccgtggtcgggaacagtggcgtgctcctcggctccggccgtggcccgttgacgcgcacaacctcgtcattcacctcgacaacgcacgcgtggcggagcagcacccgcgggagaagaaaagagaggagaagaaagacacgcggcatgtggccgctcaagctagtgagctttgttccctcccgaccgctcgactcgatggctgcttcctgcgaccccatatcggctccactcgtcgcgccgcatgacgagagtggagcctcccttcacaaagccggcgacgaagcaaagatggtgacgcggtgcgcggcttcctcgatgatgccgatgacgtgctgttcgggcagctcgccgcagagcacgcaacgaggaggcggcgtgcttggacgcgacgacgtgggcgggccacggtgaggtgatgaggtcgacaaggcgggcggcgtgggagcgcgacgcgaagaagtcgagcccgccaccgccgccgcgcaccgcgccgacgcggagggcgtcgccggcggcgccgccccgtcgtggccgagccgtcccggctcgggccggccgccgtcgctctctgctccacgaagaagaagaagaagaagaagaaggggaaaagaaaagaagtgagaggaagaacactgtataggggtatttttgtaattacacaactctttctctctcaattttgattggaaataataaaataatgggaggagggtccagcagctaattaccactttttttacattgtccacgagcaaatacacgatcttcggatgtctcacagcaaagaccgtaatatttcgatgtactgtagcaaattttgccaatgccttgggcctctgcaactggatccagtcactgggacgctaccacttggtcctaccgccgtggcgctgccggtcgggatctgcatcgcttgcatccgtcgggacatcctcatcaagctccagcccccaccaagcttgatcccgagaggcaacaccgttgtttcatttactagccgtctctcggaccaaccgcgccgcctcgagcttgaactcctcgttgctcagagctcgcgcattcaccagtagcggctgccgcatgggggaggacggagaatgacaaaaacaaaggtaggtgagaggcagaggagagataggaaaaggagaagaagatgctcacaagtcacaagtgcagcccactgatttttattatttttgactgactggattgctcgtatgatccaaaccgctttggattgactagggattttctttgtccggtttaaaaaattcggggtataaattgtttgatttttttagttaaggataaaataattttagaggtaattcagatctcttcttaataaaataatatttttaaagatatatctcagagaccgtgtcatcgtcaaaaacattagaattatagaatcggagggagtatgtagtatcaaattctatacgaggtttttgaaaatgcatctaggcccctaatgattttgatgattgattacaatgcgattagagaggactaacatttttattcaagcaaatgtgaaggttgttaaatcctcaacgtgttgtaatacaatgcatatcctgtgaatgcgacatcacgatgcaatgcggcaatgatcaaatgttatattgtatctttttcctcgcattgtgtcgcaggaaagtcgtactattaagggggatgatgcatagacatataaggagtgatgtgtgtgctcaaaatcaatttctcttttggagcgttctggaaattttcggaagttccgaaaagaatttggaagttccgaaaatacacaggaccgtttgagagctctctggaaattttcggaagtttcgaaaatgattttcggaagttccgaaaatacacagaagcgttttagaaattttcggaagttccgaaaagtgcgttgactttgattatttctcagatctagaattttcggaagttccgaaaattgtttcggaagttccgaaaattacttttattacactccaacgggcagatttgtgctgtgggtataaatacccacctcccctcactttgtgagggctgctggtttcattctaattatttgtgcccttggcttgctctctctctagttcatttgagccttacttcctcgattcatctctccacccgtgtttgattccgatttagtgtgtgtgtgagagtgtggattcgagtttatgtgggtgcttcttgtggtctttgtgaagatttgtgagcacttgcataatctccgggagttctttgcatcatcttttactcttgaaggttgaggactcctagacggctaggtgtcactcccgagtcaccgatctacttgtggttggccgggagaagtttgtgaaggccggatctcgcctccgcaagggaagagatacctcttagtggaaggagtgcttagtgcaacctcttgaggaaagggttagctaagacccggctcttagtgagctcctcaacggagagtagaatcccccaaggatttgaactccgggaacaagtttgcaagcttcaccttggtgatatcttttcatccctctcctctaattttgcttgcttgtgccgctattggtctagttgttgtatgtgcctttcttttcatgtggtagtcttctagatctagatacttctgtttgtgtgcgctcctctgtgcattttcggaagtttcgaaaatcctttcggaagttccgaaaattcccacccaagttccaaaaattactgcttccgcttttcttaagtttttaaattggcctattcaccccccctctagacctaattgaccttttcagtttttacattttgatactatagggagcagtttccttcaactagttgtactactacttattttgagatgtagagaggactatgggtgtgtatagttctttttgtgtaaagtttttgaagtatacataaacacatttgaagtattaaacgtaaactaataacaaaataaattatagattccacctgtaaactgcgagacgaatttattaagcctaattaatccatcattagcaaatgtttactgtagcatcacattgtcaaaaacatgacgtaattatgctcaaaagattcgtatcgtaatttacatggaaactgtacaattgttttttttcacatttaatgttccatacatgtatcaaacatttgatgtaacgttttttaccaaaatttttggatctaaacaaagcctatattaacttattttgggctgaattttttacaatttgaccctttgcaaaaactatttttacaaataaattgttgccaaaacttatttaaatcacctgacgctgaacttagacaactcagcgccatatcaactgacgctgaatgcaatggcaccgcggatgggagactaagtcagcgtgccaacgcatattcagcgccacgctttggcgctgaggtgtctaagttcagtgcctgaacaaaagggttatttttgaaataagctttagcggcggttcatttgtgaaaatagtttttgcaaagattcaaattgtgaaaatttttgtattttgggagtatagactagtagtggacgtttataaacaaaatcctccgctaaatcaccctcaaaacctagatccctgtcttgtcacggacaacccccccgccgcagagcccacctcctccctcccctctctctctctctctcctaccctaccaccatggcgtccgccgagacccccaaccccgacgccgaaatccccaacaccgacgccgccgccgccgccgacccagctgccgccgccccagctgccgccgccaccgaccccgccgccgctggatcgccgtcgcccccgctcccgccacgcaaacgccgcctctcccctacgccctcccccacccgccgctcctcccgctcccgctcccgctccccgcgccgcggccgcagccgcagccgctcccggagcaggagccgcgggcggagcgccagcccgcggtaccccgatgggaagcggaggcggcacaacgacctcaacgtcgaggtgtgccgcgacttcctccgcgacaggtgcgcccgcgccgacatcgagtgcaagtacgcgcacccgcaccccaccgtcgccgtcgacaggtaccgcccccccaccgttcccggagatctcgcctcccgctcccccccccttcctgcggcgcccgtgtctgattttggggggttttgtatgtgcagggacagcaaggtgacggcgtgcgcggactcgctgcggaacaactgcttccggggaaggacctgccgctactaccacccgccccctcatatccaggagtatgcgatgatgccccgttgctgtttgttccgtttgcattgcgtgcttttgtcgacgagggttggtagcgtgtatggtcttatgttctagagatgcacaagctgctgcaagtccatttattgatgcaagtcgattaatactcgattagtgcttccaagcatacagtcttccgtttctagttcaattcctgaaatattaacagcatcatggctacatgagatcatgctctactgtgctatctggaggattaaattagctgcctgacattgtttttttacttgtgcttctgatggaaatttcttggaacaatgttttatgagccactttctgtattaaaattccattatcgtgtttttatgttctcacagtttttatatttcatgggcatgtgtacccatgattccctcggtgtgttgtataggtgttctcacacattttatgtgttcagagtttggctgtttgggagaaaaacttgttttttctactttattctctctgggtaaattgatattattttgtttttttgaacattatgtttactctcacattcaggggcgaagccaagatttgagattaggggggggtgtgggggtgaggataagccatgagaccaaataactaatattgatagcaaaggaggtcaaatagtcaccgtcaataacaatcaatgcgtaaactagtcctttaaaaaaaaacttgaattttagatctttaataatatcattgaaagattgaaactagcctttattgctaaattctttcaatgtaaactattgaataatctcacaaataagtatcatctattttactttgaaaaagatgagaaatcacaaactaattttgtatatcatgtttcttgctaatgtttttggacttgctaactaactaaactgataatactttcaagttacacaaataaactagatgaatacttatcttaattaaccttaatatagagtaaaaacaggggggttgtggtggtggtggtctttggatagcggggtgttggcaccctccagcacccccctagctgcgccactgctcacattacgtagctctttatttgacacacacacacacgtgtatgtgctgggtgctatatgggagaagctttagatttctaggttaaaggagacactggagtggaatgatgcagaatgctgaaatgggaatgcactgtattttatgctagtttgcgattgaaaagaaaacttatatttgaatgttgatggcttgttttgtgacctatgattatctctttggaggcagggtagcatatttttgtaaatgaaatgcaggcattggatgcaaccagctgatcccaactttcttttgtttcttttacgtaggtcattattgagatcaattggtgtggaagacccaaaggtgaagatggtaagtttctcctgtttaacctttcatctgttcatcaatcatgcatcggtttgtcatttctctaagtagttaatggttttttactatctattgtaaagctaattggaaaggttgtttatctgcttcaaacaagaaaaaaaaggtagctaattggctgatgtcgcatggtatgtccataaggaacaagtaatcttttttgaaagctagaacacatagaagggctgtaaaccatctatcacctg

SEQ ID NO: 23394 - DNA, 19059 bp, Oryza sativa
cttgattggtccaatggttttctattctcataaatgagtcctgatagatccgaggagttcttgagctatcaggctggatgaaatcaaactagggtttacttactagagaggaaacaagaagggatatggtaggggatctcaccagatatagggccttcgcggcgaagtgcagcggcagaggttcgtagacgtcgccggctcgccggaggggaagcacaagcgcccccctttctcactgtcacagtggcacagtcccacttctccgagggtaaagaggaggacaatttgggccgaaaccgtaccgggctcaattctatggcccaactgataattgcaccctaaatttttattttcattttgttggaatacaggattagagatgagtgtgaccttgaccccgggtacacttccacagtgaactactccctccattccaaatttttttacatatagtttttttagtttattcctaaatgatctatatatttgtgttcatttattaggtctattcgttatttgtgcattggagaggagtaaatgaacattgatgcatgcatccatgcacacatgtatttataacccacatgcaatattttgatttgctattggctaggaaatagtggggatggtgcatgcattgagtttgttgctagagtaaatatagtatgagagagttattagcttttcttgatcttggtgtacctatgaaatatgtaaatcaatttggaatggagggagtaacgctttacaaaatacagcacaacatgctgattagtctctccctcactctctctctctctctctctctctctgaaagatcacaaacatactgatcacttagctttcttcattatgtctatatgtatgagtttcaattgaaggatggttgaatcgaaaataacacaaaactaaataattcatgctttgtgcggttgtgcctagcaaaaataagcgcacgcccatgaaagagattccaaacaggagctgatcatcagaaagcaacagcacgcgttacttgctgagatcatgatgaatgatgatccagaactagttgacagaaatgtgcagcatgcaggagtacgaatcaaagaaccgataccatagggcatacactgaacagcatcatcgagaaacgagacagaagcacacgctcgcccttacaggataacagtacatgaattcgtctgaaactagaacattctgaaaagaaatggcaagttcatttagaaagcggaaaacggtaatgctactcagaatcggacccaaattgagttcctacgttcttaatggttattgtattcatcaaatggcttccagcaatgtctagcaaagtattgaccagttggcaaacatcatccgtatcctcgtacaagatttcagtacgcttcaactttcgacatcgaatcttcaacaggtccttagacttgctcgacttggtctttcttttccctatatcggaacttttggaggccttcgcagcgcacaatgatttgtataagctatcaaactcaatcaagtgagaataaaaataaatgaaggcaaatttaccttgcagcaccgcatagtgagcttctccaaattaggagacttcttaagaaggtgccacaatatcccgaaattgtcacctagatcacacttttccagcaacaaggttcttaggtttttgaatgtagggaattcaaatggtccctcatttggcatcacctaaaagatagaaaaatagaactcaataaacaagtacttgaaaccaacctgtttcattgtaaaatgaaagagaggaaacttataattttggttttaactgtatggcccaacaaagttactagcatagactttagagtgcagagtaatttcgttattagtgttgctctttttttgagcgaacatcgtgagtttgtaactcagctcgccttgctcacaagtgttacagaacaaaataacaagaacaaatgacttatttggaatatcacagcaaaaataaaactttgagatatcacagcacaaagaaaacttaattaccatctcaaagttttgtaaccataatcacgatgcacattctctaagaccaaaaagactaatcaggaccagggccagtgctccttgctggctttcatcggacaatagaaaaaactaacatacggtaagaaacacacactatagataacaatataattatccgatcttaacaagtacagctttatttagtactggatcagttgtaagaaaggtaaaatcaagcatcaagctagacatgcatcgaaatacaagctataagtaataatcaccacaaaagatcagatgtggatctttggtctaagataataagagttgcaagataaatacatatatcattatccaggatagaaaggcataccatcatattgaagcccaccagcacaagatttgtgacattaagtagattgctaagaagcgtgcattgcttgctgcggttatttttgtgagaactgtaattgttgagatgtattgatgctttcacgaggtaccgcatttggtctgaaatctggaagtttgcaaagctgagttctaggagcagagaagcaagattaggagcttctatagtcagcggaccaagagggcttggacttcccgccggtgatagaattggttcttagggtgaaccttaccaaaatttggcaatgcctaaaatttagataaattggtaacattgttaaaattttgataggattgataccaaaattctatacacactaccaatatttgaacaggcccatagatttttgttagaatgtggggttttttttgttcatgcctgattgatgatttgcagggttggcttattctgcatccatggcgaccgcgaggaagaggagctgtccagacaccatctccaccggcgaccgaccggctgagcgcgctgccggacgccctcctccacaccatcctctcctcactcaagggccgacagatggttcagacgagcgtgctctccaagaggtggaggcatctttggcgctccgtgccatgcctcgacatcgaccagagagagttcgcggccgccagtgagaattgggcaatctcccgaagtgaccttgaaaagtttgaggattttgcagataatgtgctggcctatcgctgtggatcgcccgcgaaattggacacattccgacttcgcatatgtgacagatatcattctctccgttcttcagatactgatagatggattcggcgcggcctcaagtgctccccgagagagtttcacttgcattttgattacagatatgactcctatttgcttgagatgcataagttgggttccaattatggctgcctcaccaagttgcaccttactaatgtttcattgcatgaatgcttcatggagcacatcactactgtttgcacccttctggaagttctagagctcaacagatgtagtctctatctccaagaaattacacatcccaagctgaagaatttggttctgcatgggcctgcagtgtatgatgaagacgaacttccagttggtgcaaatgcaaaatgttataaggagctaattatcagggctccttgtcttacttatctgaatttagtgcttccagttgacatgcgtcaaatttctttaaaggatgccgtctcttgtcagagcatcaatccgtttcagtgttgtctttccgtgcaaatgcaactttcttaacgtgttgtttaatgtgacaagtctagaattgtcgggtttccgtgaaatggtgagtcctctgtttctaatacatgtctcctgtaagcacttatgttagttgagcatctaaatgttttctcgctaactttccactcaatagatcatgtggcaaaaggatatggggtgttgagaaattctgagctgaaatagatgcacaaatgtctcaattgatctttagctagatgcctaccttgcttaatctttgtatcctatgggctatgtgcttttcatttcttgtaagcaatgcaactgcattcatcagaggctacaggctaacgagtatgtttgaatgctgctcccttcttcaccccttgtataaaaaaacatcgctcctagttccttcagttttttcttaggaggaattttagtaagcaatgctaatgctaaaattattgtgctctctttatttatgcttgctactaagttaatgcaactgcaacgaaacatgtatgcttctctttttctaaaaatttattggcaaccaactgttgcttagtttattaactgtaatattatcctaatttcaggtgcggctggagttcaatcaagtcgaattccatgcattcaaaaacctgaggaccttgttgctggatagatgccgtccgagttacaacaatgagttattgcgtcaccttctccagaactctcctaatcttgagaagctcactgtgcattgctgcaaggtatttctttgtatagtccttcagttcacagtaactcttgctgaattgtgtttgctgattaactcatatgaaaccttttgtctagcagttctcaaaaggttccctggagtggaggaaatcatcccagcataagaaccaggtgaactgtaggaagctgaagtctactgaaatcatatacaaggacattgatgatgttcgtgagcttgtcgatcttttgctggacgtctcagggcacctaccgaagaacactatagcgctcaccaaaatatgaaggaattatcagcctgaagccctgaacctgactagtcctcccactatctggtttccatcgataccttctatttgcagatgtactgtttattgcaaatctaatgctaaggtcctattcctgaatctaatctagatggtggtaggactcctaagcctcctgcatgtcttgtttgtgcatcgtggtgaactgtttagtagcgtttaattgcaggctcaaggagaccaacaaaagccatggaaggttttgaggtattatatattcatgggttgtaaaagctactactgactataacaaaataagtttgtaatgcctaagcaatttagccattatcatgagtgctgccagactttggtatagcctgtcaatttgacagtattcttaccaaaccttctgggaaaaaaaagaaaaaaaaagcatgaattgcaaaggtgctccaaaattctggtagcatatttctctcctatctacaggatatggtatgccaggtccatcaaagcccatggatatgtcttgttgagttgtgacttggtgcttttgccctccgagccgctgctccatgaaattcgattcaattgttagcaaaacgtagctctttcgaatgaaatttttggcaagtgaaatgccttgatttcactcaacgcgaagcttcggttcggagcatggccacatgtcctgaggccattcatagtttgtcctgcgattttaccgaatttcgcatgccagctagacgaagaaccacattagccacatacttcacaatgtaagttatataaagtgggtctgtcggtgatatagacccgggggtgccaagcttagaggggagaggccacccccagcgtccacgtggcgctccctcccgagggggtcgggcccgtggatgagtggcagccatccctttcgagcccccgacccctcctcgtggccaccatgggtatggggttaggtgggcgccccccagcgtccacctaaccgcatttaatgtgggcggagcaggcatagcacgccacatttaatagcagtttgcgatcggtctgtgaccggccgaatgacagacgggacggcgacaatctactcacgccctgaccatgtgttaggcagcgtgaggcaggtatgccccatcccatcatgatgatccaatccggagtcggcttgaccgctccggacgtgcccgagattgtgttcctggagcatgcccccaaaagtcctcatccattaaatagtgaatgacaagggcgccccccgtgtcagccgacatgatttgatgggccccacgcagcagccgacgtgcgaatagcttccgggttaaggcacaagacatgcatttaatatagagaatattttttctcttccctaggtagctttcgcagcacatgtggtaacctcttggagtataaaaggaggtcaatgcctagcgaggagggggatccatgggtcgaaggttggggctaactctagcttgtacaccggagattcagagactttgaaagctcggaaaaatcatcatacacaggaatagggtattacgcttcttgacggctcgaacctgtataacccccttttgtttcatcttcaccgaggggcccgaccccctctagaacacactacacttccttccatccaactcctcagttttcacccgatgccccccgccgaactatcagaggggggcctcacagtcccccactcgaggagttcactctccggcaaggtcccactagtatcatctttttcacttttttttatctctctttctctctcccctactttccccatcgcatctcctcctttccccatcgcacagaagctgccgtgggcgagggcggcattgggcggcaccaaaactggggcgacgatggcggcggcgggcggccagatccacccctcctttcctcccccgaagcagcggcggcgtcggcttcgcgggagcggcggatgggcggccagatccaccctcctcggtcgaggccgcccctctcctctcgttgcccggcggccaccgtcgagcggctgctgcacgggtggttgacaacggcgagcggcagcttgtatcggtttaaatttgtccgtaacgaccgtcaacaggcgtcttcattgatacggtttaaattattcttggtcttggtgaccaaatattataagataaccaaattgggatgaaggaaatatttttataatatatttgttttatgttgaaaatattactatgtttttctataaatttgatcaaacttaaaagagtttgaataggagaaaattcaaagtgagttataatatgaaatgaagatagaagtactttacgatatgcttttcctactatacatcatggctgtgttattttggagagattggaaaccctttccctccgtacgtaaaacagagcgatgaattaatgcatgattaatcaaatattagcttaaaattattgaaaaataaattaatattgacggagcgtggggctcctcaccgggagaccgcgcaggcccccctttgccggttcggccgggggccctgggtgagattctaagctcctagtctgtgtgtggaaggttcgcgagaatggaaacacacaagacacgggcgatgtatacaggttcgggccgctgagaagcgtaataccctactcctgtgttctggtggatctgtgtatgaagaagctacaaaagagctggagaaccagagagctcttactctctccctctctgatcgttctggatccgaaaaaatcccctttctaagtgggcaaggtcctccttttatacctcaaggggataccacatgcaccatctctctcttttttttgtggggacttatcctatcttttcataaacaaacggagacttgtatggttgccgtccgaatgaccttctgatgggacggcccatacctacctccacttccgccggaagcaggcgcgacgtgggaacatggctgtctgctgacgacatgaccagtgtcagaccggtcacaaatcggtcattcttgtccaccacgcgtcagtttatcaatctgcatgttcgcccctcttcatacaacgtcatgcttgtaatggttaggatgaagcctggtatatatctgaccgggaccaacgtgccatctccaggagctaacacgctggctccggctagggacgagtgcttggaggctctcatcctgacgggatggggcgaggcgtgcgtcagaccgcctgtcgccacctaacccacgatctgatcggtctgtgactggtcacagaccggataaacgagtgcgctgcactgcgttacatgcggcgtgacgcgctcgtccaaaccgcaataaatgtggttaggtgagccccgctatgctcacctaccccatatacgcggcgcaaaacccacaaggggtcggggcgcctcggccctcggggccgagacgggagcggtctgacccctcggggagacaaagagaagggcggccgtatcaccctcgggcccgaccccccccccccccgagggggttaggccacgtgggtgatcgtgtctgtctcaagtctctaagtcatgatactcccggtcccatgtcaccgacagtagcccccggcgttacgccagggcgatcgccctcctcgagggaagcggtcgggcgtgacgccacttcctaaggcctggtgacaggtggggccggtctaaaaatcgggacaagccggttcgtttttcctggagatatggtgatggcgcttcggtcggcgagcgtaattaacgcgcgcacgagatgttccatctcgactgccacagccgcttatccacctcatgcaccgcaaacgggcgaatgggattagtggaagcgtgggcgcgagaaacgagggggcaagatagtgggcgcgagaaacgaggagccgggcacagcgttggcaagggtataaagtcgtcgaggaagagatttgcttccttcctctcgccattattccccttgtcttcgccgcttgcgccctaactccttgtttcctgtgccctaccttcgccacacgcgctcgctctcaaacatctcttcttctggcatcatggcacggggctccgctccgcttgacggtagcgtgctgccgccttcccgcatcgtgagcgagagacaggccgggctgccgcgccgcttcatgccggaatctgccatcggccgggagatagtctcgctgggcgagggatgcccggcgccacgctacccggggcggtccgtcttcttcctccctttttctatggcagggctggttccgccattttcttctttcttcatggatgttctggagttttacgatctccagatggcgcacctcacccccaacgcggtaatgacattggccatcttcacgcacctgtgcgagatgttcatcggggtgcgcccatcccttcggctgttccggtggttcttcaccgtacagccggtgtcgccgccgtcggtggttggtggttgctacttctagccgcgggggccggtgctgaaccgctacattccctgcgtcctccgcaagaagtgggatgactggaagagcgactggttctacacccccctcgccgacgaagcgcgcctccgacttcggagccagcctccagcgcaggcctccagctggtgggcgccggtagatctgggagatggctatgacgccgtcctcgaccgcttggcgggcctgcgattccaggggctcacaggggccatggtgtacggcgactatcttcatcgccggatcgcgccactccagcggcgcgcccggggcgcctgggagtacaccgggtccgaagacttcatgaggacccaccagggggtcagatgggactgggctcctgaggacttcaagatagtggtccaacgggtgctgaatctcagctccgtggaggcatcccttattcctcaaggagtcctccccctctgcagcgatccagaccgcgcctccatcctgaccatcatgcaggcggtcggggcatcggaggagcgggctcctcgaggccacgatggcgcgggcgggagccacaggggggaacaatctaccccgggagggggtcgtgcttctgggccccgcgacgggggcccggggagcggccgccctgccgacgcccgggggaagaggaagcaggaaggaacccctcccccatctcctccccgagggggcggggcggcgcgtgccagcagcaggcgctcggagggggccacaccgacgtcgcagcccgagggggagcggaagaagaaacggctccgcaagatgggggggacagaaccatcccggggaaaccttatttcccctccaaggtggtcgtttaaccgaccccctcgcaggttcgtcccacgcccatcgtggccgtattcattccctcaacgcgagttttcactcatccatcttgtttgtcttctggtcttttttctgtttcagcgagatcccgtcgcgtccctcccgccattccaagtccggccagtctgaggccgaggacccggcgaccacagaggcccggaggcgggaatctgaccggcgagaagccgcggatcgccttcgggaagccgaggaggccgctcgggaggccgcccgggctcgccagaccgaggaagccgctcgggaggaggccggactccgccaggccgaggcgacgacatcctccgaggcgacccgtgaaactgaccggcaagaggccgcggatcgccttcgagaagccgaggaagctgcccaggtggccgtccgagctcgccaagctgaagaagccgctcgggaggaggccagacttcgccaggccgaggcgacgacgacttccgaggcaactcgcgacgaggccgcgggcgcatcgcttgggcccactcccacgtgcgacgctcaggacaaaccaggtccgggggacatccccgagtctggcacgtccatcagcgggccaagccgcgcggcatcctcttcgaggcggctcttccccacgcctttcgttgctccactgagcgcagaaccccttctgcaggccttggccgtcgcaaacaccacggtgttggacgggttaagtgcccaggtggaggccctgcaagcagagcgggcggagctcgacgccgcatgggcgcgtgtcgaagaggggcgacgctcggtggaggccatggtggaggtgggccgcaaggcacaccgccggcacgtctcagagctcgaagcccgtcggaaggtgctgggggagatcgccaaggaggtggaggaggagcggggggctgccctcatcgccaccaccgtgatgaacgaggcgcaagacaccctccgccttcaatacgggagctgggaggcagagctagggaagaagctcgacgccgcccggggggtccttgacgctgccgctgcccgagaacggcgggcggcggagaccgaggtggcatcccggcggcgcgaagaagcccttgaggcccgtgccatggcgctggaagagcgtgcctgcgccgtggagagggacctggcggatcgcgaggccgccgttgccatccgggaggcaacgctgactgcgcatgaggccgcctgcgccgaagaggagtccgcgctccgcctccgcgaggacgcgctcaccgagcgggagcgagctctcgaggaggccgaggccgcggcgcaacggctggcggacagcctgtccctccgcgaggcagcgcgggaggagcaggcgtgccgtaatctggaaggtgcccgcgccgagagggccgcgctgaatcagcgggccgctgagctcgaggcgcgggagagggagctggacgcgagggcgcgcagcggcggggcggccgcgggcgaaagcgacttaaccgcccgcctcgcagctgccgaacacaccatcgccgatctgcagggcgcgctagactcgtccgccggggaggtcgaggccctccgcttggcaggcgaggtagggcccggcatgtttcgggacgccgtctcccgtctagaccgcgccggccggcaggcgggcctctggggcaggcggactgcgaagtacgccgccaaccaggggggcctcgcccagcgcctctcggagatagccgggactctccaacggctccccgaggagctcgagaggacgattaagtcatcctcgagggacctcgcctgaggagcggtggagctcgtactggcgagttaccaagccagggatcccgacttctccccatggacggcgctggacgagttccctcccgggaccgaggacggcgcgcgcgcgcaggtccgggacgccgccgaccatatcgtccacagcttcgagggttcggcccctcggctcgcgttcgccctcaactccgacgaggaggacgaagacggcggagtgggcgacagtggcgacgaggctggcgacccgggtgcatcggagtgagcccccaggcccccgccaacctttaaatagtttcttcttttcttcttccgaggccttcgggcccccttcttgtatagactaatttaatctgcaatcaaataaagaggaaattttttgtgtcaattctatttgttgtgtgtatgagacgaggatgtctgtgccgcggtccttttgtgtcttggcttgaacaagggctcgtgcccaggtcctagtcctcaaatggctcgggtcggggctagtgcctggggagatccacatgtcgagactggccaggccgggagcgtggtgaccgagggttatgggtgacccgattgtgggtttttgccgattcccccccggagttcactacgccccggggcacggctcggttctgggccccgtttggcgattttagccgacccgagcccccgagggcaggattgaacacgagtgacctatttcaagtcaagatccttcaaaaggaaacaacagcacagatacagcctttaggaaatcgaaaatgcttttattgaaatacagatataagagaaataagaatatgcatatgtggtagcccccggccaaccctgcacgcccgaggggggtgcggggttggcccgagcccgaaacctgacacccgatccccctttaggggtagaagcgacgaaggtgttcgatgttccacgggttaggtagctctgtgccatcgcccgtggccagccgaacggagcccggccgggggacgccgatcactcgatacggaccctcccacattggtgagagcttgctcaatccagcacgcgtttggacgcggcgtaggacgaggtcgtcgacgcagagtgatcgggcccggacgtggcgctgatggtagcgccgcaggctctgctggtagagcgcggctcggagggccgcgtgccgccttcgctcttccaagtagtcgaggtcatctctgcgaagctgatcttgatcagcctcgcagtacatggtggcccgaggggacctcagggtgagctcggatgggagaaccgcttccgcgccgtagacgaggaagaaaggtgtttccccggttgctcggcttggcgtggttcggttcgcccagagcaccgctggcaactcctcgatccacgaatcgccgtgcttcttgaggatgttgaaggtcttggttttaaggcctctgaggatttccgcattagcgcgctccacttggccgttgcttctggggtgggcaggtaaggcgaagcagagcttgatgcccatgtcttcgcagtaatcgccgaaaagttcactagtgaattgggtgccgttatccgtaataatacggttaggtactccaaaccgggctgtgatgcccttaatgaatttaagtgcggagtgcttatcgatcttgacgaccggataagcctcgggccacttagtgaacttgtcgatcgcgacatacagatactcaaacccgcccggggcccgcctaaacgatcccaggatatcgagcccccagacagcaaatggccatgaaagtggtatgatctgcagggcctgggccggctgatggatttgcttggcgtggaattgacacgctctgcatcgccggaccaggtcgaccttgacgaaaggctttgccaaccaaggtgcgcgaggcggagtgggctccgcattcgccttcatggatatcggcaagaagctcgacgccttgttcccgaggaatgcacttcaggaggattccgttagccgcgcgccgatagagggtcccttctaccagcacgtagcgtttggagatgcgctggacgcgttcactcccttcgcggtcctcgggtagagtcttatctgtgaggtatgcttggatctcagcgatccaagcaatcaatctaagggagctgggagcgctcccctcgggtcccgaggcctggactccgacgggcctcgggggcctgttaggcgcgtccgtctcccctaaggggtcgggtcgcgccgacggctgggcaagcctttcttcaaagacgcccggtggggtctgggctcgcgaggaagcgagccgtgagagttcgtcggcaaccgtgttatcccgtctgggcacgtgccgaagctctatcccgtcaaaatggcgctccatacgccgtacttggcgcacgtaagcgtccatctgcgggtcagagcaccggtactccttacaaacctggttaacgaccagctgggagtcgcctaacaccaggaggcggcggatccccagtccagctgccaccctaagtcccgcaaggagtccctcgtactctgccatattattggtcgcccgaaagtcaaggcgaaccaaatatctgaggacgtctccgctcggcgaggtcaacgtgacccccgcaccggcgccctgaagagacaggaagccgtcgaactgcatcacccagtgggcggtgtgaggcagctgcgaggggcccgagctggcctcggggactgagacgggctcgggagctggggtccactctgccacaaaatcggcgagggcctggctcttgatagcgtggcgtggttcaaagtgcaaatcaaactcagaaagttcgattgcccatttcaccacccgtccagtaccctctcgattatgcaagatttggccgagggggtaagacgtaaccaccgtgacccgatgcgcctggaaataatggcgcagtttcctcgaagccatcagaatagcgtaaagcatcttctgggcctgagggtatcgggtcttggcgtcctggagggcctcactaacaaagtagacgggccgctgcacctttcggtggggccgatcctcttcgctaggggccacatccctagggcgctctttgtccaagcggcctcgcggggtgcactcgtcttctgtgccgacgacctcggggtcggaggacgacaggggcggccttcccacagtggcctcggggccgtcctgggggtcgggggctcctggcgtcgtcggacaagcgggcaaagggccaactctggtcgtcaggggccttaggccaccgttcggctcgggggcctcttctccctgctctctcccgggtcgagtcggcacagggttagcctcggggtcagagggcgataggtgcggccttcccgcagtggccctcgggccatcctgggggtcgggggcacctggcaccgtctgacaagcgggcagagggcctgctccggtcgtcgggggccttgggccaccgttcggctcgggggcctctcctccctgctctctcccgggccaagccagcacagggtgggggtgcacggaatgaggattgtcctcatcgcgctccacaaccaacgccgcactaaccacttgcggggtcgccgctaagtagagtagcaaaggttcatttggctccggggcgaccagaactgggggagagctgagatacgccttcaactgagtgagggcacgttcagcttcctccgtccaagtaaacggcccggagcgtttgaggagcttaaataagggtagcgccttctctcccagcctcgatatgaaccgacttagggcggccatgcaaccggtgacacattgcacatccctaagcttgctgggggggcgcatccgctctatagctcgtatcttctcggggttggcctcgatgcctcgggcagagaccaaaaacccgagaagcttgcccgcaggtacaccgaacacgcacttatcggggttcagttttatgcgggcggagcggagactctcaaaagtttccgctagatcagagagtaaggtctcttggttgcgcgtctttacaaccaagtcatcgacataagcctcaacattacgtcctatttggctacccaaagaaattcgagtagtacgttgaaaagtaggacctgcattctttaacccgaagggcattgtcgtataacaataagttcctatgggggtaatgaacgcagttttttcctcatcctccctagccatgtgaatctgatggtaaccagagtatgcatctagaaaacacaaaaggtcgcaccccgctgtggagtcgacaatctgatctatgcgaggcagggggtaagggtccttaggacatgccttgttatggtcggtgtagtcgatgcacatccgaagcttgccgttcgccttgggaacgaccaccgggttcgccagccactccggatggatgacctcgcggatgaatccggcctccagaagtcgcgccacctcctcacggatgaaggcttgacgttccggggcctgccgccgtactttctgccggaccggccttgcgcccgaccgcacggcgagacggtgctcaatcacctccctggggaccccgggcatatccgccggtctccatgcgaagacgtcagcgtttgcccgcaggaaagagacgagcgcgtcttcctatttgccatccagaagaccaccgattcgtgtggtcttggacgggccgtcgcccagggcaacctccttgaccgggacctcgtcgcacgtgactatccgctgcctcggggcggcggggatggaggtgccaagcctctcgtcgccaccctcgggcttggacgcagcggcgaggtggtccgcgcgctgctccatacaagcgagcgcgactttgaggtcgccatggacagagatgggaccaccgaggcccggcatcttcatctggaggtaggcgtaatggagcgccgccatgaacttcaccaacgcgggcctccctaggaccgcgttgtagggcagactgaggtccgccacatcaaagttcacccgttccgtgcggaagttggcggatccaccgaaggtgaccgggaggtcgatatgacctagcggccaagtgtgacccggcgtcacaccgataatcggctgggacagccggagcaccatccccggggccttgatagcgtcaaaggctgcgggggaaaggatgttgagggctgctcccccatcaatgaggacacgccccagcttcacgttgcaaacagtgggggaaaccaccattgcgatctgtcctccccgggcaacgcacggtgggtggtcggtctggtcgaaggtgagggcaacctccgaccaccgcgcccggcgcgtcgcctcatgagtaggggccgcggccagaagctctcgcttcatggccttgaggctccggcgagaaacgtgagcacacgctcccccatcgacagtggcaatggtggccccaggctcttggaaacctaggtcatcatcgccgtcatcgatgtcctcggcgggggccttctgcttggcctcacttcgccgattgccggaaggaaccgccggggacttgccctctcggcgctcctgcctcctctcctcctcccacttcctcgtccgctcagccaaacttttgactgcgcggcagtccgcgaggtcgtgaagggaggtgttgtggacgatgcaccacttgccagttgggcgctccctactgggagcgccggcctccttctttttgtcgctcgcaggcctcccctttcgggtggcccgcgaagcgccctcgacggcgaggacatgaccctcgtcgtcggaatgggctgacctcttcttcctcctcctgtcacgccgccctgtccgagcagcggatccgggggcggccgaagctgccacaccggaaccggaggggttccaggtccatgcctcttccttacgagccactcggtccgcgagctaaaaaagctccgcggtagtctggggctctttggaggcgatcttttcgagcatgcggttgtgccgcacaccccccctgaacgcgtagatcaccgcgtgtgcagggatgcatggtatggtgttgcggacttgacagaaccgctgaatgtatgagcgaagtgactcatcatcccttcgctggactgcatgtaagtccgcttcttcacctgggcgcggatatgtgccttgaaagttcatggtgaactgttggcacaaatcctcccaagagtggacggacgcgggtggcaagttcattagccaaccccgtgcctgtcccttcagggccatgggaaagaaattcgccatgaccctgtcgtcatccccggcggcctcgatcccggtcgtgtagacctggagaaactcggcggggttgacgctcccgtcgtatttttcggcgatggtgggccagaaccttgggggccaacggacgttccgaaggctcgccacaaaggctctacagccgacaccaccaaccgggggcacggagggttgatccccgcgtccgtgttgatgtgacactccggacgaggaggcgccctccgttgcgtgggcagcacgtcggccattacgctggtgctcgatactgatgcgggcatccggccctccacgcagatcttcctgggtcggaggcgctgacgaaggagtggcggccgaatggcgagcaacagccgccgctcgccgcgccctccgccttgacgacacggagcgggtggtagcagcgccagaggtcttggtggcggaggaccgcccaccagcacctaggcgctgctgtgccgtcatgaccaagttggccacgtcgtccagccaacgttgggctggagactccgggccagggacaatgggcgggtgacgtaggagcgcgcccgcagcttggagcgcgccctggggcgtgctgccgtcgccgtagacgaggaggcgacgctccccatctcgccgcccttccccagcacccgtggatgtcgaagtcgcggatccttcgaccctctcgagcgcctcctcccgcctaggactttggcgtggaaggggcggtggagtacgagctcgacggcgtgggttcggctccccgtcgtcaccgctaacactcggagagaggctgtgcgcctttgcttgttcagccattgggctgaacaggaaaagcttggtgcacacgaaagagtgcgagagcttagaagaacacacgcagaaccccctacctggcgcgccagatgacggagcgtggggctcctcaccgggagaccgcgcaggcccccctttgccggttcggccgggggccctgggtgagattctaagctcctagtctgtgtgtggaaggttcgcgagaatggaaacacacaagacacgggcgatgtatacaggttcgggccgctgagaagcgtaataccctactcctgtgttctggtggatctgtgtatgaagaagctacaaaagagctggagaaccagagagctctt

SEQ ID NO: 23395 - DNA, 3576 bp, Oryza sativa
tctgcatgttcgcccctcttcatacaatgtcatgcttgtaatggttaggatgaagcctggtatatatctgaccgggaccaacgtgccatctccaggagctaacacgctggctccggctagggacgagtgcttggaggctctcatcctgacgggatggggcgaggcgtgcgtcagaccgcctgtcgccacctaacccacgatctgatcggtctgtgactggtcacagaccggataaacgagtgcgctgcactgcgttacatgcggcgtgacgcgctcgtccaaaccgcaataaatgtggttaggtgagccccgctatgctcacctaccccatatacgcggcgcaaaacccacaaggggtcggggcgcctcggccctcggggccgagacgggagcggtccgacccctcggggagacaaagaaaagggcggccgtatcaccctcgggcccgacccccccccccccccgagggggttaggccacgtgggtgatcgtgtctgcctcaagtctctaagtcatgatactcccggtcccatgtgaaattttctttaaaaaaacatcatacggtaatttaggaaatgcatattaaggtggtgtttggatctagggactaatttttaagttcccatcgtatcgtatgttttgaaactaatttagagtattaaacatagattaataataaaactaattgcataaatgagagctaattagcgagacaaattttctaagcacaattaatctataattagcacatatttattatagcatcacataggctaatcatggattaattaggctcaatagatccgtctcgcgaattagtctagaattatgaaataagttttatcattaatctatatttaatacttctaatctaattaatatccaaacatccaatatgacatggacaaacagcccgattgaaaatcaatagtagacggcagccgtatataccgtctgggggtccccccattttctcccttttgtcctcccctttctccgtccggaggagccgaggagttgtcgtctgtccgtgggtctcgactccatcggtcttgcgcgctatctccgaggctccggcgacgcggctgggccttgtgcagcgacggccggctgctccgacgttagtccccggcgatcccatctctccgacggtttattttttttcctgcatctcttcaaacctctctaatgtttatttatgttcggtcgagtccaatgtactggagtaatgctttgagtttggttggaaaattcttgattcagttactgatgtagcaaaggatctcccgtttttaagtttggtgattgtgtgggttcaggtaagaaatggaagtggagaatttatagggcttttgttcgtctaatcccttatatatcccgtggagattggaggggattggggataataagccgttaccaggaaaaaaaaagagggttttttataattgaaatcctgcatcagccactatgatctgctagttgcatctccttttcaagcttaagctgattttgtgaattcgctatatatatggaaatggggattactgtggttgatgcaatatttttggcactcttgtagactgcagtggaattgctccgagagcagagctctccaggtctccatggatctggacaccacacgaaagcggccccgtgaaagtggcgtcgccgtcgatcggctcagcgcgttgccggactgcctcctccatgtcatcatgtccttcatgaaggccaggcaggtggtgcagacgtgcatgctgtccaagaggtgggagcacctctggcgcaccgtgccgtgcctcgatgtagatcatcgggagttccaaagcacaggtgaagctgcacagggcgacaatgaggtgtggcagaattttgaggattttgcggacaacctgatgcttcatcaccagattgcacacctggatacgttccagctgcatgttaataatgtgtatcgttggggtcaacatgcatctaggtggattcgtcgcagcatcaagtataacaccaaggttcctggcattcctcgcccgggattgagctgcagttcttggagcctcaaaagactacatctttctaacatttgtgtggatgatctgttcgcaaagcacattagctcaatgtgctgctctctggaggatttgaatctcaaaggatgcagatttgcattcaatgagatcacgtcccactcactgaagagcttggtgatcgacagctgcgacagcaagctttgtccttccaaactggttgtcacggctcctgccattgcctccctgtgccttattgtgaaattgtggtttttccccggcggtctcattgtaaatgaaatgccattcctttcgaaagcatccattcttgtttcagccacctacgacggaaagaacttccaacacaatcaaagcaagtttcttggtagcctctgtaatgtgacaactttagagctgtcaggttttcagacaatggtatgtattctgtcttcacagacttgcttcttctatacgtttaccttgtggtgccatttcagcattatatatttcagattatacctgaggaaccggttgagttaccagaattcaagaacctcaagatcttatcccttgacaagtgtgatcttagtgacaacttccagttattgaagcactttctgcagaactcgcctaatttggagaagctcacgttgcggctttgcgaggtattcatgctcttattttggccttaacattcttacataattaaatttggctcattattggacatcctttactatactgccaacagctgccaaaggattctaagaaaaggaaagggaaggccaaggcgaagaaaacacgtttggtggatatccggtgtgagaacctaaagcttactgaaatcatctacgatgctgatgatgtcctccaactggtcgggcttttgctgaacgattcagcaaatcttcctaagaacaacataaaactcagcaaagttgatcgttagtatggttagttcaggccctcttttgtgatgaccgattcttaggcctctcctgaattcacatgtcttgtctgtcttccgatgcactgtcagttgtgtagttgaaatgcacctatcttttgacttgtctaatcggtttaagactgctctgttctgttagctattgcatgtgttcttgcgcgctgtgatgctaggttaatgaagtgatagcgattgatacttatggctatgaacagaccaatttcttactatagagcatgttcaaaacgtatgatgatccatgctcctggttgcctagtacaatgtctacaatgagcacagcaaaagcacgtctctattgaaatttgctgtgccatgtttttttaggccttatacgtctctacagctaatatcatactatcaacaaaacgatttaataaacagcagatttatatgggtatagacgtataatggtgtttcatatcctaattcatggtgtgctctctcagcccctccattctgagatgcaagatgtttagattttgtcgtaagttgaacttatacttgatcatacagaatttttacaggtacctcaaggaactagtactacagggtacctgttgt

SEQ ID NO: 23396 - DNA, 8845 bp, Oryza sativa
cgattagccgataggtataggttgaacaatcggttgttggagacttggaacccagatgttgataacaattgcagactcgagtctcgggtgtgccaaaagcgtgtgtctgctgatagccgatagcttggtgtagaatcggttgaaggattcggtgccagtacttagcgctgaacgcctttggttgttgatgccaactgatgttaatgggactttggacgattacctgaaagcttgttgtagaattggatcggctggaagtccgatacaaatagattcaaatagttatataagaaatgaagcctttgctacaattggttaaaactaacttatgtataattattagcaaacctttctttatgaaagacaatcttgatagattggacttaaccaagatagtataaaattgaagtcgatatatatagatttatctaacaactacactaatctttataagccaatgtaacacttagaaccagtaaccagataacttatcgactagtactccgatgaaacataagcctaaaaactctcggcttaacaagacttagattatcagtagcaatctaaaagatcaaaactaactgagagagtatgagatataagcaaacgtgatagatataacaaatctatcttaaaatagcattatgtttaaagagacatcaacttgatcataatatcagaccgaaccgaggaagttctaagtcgatgttactctaaacaacaatgcaatcaaaagtagagacaatatatcagatagggaacacttgcttcggcccgaatagtatattggacctaactgaggaagtcctagtcacgccgttgtaagcgaaggtgatgtaacttacttctcgccggaggtcggacttaaccaacgtagcccatgctcgaaactaagaactcgccgggagtaaactagggtgacgatacgccgaaagttgtattgatcaactgatattttacaatgatctaggatgtacatgtttatacacccatgggtagatgagtgttcgaagcacccatgggtagatgagtggtcgaagcaacctcatcctaatgctattgaatgatgagtcttcgttgaatgatgacaatagatttatttttgatatttttgaggtggttcaaataatgtatggtaagtacattgaagaatcgacaggagtgggtctgtctttagacatgaggtgattgatcttgataaattggctgatcattggagaatataccatgactacttttcgaaagaacctatataccttcctctttattttagacgcaggtgcgtaatagtgaatactccctccgtcccataaaaaaccaacctagtatcagatgtgacacatactagtactatgaatctagatatacatatgtccagattcgtaatactagaatatgtcatatccggtcatagattcgttttttatgggacgaagggagtagtattttttcaatcttggtttgaattaccgacttgagtgcgcagtgccgttcaagtgcgcaacgcacgggaagtccgcaagtgcgtcggaacccgggtttcccttaccgtcggtaaccgtgcggttaccgggcttaccgcgggggtacggtaatataaataccgcagtaacctccttaaattcaaataaattttaaaaataatttaattttttgataaattttgcacggtttttcgcggtcaccgcgataaccgtgcttatcactggggcgcggtaaccccggccccgacggtttgggaaaccctggtcggaacacactattgcatcttcgtgccttcgggcttcatcggttcatccatggtccaactgggttcatccatggtccaactgaatcagcaacagccaacatgcaacagattacacatggaatcatagagtaaaggcagcaatcaggcatcagcagaagcagaagtgcagaacgacgggcgtcgccgtcggtcgacggcaacagcaagagaaacctgcgcggctcggacgaagtaattaatttgtttcgtttgatattatggaacggatgaagtaattgtatgcatgcatacatacaattaattaggacctcttctacattaaattagtacttttttaaatcctccatccttaagatgtctaattctattgaatgcatgtattatactctctccattccaaaatataagacacaaccaccctatatccaaagaccaaaaaacaattattatcacctctttgtttcaataatcccaactaatacaatacatgcacccagtagaattaagcatcttgatttaaaaaataataatctaggagagagaatttgcaattaattatcatgcatgcatgcacgccttatattatgaaacatctttaaaaagtagttgcgccctatattttagaacggatggagtatttattagggtgatctaaactaggagatgataataattgtttcttggtttttaggttaagggtggtagtgacttatatttttggaacggagggagtagcaaccggtactcacgaacatgcggactcgcgaagatataggaaaccaacaggtttgctagtggtagttggaaattaacgaagatcggaagatactatgatcatatgatcatatgcaacagtccggtccggttttgaagcctaatccagtacgtttcgctaccgaagctaaacaagatggaacagctagcgcgccgcgtaatactcagatccgatcgatcaaagcaacaactcacaacttcgcgcgcgcggcgcggctcggctgggggcgtccgccattgtcgtcgaccatggagatcgagggctcccgcaagcgcaagcgtactcccgccgccgccgccgccgccgaggaccggctgagcgagctgccggactgcctcctccacgacatcctgtcccacctcaaggcccggcaggtggtgcagacgtgcgtgctgtcgcggcggtggcgccacctctggcgctccgtgccgcgcctcgacgtcgactgcaaggatttctggtcgccgccgccggcgtcgacgcagcagcagcagcagcacgcggctctgttggcggcggagttcgccaggttcgaggacttcgccgacaacctcctgctccgccggagcgccgccgcgccgctggacgccctgcgcctgcgcgtcgacgagcgatgccagcgcaccacctacggcaggtgggtccgccgcgccatggtcatgcacgcgccggcggcgctcgaggtcgtccgccactacggcggcggcggcgccgcggcgccgctcttcgcggcgctgccgctgtccctgccctccggctgccaccgccgcctcacgaggctctgcctcgacggcgtcaccctccccgcggggttcgacgcgatgctcgcctcggggtcggggctccccgtcctggaggacctggagctcagggcagcccactacccgttcgcgcggatcgcctccgccacgctcaagaagctcgccgtcgagcgctgcggcggcggcggcgcgggctacctcaccagcgacgacggcggcgtggtcgtcatctccgccccgcgcctctcctcgctgcgcctcggcatctacctcgagcccaactggcccgccttcgccgtggaggggcccacgccgtccctcgtcgaagcatcgatccaagtcttccacgccaccgccattgatgcacatgcacctgagccgcagattacgcagaggatgagcttgctgaaatctctttgcaatctgcttgctggcatctcccacgtcagtagcctagagctgtcaggccttcatggactggtacgcgtcaaatccttcaattctcaatatatatagggagtggattctaatccctcgaggggatatcccctcgtatacctttttcttctaaattcgatgcaaatagttgtgaaaaaatctgaaaaaaattgacaatgtagagtataatgatacctattagtccaccaaaattcatgttcaaattcgatctacacatcgagaaacaaaaaagacaaatttagatataaacagtacactactattcatacgctgaatttgtcttttttatatctcgacgtgtgagttgagtttggacttaagattttgtgaagttgtatatatgtgttgtatgaatgttgtcaaatttttccagaatttttcataaccatttagatggtttttgagcaaacgagggaacatcccctcgagggattagaatagtttcccatatatatatatatatatatatatatatatatatatatatatatatatatatatatatatatatatatatatattcctctttccgttttatatttaattctttagttaaactttattaagtttgatcaagtttataaaaaaaattagcaacatctaaaatatcaaatcagtttcattaaaattaacataagatatactttgataatatatttattttgtattgaaaataccactatttttttctataaactctttcaaagttgaagaattttgactagggaaagagtaaaacgacttataatatgaaaatgagggagtacttcgttttgaaacatctgtgccaaaggagtatttcagaaatttcagaacaacattttttttgaattcttaacaaattttggtcaaatttaaatagatttctaccaaatttaaaaacaagaaggaaaattcgggaaaaatagtttcatgccaataccgaggatgcaaacatttacttctggcactgaaaccgaaccgtataaaataaaagagaaatgttactatccttgaggagatatcaaggagtatcatagtcgtatatcgtcctaaagagagatcggacattgagaggtgccgtatatagtatttcgtaaaatttggtgcctcaaggacataacaaagactctagagggattgttcctgttacattatcattgatttggtaattctgaactaattaactgttcctataattaactagctactcctggttttctgtatttcaggtgatgccattgcaaggagagggaaatgatccttacaatcaagcaccagcaggccagcactatcataatccagacaagaacctagctcagtattatcaagcattgcctcccatctttcagtatcaacaaccagttcagtattatgatataccaccactccatcctctctttccaccttataattaccagcatcctaattgggcggcgcaacaccgtcaacctatgcccctgttgcaaacaatgctggatgacaaccatggcggattgccggtgttctctaacctaacaaccatggtgcttcgcgagtgcaatatccatgtaaatgacagcatgaaaatgctgtggcgtttcctgcagaacacccctgcgctggagaagctcactcttcagaattgcaaggtaaacagcatgcaaacttttatttccttttagttaatttaccttgcaatatatgtatacatctttagaattttgactctattaatatttgctttggttttactaattaatatacatttgtcgttgccgaaaatagttctcaaatggtgctgatgttaggaaacatggtcctaagttgaagatctcttccagcttaaagtttgtggatatcatatacaaagatgtgaatcaccatgatggcgaagaagatgagtatgaagacgaagatgaagacaaagatgaacatcctgaggaagttaataaggttttgttcataatgtcaagaaaattgaaagatgttactgtcaaagttaagaaagtagatggatatcaatagtatttttagttgttttccgttgttgggaaaaaccattgtatttaatctatcgcgtacagtttgtctacttcgaaacttaatcgcttactatttttctcgcatgaatcatgaatggataatcacatatactgttcataatagcaaattaaaaccatttgtaacaagttgttttaatgatattcatagatttattagagtgagtagtatgtgagcgtggtggatccaacaatccaaccccaagtcatggatgtaaaattatactccctccgtttcaaaatgtttgacaccgttgactttttagcacatgtttaactgttcgtcttattaaaaaaatttatgaaatatgtaaaactatatatgtacatgaaagtatatctaacaatgaatcaaatgatatgaaaaaaataaataattacttaaattttttttgaataagacgaatggtcaaacatgtgataaaaagtcaacggtgtaaaatattttgaaacggatggagtagtattctactgtaatcaggcaatacgaattacgaagcgcactcgtttatgatccaaccatgggatacaaagctcctgaattcctgatgctaacgaatgcacagcttttgtagcttgatatctattgaatgaaattgacgtgtcgcccgtttgttaaaataaacttttacagcttgatcgttgggcccaaacaaagtgataagtcgtaaacacagagcaacaaaaaataatttatgaatattttttttcatttacggattagcaatttaaaagccagttctgaaaaataagctacgatatgaaaacctcaaaattatctttaaaatcaaaattcggttgcccatgggtttgtaattgagaaaaaaaaatccaagaccattagttttttttggacaaattaagaccatagtacctggtttgtgggcttaaattagattgggccggccgtgctgagaagcctgagatttggccaggcctgactggcgagaaggcccaatttcatgctgggcccactctctgcttcctgggtcgccctcctccgtgacgcaccttgactgcccccggtttttcctaatctccgatttaattaacttttatccccaattatatcccctccttttatctaatttcctttccttattttttttcctctctctctctctctctctctctctctcttttcccccacctcgctctctcctctcttcctcttcccccaatctccgacagttgccaaattcccttcccacccccaaacccaaaccccagcgacgacggcgacgacgcgcagcagacgaaagcgagcgagaggcgagagaaatcccatcgtttcccaaaccctaaccccctcctcctcctcctccagatctcggcggccgcgcggctgatgcgaggtgagccccgtccgccctagggtttgcggcggggtgcgtggtggtggtggttgggccgggggggacggggccctcctgctcgcgggggtgggggttgggtggggatggcggcggcgcgcgcgcacgtgaaggacccggcgcaccggaccaaggtggtgctccggaggctgccgccggcgatcgcgcagcaggccgtcgtggaacaggtcgacgcgcgcttcggcggccggtacgactggtcgtgcttccgccccggcaatgccaggtaacgcgcgattcctctcgccttgctccctccgtgtgcgtcgtgcgggtgcgtgcgtgcgtgcgtgcgtgtggttggggggcgtcgggggcacgtttggtctgtagctagggattgggttcgaagctgtttattagcctgcgaattgtgtacggggaggtaccaccccatgaaatttcgttagtagatttcattggctggttttgattgagtagctgtggccagcaattagcattctataatcgtgcaatttacagatacaagtttggactgtttgcctctatctagtgcatttggttatgtctagcaacaaataggttgctgtgatcaagtagttactgagttttaagtttgcaatcctaactgattgtgggccatttacagttctttcgcgttgttgtgatctcgaagcatagtggattgtgtacttcaaattgtagctaggatattttggaggtgtattttagtttattcttattagatttaatattagctgtgaccaaattattgcttggagatagtgcccaccttcttagttttgttgcataattttagctgtaagtgaactaaatgtgcttttgattgcagctagtataagtgaggtcaatatgttttttttttataaaaaaaattaccttaccttgccattttggctgctggagtaagaggttttgttctgtttgttcatttttatgcttctgtaggattgccttaagacatgctagttatagagaaaatttcctataagaaaacatgcacactgcaaaactacttggcagcattgagccttttttagtttgtgctgagtgatgtgcaacgtactgtggccattcgtatgtagctagtgattcaattgttatgtctgcaattcttaactcattgccgtggaagctaaatgatagtggcattctccacttcatttttattctcatttttctgacaatgttattgcttgtccagccaaaagaatcacagatattctcgactctaccttaacttcaagggcccagaagatgtcgttgaatttgctgaggtcttcaatggtcatgtgtttgtgaatgaaaagggtaactttcacatttatgtaccaacgtttctttttgccatgcaaatttatattcaggattcagaacttatattctgattatgtcaatgttgtcactatcaaaactagatacacatgtagcaatataagcagtgtggatctttgtacaaactaatagtgcaacatagagaatcagaatgaaattgcaattattgagcatttacatagtctttgaattggagattgatcttgtcgaataggattttgggactaaacagtaggttttgcatatttttccctattcaacttattgatgtctagtattatttttccctttttgattagtgcgcagcaaagaaaatattcaactgtaactatataaattccaatattatggaaatagtttaaattgag

SEQ ID NO: 23397 - DNA, 798 bp, Oryza sativa
aatatatcacagtagaaattgataacctaacttgcattttggaggctggagaccatcctacaaacaccaccttttgttactatttattggttactgatgtatgttattgctattctttcttatacacttcatagcattttaacattttcagatgcctattttcagcatgctggtataattgacattcatgttaagttattttcttatttttggtattcaagttaaaaaagaggttgacttttgatggttgcaagcaagcactgcttataatgtgatatattttaggtcggaacataagttaatacttttaatgtaatcaaggtgttgagttttccttcaacagtcgagcacatgcttgtaaatttaattttggactatgcttttttgttttaaattttattgtcatgcatgcggcctatggttcctgtcaggtgctcaatttaaagctcttgtggaatatgcaccatcgcaacaggtccccaagtcaaacacgaagaaagatgctcgtcaaggaactataatgaaaggtcctagacaatcatttaatctcattctccatcctgtaggtgacacaatttcatatttatcattacttcaaacttagctggcatcttttttgggatttaatatccagatccggaatacttggagtttcttgaatcgatttcaaagcctgctgagcatctgccaagtgctgaaattcagctcgaaaggaaagaagctgaaagggcaggtaaagtattgtttgtaatatcagattataattatgcctttcaaagatgccaaggggctgcagga

SEQ ID NO: 23398 - DNA, 9306 bp, Oryza sativa
aaacattggtatattaatgactttcatatctgcatattaatttcaattgaaagccatcttgttgcccatccttcctgacaagatgtagtgtacaaggcactctttagttgaggctcgctcactttgtattacagaagtataacctagacgtaactaattcagtataaaagcaaaaagtgcatcagcaacgatgagggtggaaactagaaagaaggatttatgatgttccttagtttattcagtcacgaaagaatgactttaaaaaaatgtacacttctttcaaagtgaaaatgatgagatgtcttacttatgtaatgctcctacacgctgaggttgttcttgctgacaccctcgtttctatgagaagtttattctaacatagtaagttgatatttacagcaaacaaaatggataataatcctgatgtttcaacaaaactagaggaactcactgttaacgaccaaatttggtaaagccatgggctgggttcaaagctagagtcgaagccggatttggaggaattctttttaagaaagccagagtgtgtatcggctacgggcggcatcagctgccgtacgtatcggctacaagcggaatcggctgtcgtatgtatcggctaacgccaaatccaatgaagacaagccgatgtagccagtcttgaaaagacaggtccacaactatcatcgggatcaatcgaagtgcttcatagccattgccacacaagaatcggtccagcaaagggcaattgtatctattaattaggtttagtttccttaagagatattttggtaagagtccgcctaagggacttgttcgtattttacattgtaataaagatagagtcatgtccaacaaggagatgttatgtactttgggtataaatatgacccgagaccttataatcaggggacgacagctcaataatacttcggcgcatcgccaccctttttctctttcattgtttcgacgagtttttgctttcgagttgggctgcatcaggttcgatctccgacgaagaggtaaagcttgttatagcggattgcgttctcaggattagtgcttacatctttatgacactctaatcctatctatgtgaatcaccgagttatcatatatgctgcataatctagattgatctcgtcatctaatctcatcggctagcctctatcatcgaaaacggccgacagatttagatatcaacattaagctagattatgcggtatatctaccatatcaaatgagtcttcatcgttcttgcttagatcttatgtttcttttcacacttaatgctgcattggttaggttcgatctactaagtactgtcttgaaacattttatctagctctttctatgaatgctaatagagttagtatcggagtttcagccgatcttacctgatttagccatcgtgtttccactacttgggtcttgatcgtctaaatttgccctttatattaaaatatcatctatttgaagtgtattaagctctctatcaatctactagttcaccttatgtcacgaccggaactaacccaacgggcgttccttacgtgcgtgtattattccttgtcccaggaggcaaggtacaccaaaagttgatacatttcagagtttatcaagaggaagcgtaaataattaatttattacatgggcggcgaaggcccagcacacacaaagacaaacgggaaacagcggaagactagggcgactaccacaggtgcttgacggcaggcacgagctagacaccaaaaccttcatcttctaggaactcctcttctgggtttgggaaaaattgagcaagactgagtacaaccaccgtactcagcaagacatacccacaagtgcagaataaatgcaagggagtacaagggagccataatatagggggttagggattgcagtaaacagcattaaaagtcacttagttgctccaacctactttgtaaacacagtcctagagctatacaatattattaatcaaggccgtgaacccacacgaacctgccttaacccaaggcctacgatgattcagaccgaactggcaacccgaccctgggtcccagctcgtcccaagccaacccaggccaaccattccacattttagttgttaagcaggttttaagaattaaaacaataacttgggtacattgctaggcttgcccataaccgagggcgcggctattcgaataggttatactctgatcagaggtgtacatctttacccacaagacacatctttctcacgtgtaaccacgtgccacataccaccacggtatacggacggaagacgtgacatagtttccaacccaacctagccatagacgagagtaccgacccaacccctcctacggccggaacctccgggacaggtaggcaggactgagcccctagcagcaggacactggccctgtgccatgacatcttgactaccgggccgcagctcgtgtagccttcatttgccctagagatgtccatcgacccccgacttcgtccatctccatccgtgtacttttgtttataaccagactgagccacaaactaagccttacccactagatatgtggaagtacggtagtgctttgcaacagaggcccgaagaccggtccttatatggccgaggtgctactatcaaaaccatgcaccccgagtccagcctaaaaccattttgagggttttgaatagagggggaggtgtgaatccaattccgaataatccatccattccatagtgtccaggtgatgagaatattcccgaaatctagagttgtaaaaccacctaatgttacctaattaaccagcgaagcatctacctaaattcatactagtggtaccatgagtagagtgtcaactagctggggttttctttaatctagggtgaacaaggtaataatatcaataacaatagtaataaggtcataacaaaggtaaataggcatggctaaataaaacagtgataacgcgggaatttaaataaagcgataatgcaataatttaaatcaaaataattttataaactgggatttaatatgttcaaggatcatgtgacttgccttactcactttcccaaacatcggcttcaacctccacgaagagcggatcttccgaagctgcagcgtctacacgaccaacggaaaagaaaaggcttttactctaataaactccatataacaagcaggaacaaagcacaaaaatggattcttgacttcttaaggaaaaattagagacttgaacggtccaattccgagttcaaatggccaagttatggccatttgaagtttatatgctctttaaatgaatatttgcgaatttcttcatttaaattttaatttaaaaagggtttattgcgtcagccgagggaagggggcgcggaccgggtccatgggagtggggcccacgaggcagcctcacggtccacggtggatcgggtgcacccgggctcacaccggccggcgccgtgggtcccacgcgtcacccgcacccgtgggcgcgggcggctgacgaccgggccccacgcggcagccactcggcccgcccgaaggcggccacttggcgcggccggcgggaggcggcgcccgcgcccctatggacgccggcggcggccataatcacggtggagcggcggccgagagaggggaagggaagggggaaaagaggcagcggtccacggctcaccctaggtcgacggcgacgacgaaaaaggcggccggagcggaggaaggcggcggcgcggctcgggtcgacggggtcgacggcgttccggcggtcggcgaactcggcgagggggtggacggggtcgacggcggcgacggaggaaggagagagcgacggcgcgagctcgattccggcgaggaggaagggcggcgagtggcggaaacggacagaggaggtgcggggagggtttaaatagggttggaagggggagagagcggccggaggggaagcaaaccggcgcgggaggtcggccgccatcaatggcgctgccgagatttgcgggggcaaatccgcccgtttgaacacaagagagagagggaaaaatggggggaaagggagaggggatcacggggagtgatttcccccactttattgcacgcggggacggcgggatgcggcggatttggcggcggcggcggcgcttggcgcaggcggagcggcgggaggatggggatgacgggtgggccccacccgtcagcgagggtggcgggcgggcccgcccgtcagcggcgcgcgcgcggggagaggctgagtgggccgcggggagaggagagagagagagggggggaggagagatgggccggcccggcccaagggagggaagggggacttttaaggtttttctttttataaaactttttcaactttgtttatttcttagtaattattatttgtgctctgaaaattccactaaaatttatttacaccttttaggcttttaggaaaaatacaaaaatcccctaagccttatttgacttttaactttgcacattttaattgttggaggctttcacacggattttaattattctaggcataatttaaaggatatattttagagtcgttttgggacatgacaccttgcttgttagattggtctacgtttcgtatatttcatctgtgctaatattgtagtataaagtggtatcggagtaatagtcgatacacgttaggtttgctcaatcggctatgctgtgagcatacataatccctactttgaagcacatttagatattaagtgatttatactgtctcggcatatcgcccgatctatcccaatcacttgatccaaatgtgctttcattggatagattgcgtactgctgacgtctacagccgattgggtagatctaataatttctatgccttatattcccttgctgatctgatgcaagtaacatcggcttggctccgaacaatacgttatcggcaatccagccgatcggctatcgttgatggatttaactttgttcctttttctttcttgctggttgcaggatcaaaccaactagcgcgctcggaacccgaaagcaattttggacctgcgctagagttaagcagatctctcaggccagtacgtgtgttttccgcatcaacacactttttggcatgcccggtgggaccgactttcgtaaaattttcttcatggcaagcctcaagtagagagaagttgatccagaaaatgtcatcccaataacaatggacaagctgaccctggagcagaaggcagaatttgaaaagatgagagatgacttgcaaaacgattcctgcattcattcgcacagactcgttccgacaccatggtccagaaatataaggtagttctgtcgaacaacgatgacgcggaaacaagttctggcaaagacgacaaagccaagggcaacaatcaggaggaagatctcgaggcgctcagatgtatgcaagaccaggttgattatgccgttcatcatgctttggtcaaccaatcaggagtacttgtcaacatgttgaccaacatgatcaaatatgtggttgacggcacgatagctgagcatcaagccaaaggtccagtttttctgcctggagggtttttccaaactacaaaactgtcagcatggacaggcatcaacccatctcgagtgccgccccagaacagccgatggcttcagttgtgccccctgggggcaaggtccatcaacatcggcacaagggcagccaggattcaatccttacgttctgatcaggccacaaccgcaacatgcagggcataacatccctcggatctctccagaacaagtcgcatctatgttcagaccaagacagccgatagttgagacgattccgcaaataaccatgggacaactttcgcctatcccacaacaacagccaactatcggcacctagtttaaccctgatcaacacatcgtacaccaaactcctcaacctcacctaaggggcaaccttaattttcagtaccagccccactcacctcagatacagtatcggctaggaggagcgcctcagccccagtacctgcctcaatacaaccaactggatcaggtgccgcagtagatccagggagcacctcagcagaagccttgggcagatatgatagccaatgtgatgagggaacaattcgggcacaagcctaaggatagtgagaacttgtatcggcatccatacccagaatattttgagagagtaccattatcgaacaggtataaggtcccagatttctcgaagttctcaggacaggacaatgtgacaacatatgaacatgtcagctgattcttagtccagtgcagggagtcatcagctaccgatgctttaagggtcagattgtttcctctgtctctgtcaagattggccttcacgtggttttcatcattgccatataattttgtacaaagttgggccgatctggagaaacagttccataagtacttttatagcagttccataagtacttttatagcgggattcattagatgaagttgtccgatttaacgtcaatcaaacagaagcatgacaaatcggttcaagattatatccagagattcagagatatgaggaacaggtgctttagtttggctttaacagattcccagcttgccgatctcgctttccaaggcctactggtgccaatcaaggagaagttctcagcccaggaattcgagagtctagctcacctagctcagaaggtgacggcacacgagcaaaggtttcttgaggctagaaaggcatataaaaaggtgaacaatgttagcacatatgtctctgaaaccgaagaggatgaggaccctgaggtagcaatagctgaatgggcaaggaacaaatgagtggtcacgtgccaatgggtcaaggactctggaaaggaggaaaaaattgatttcgacatcaccaaagacgataggatcttcgatttattgcttcgggagaaacaaatccaccttcctgctggtcatgtaattccatctgctacagagctagggaagagaaaatactgcaagtggcataacacaaggtctcacaacaccaatgagtgcacagtcttcaggcagcagatccaatccgccattgagcagggaagaatcaagttcgacgacccaaagaaatccatggagatcgacggcaatccttttcctgtcacaatggtccacacaagcgaggggatagccaatagaagaagctatcggcccaatgccgctatgatcatcagcaaatatcaagggaagcttgagaggcagaaagaggagtgttacaaagacaacaacaatttcgatcctcattgggactacaaattctttagattctactaaaacgaagggatgaggttaccctcgaaggaaggttgcccgtgatgcagtgatgccgacgaaaaccacgtcggtagttcaagccaatttcgtcccggaaaggaaaatcggtcggtgcagaagaagctgcctgttgatcagagattgggacttgctagccgattggtttctattggattatattgctatactatattatcatcagctgattgccttcatatcattatatacattggacatatagccgattgctcaaaaccctatcgccatcggctggtatcggcatcggctggaattactccatgggcttgtcaactgatcggctcattgatctgctatttgcatatcttgtcagttgcaggatcaaactgactggcacgcccacatctcaccaaactttggacctgcactggagctaagcagatctcccaggccagtgtgtgtttttcgcgtcaacaggttgttaacgattatagagtgttttattgagtagttcagctactagcttggtggtatcagtgattagtagcttttttttgagagttttattaagtttgtttctaaaccatgtagatgaaataacagaattggaacttgtttggtcaagtatatcagttattaattctatgacaccagaaaattacattgtttcatcgcatttaaaggctacaggtatttttcttttttacggagtgatcaaaccggatcaagggataaactactgcaaattatatcttctcgccctagtggacttctttatggagtgaactatatcaaatgttttgcttttgatgctgatctaattagtctgctgatcgttacggagatgttggtcatttccaactcttaatcttgctaatttttttccttcttttgctccttgataggctcgcttggcaaggaatctcccccacaaaattcagaaaagaggagggactgcataatcaggtactgcatactccccctcacagcttcagtaatgcttgcatgaaaaagttattaaaacaggctctctcaaaacaaaattcatttctttgccagttactaagcttaccgtctttaacaactgagaattgctttattaaagaaaaatcaaagtaaatatgagtgatcttgagtgttgtaaatttgatggtataacagcatagaagcacatggattttatgctgctatgttgctgtaacacaagtttgccaaacatttatgcagcatctccatgttctatctagtagtggtttattttgtgtacaacagtgagatattactcccaatgaaatttctacagatttttataaacatattgaaatatgatccattctctaaaaatatgaatgatttgcactatatcatgtaataatctagctcataatgtattacttactttgttgtattttaatcatgaatgatttgcactacgatatttccacatttggttgattaagtatctgccaatcaattgccattcatcctttttattttctgggagcaattttaccatcattttttgcattgcacctttgactgatatttctaagcattgctatttccttttgagtacctcgacaaacagagttgagcccattgtatatcctataactgattaatgcttgtaggtatggatctatttgagcttcaacaaagccctatcagaattttgacatttcctgtgcatgtcaaaggttctgaatagatacacttcaccatttccttttattgcaggataacatttttagctattgttttcggttaattttcaacatatatagattcatctaggttgacattgacgatcagcgattgtgccaactttattcagttaaaacctgatctagccatttgcagttgtgcaactgccgttgataattttttttccttcttggtatagtcacatcattagtttgttgtatatgcatgtaggcacttattatttatcatgtgcagattttatccattggcataagttatactaatatctgttgttttatcctttgtgttcacaaaattctgtattgttgaagatca

SEQ ID NO: 23399 - DNA, 2564 bp, Oryza sativa
ccgaccccatgtggaaagggagagggtatcacgggaaatatttccccccgctttattgcacgcggggacgacgggaggcggcgggattcgcggcggcggcggcgctagggcgcgggcgaggcggcgggagcggcgggaggtcggggaagacgggtgggccccacccgtcagcgagggtggcgggcgggcccgcccgtcagcggcgcgcgcgcgggaagaggccgagtgggccgcggggagaggagagagagagagggggggaggagagattggccgggccggcccaagggagggaagggggacttttacggtttttctttttataaaactttttcaactttgtttatttattagtaattattatttgtgctctaaaaattccactaaaatttatttacaccttttaggcttttaggaaatatacaaaaatcccctaagccttatttgacttttaactttgcacattttaattgttggaggctttcacacggattttaattattctaggcataatttaaaggatatattttagagttattttgggacgtgacagctgtggttcatgctcttaaaatctggcggcattatctcattggaaatcgctgcgaaatatattccgatcataagagtttgaaatacatcttcactcagtcggatctgaatcttcggcagagaagatggttagagctcatcaaggattatgatgtgggaatccactatcaccctagtaaggccaacgtggtcacagacgcgctgagtcgaaaaagccgttgcaacactcttggcatccgtggcattccaccggagcttaatcaacagttggaagccctgaacctaagcatcgttagccatggattcttggctacgctagaagccaagcctaccttgctcgatcaaatccgtgaggctcagaagaatgatccagatatgcatgggatcctcaagaatatgaaacagggtaaagccgctggtttcacagaagatgaacaaggaaccctctggaacggaaatcgtgtatgcgttccggacgacaaggaacttaaacagttgatacttcaggaagctcacgaaagtccttattccatccaccctagcagcacgaagatgtacttggacttgaaagagaaatactggtgggttagtatgaagcgggaaattgcagagctcgtggctttgtgatgtgtgccagcgtgtcaaagcagagcaccaacgatcggccggacttcttcaacctctccaagtaccagaatggaaatgggatgaaattgggatggatttcatcaccggacttccaaaaacccaaggcggatatgattctatatgggtagtcgtggaccgactaaccaaggtagctcggtttattcctgtgaagaccacctatggagggaacaaactagctgaactctacttcgctaggatcgtcagtctccatgacgttcctaagaaaattgtatctgataggggaagccaattcacctctcacttctggaagaagatccaagaagagttgggtacccgattaaatttcagcaccgcgtatcacccgcaaaccgatggacagaccaagcgtctaaatcagatcctagaagatatgctccgtgcctgtgttctagattttgggaagacctgggataagagtctcccctatgccgagttctcctacaataacagctaccaagccagcatacaaatggcaccttatgaagcgttgtatggccgcaaatgccgaacaccactattgtgggaccaagtcggggaaagccaagtgttcgggactgatatcctgagagaagctgaagctaaagtcagatccattcgggataatctaaaggtggcacagtcccagcagaagagttatgcagataaccgacgccgtaacctggaattcgcagtggacgattttgtgtaccttcgggtcacgccattgcggggtgtacacaggttccagacgaaagggaagctcgcacctaggtttgtgggtcctttccgcatcattgctcgacgcggagaagtagcttaccagttggagctgcccacctcattgggcaacgtgcatgatgtgttccatgtgtcgcaactcaagaaatgtcttcgaatgccatccgagcaggccgattcagagcaaattgaagttcgcgaagacttgacctatgtagagaagccggtgaagattctggacaccatggagctgggaattggaccgttcaagtctctaatttttccttaagaagtcaagaacccatttttgtgctttgttcctgcttgttatatggagtttattagagtaaaagctttttcttttccgttggtcgtgtagaagctgcagcttcggaagatccactctacgtggaggctgaagccgacgtttcgaaaagcgagcaaggcaagtcacatcatccttgaacatattgaatcccagtttataaaattattttgatttaaattattgcattatcgctttatttatattcccgcgttatcactgttttatttagccatgcctattcacctttgttatgaccttattattattgttattgttattattaacttgttcaccctag

SEQ ID NO: 23400 - DNA, 1802 bp, Oryza sativa
ctgcaccccccgctctgggcgtccccagccgaagttcccttaggttcctcagagactttgtcaagacggcgtaaagggacattaggttaggtttcaacgctaggtgtctttcgtggtaagggatctctgggtaaaacacttggcgatattgtgcacctgatatcaacattgttgaagtagaggtaatgggagaatcgctacacctctggtcaagaaccaggtagtagtcgtaactcaaccactagaagtgaatgtacgagagatcggtacgattgactggttgagaaccagtgagtaggtgtctctcgatcatttgaagttgtggtgcatggactgctgcgttattgctgtagccgtacctcgaccatctgaggttgcggtgcgagagattgctacgcactggttcgaggaccagcggacaagtagaattatctcttggacaccaatagaggttgcggtttgagagattgctacgcactagttcgaggaccagcgaacgtgtagaattatctctcaaacaccaatgaaggttgaggtgtgggagattgctacgtactggttcgagaaccagcgagcgagtagaatcatctctcgaacaccaatggaagtggcgggagattgctacgtactggttcgagaaccagcgagcaagtagaatcatctctcgaacaccaatggaagtttgcggtgcgggagattgctacgtactggttcgaggaccagtgagcgagtagaatcatctctcgaacaccaatggaagttgcggtgcgggagattgctacgtactggttcgagaaccagcgagcgagtagaatcatctctcgaacaccaatggaggttgcggtgcgggagattgctacgtactggttcgagaaccagcgagcgagtagaatcatctctcgaacaccaatggaagcactagagttggtttattacatgtgtatctcatgtggccagcatgactcacacacccaacttgtagcatatccggatgtccgttcgcaatcatgtcgggtgatcaagccgacaacgttcacgaggaattatccgttaacaacatttttctcaaatagtccagccacggccggcgctatgagataggtcgtcggtctttgttggtaggttgggcgcgacgactctgcatttgtcgagattgttctcaataatgcggtgtacttgatcacaacctacttgagtgctcaattattcctgaaaaatattttctagaagacaagatatatagcagataatatcaagtgtgtactcaaaaaactacatggattttctagcattatcaggatataacgagcatatataaatatcaggcattatgtaaaccgtaaacaagcatgatttatatggaagaaaatagagtgaaccctgtcacgtcccaaaacgactctaaaatatatccttaaaattatgcctagaataattaaaatctgtgtgcaagccttcaacaattaaaatgtgcaaagttaaaagtcaaataaggcttggaggatttttgtatatttcctaaaagcctaaaatgcataaataaattttagtggaattttcagagcacaaataataattgttaagaaataaacaaagttaaaatgattttataaaaagaaaaactctagaaagtcccctatccctccctctccctcttgggccggctcggcccatctctctccccctctctcctctcccccgcggcccatccggcctctccccgcgcgcgccgctgacgggcgggaccgcccgccaccctcgctgacgggtggggcccacccgtcatccccttcctcccgccg

SEQ ID NO: 23401 - DNA, 2079 bp, Oryza sativa
ttcaattgaaagcgatttttgttgtccatccttcctgacaagatgtagtgtacaagtcattctttagttcagcctcgctcacttggtatcacagaagcataacctagacgtaactaattcagtatagaagcaaaaagtgcaacagcaacaacgagggtggaaactagaaagaaggatttattatgttccttagtttattcagtcacgaaagagtgactttaaaaaaatgtacacttcttccaaagtgaaaattatgagatgtcttacttatggaatgctcctacatgctgaggttgttcttgctgacaccctcgtttctatgagaagattaatctaacatagcaagtagatagtttactgcaaacaaaatggataataaacctgatgtttcaaaaaaactagaggaactcatgcatgatgtacccaaaggaaaccggttcttgacacactacaaatctgtggtagttcttttccatctcgaaaacgaatcaaggctgtgtttggaatcagctgttcccaacatgcaaagtgcgcacggaaaacagggcggtccattagagcgtgattagttaagcattagctttttttcaaaaaatggattaatatgatttttaagcaacttttgtatagaaactttttacaaaaaaacacaccgtttagcagtttgaaaagcgtgcgcgcggaatacgatggagatgggttgggaaccctggattccgaacacagcccaagtctatccaaaaagtttagacaagaaaacacgtaacaagttggtttgcaagaatacgaattacgtcaatcctgcactataggtagagcaaaatggtgatttctcgtaaatctctcgaatggtgatttaagaatttagtgcaaacctaactcttgctataaaatcaaatgttcggtaccgcatcaacggaacaataaaaagcacttggcataccataattttgtcattcttgttgaaattttgtaacataaaatgcatgaggccacacgaccttaatgttcaacgtgtcatgcattagtgaaataatagctcacaaaacataacaaatatagctagataacggttgcaatccttaccaaactaacgtataaagcgagcgatgagtcatatcattatctttctagcctgctaaccatcacgtacactttccgatcccaaaaaatgacaacttctatggatgaacctggacaatgtttagggtttagggatgaatctggacaaatgattgtctaggttcatccctagaagtgggtttctccttatgggacggagggagtatatttgatggacacaaaagttactttcgtgatgaaatcaaaggggatttgttgaggcacctaatagaacatatgtccaaatgacatgactcacttggatcctaataggacatgaaagcaaaactagcactccaaagcaaccaatgaggaattgaaagaaaataagtgccatcgcatctataaatagacaatgaaaaccctccccatcgttcacacagttcaagcattatacagtaaaaaagaaagatctagtgtcctgtcgcaatgaagatcattttcatctttgctcttcttgctattgctgcatgcagcgcctctgcgcagtttgatgttttaggtcaaagttataggcaatattagctgcagtcgcctctcctgctacagcaacaggtgcttagcccatataatgagttcgtaaggcagcagtatggcatagcggcaagccccttattgcaatcagctgcgtttcaactgagaaacaaccaagtctggcaacagctcagggtggtggcgcagcagtctcactatcaaggtattaacattgttcaggccatagcgcagcagctacaactccagcagtttgatgatctctactttgatcggaatctggctcaagctcaagctcaagctctgttggctttgaacttgccatctagatatggtatctaccctaggtactatagtgcacctagtagcattaccacccttggcggtgtattgtactgagttttaacaatatagtggttcggaagttaaaaataagctcatatatcatcatatatttcacctgag

SEQ ID NO: 23402 - DNA, 5758 bp, Oryza sativa
ggatccccctttttaacatgtaaaatcgaatatacggatacatatttaaatattaaatatagattaataacaaaaaaattatagatttcgcctaaaaactgcgaggccaatttattaagcctaattaatccgtcattagtaaatatttactgtagcattacattgtcaaatcatggcaatctacacacaatttatgtaattaatattttttatatttaatactctatgcatatgtctaaacattcgatatgacatggtgaaaaatttttatttaaaaactaatcaagacctgaattgcctttgcaaagtgtcagatggtatgtctgggaaaatctaagattctaagaatcaactgctccttccattttatataatataagacataactacatttatttaagttgtttcataatagaaggtgtgtataaatgcatgttattaactagcacatctttttcattaaaatattattatttaaatcatctaccatcaagatctctaattttattaggcgcatgtaatatatttattaaggtaatccaaactatgatggtttgggtggtcgtgtggaattgagggagtacttgataattaagatataataatacggaggagctgtgaaacccagcttcttagagtttagctcgttcatgtttcagattatgtatgtagagcgtctcagaatctcaatgaaagtacatattattttggagaagcctttttatttcgagagaagctgcagttgtcaaaaatttttctaaacaggcccagtgactctgactcgtagttaagggtgcattgtccactttttaaaattgtactccttcatatttcacgtgcacgctttcaaaattgttaaatgatgtgtttttgtaaatgttttctatagaagaattgcttgaaacaaatcatattaatttttttttcaagttttattgttgacataaaaattatgggtacttccactttaatatttgtttaatttgcctctaattattggtaaaattacttattttaaatacatatttttgttaatcacataaattttcttccatcgcctcttgcacgaaagcgaccgaggcattcacttgttgctcccatgatacgatcattacactaacacgatcattacactaacgcgtcaggtacatcattcatatcatacatgtgcatagtggaataattatccaaaaaaaaacatttgtgattattattggtcatactaggttgcttaaaaaaaatttcagttaaactttatccactgggtatattaccggtacaacgcacgggtattttactagttttttttcatataaaacagaaaagtctgaaaacgcgtggaccaattttggtaactggccgaactcccattagactttacgggcaaccggcccatcacgcttttttgcgtggccgtaatcgaaaagaattcgtccccctagttgtgtccccggggagaataaatttcctaatctaaattattccgccaaaaatccgccgcgattggccaccgctggctccatggcaagcggaagcggcgagggcaagggccgccgccaccaggacaatatcccaagcgtcgtcctgctcgagctctggggccacgtcgccgacgatgaccaccggcctgacgccaccaccgccacttccacgacgagcaccggcctgccaatctcggtgaccttgtgcgccgccaccccgccaagcctctcgcacctctccgtcgactgccctggtctggtggatctggatcccaatcccttagataagtttgtggcgcccacggtgatcagcacggatgccgacctcgtcctccttcgtgtccctgtcgatcgctttgccagatttgatcactgtttcagcgactacttcgtctacaaggtgcactctcactctgaaagcgcaaagctgcaccgtctcccgagcccacgtggccgtggctttgcagacgacaacattgccatactgagctgcggcaacgacgacgacgactcctacgctgtggccgctcttcaacccttgcatcatgtccacttcaggcttcacctgtgtcgctctacccccgatggaaagccagggagttggacctcccatcagttgacagtggaggagccgctgaggggaacggtgtgccccgtccctgactcagcactgaggaggatcttccatgccaccaccaaggtgattacgcttggaggtgctaaaggtacagttggctgggttgatctctggcgaggcatccttctctgtgatgtgctcgacgagattgagagccccaagctccgcgatttgccgctgcccttgccctctacgggcaactggcctttgttcctcaatcgctgcccctactattgtcgtgacatcgtcgtcaaccagagcagagacactatcaagtacgtcgagatggaattcaccatcttgaactcatctcaagatccacgctcctcgtatcacgaatgggtggccagccaagaatttcgaagttcgcatctagacatcttggtcgatgatggtagcttgaagatcaacacatggaacatgcctatcccggtcactcatgggatgactggaagcctggatgctccgtcacttccaaccacttggacactgccctgcatagttacatgaggaaaatagactacaagaggaaaaatgccgccatatccgtggagagtcttcacacggcttaccctaccctgagcatcgctgatgatgatgatgttgtttacttgctatccaagcgcaccacaagtggaaactattctaatccctcgaggagatgtttcctcgtttgctcaaaaaccatctaaatggttatgaaaaattctggaaaaatttgacaacattcatacaacacatatatacaacttcacaaaatcttaagtccaaactcaactcacacgtcgagatataaaaaagacaaattcagcgtatgaatagtagagtactgtttatatctaaatttgtcttttttgtttctcgatgtgtagatcgaatttgaacatgaattttggtggactagtaggtatcattatactctacattgtcaatttttttttcagattttttcacaactatttgcatcgaatttggaagaaaaaggtataccactccccaccacaaggggagcagccaagatggtattcactcttaacatgagggcacgtgttctcgaagaactggagaaacttcatagcatgagtcaccttggttttatgcgttgcttcctttccactgggatctccaaacatcttaagcctacaggtaatttgctgtgatatctggggaaatttatatataccttatttgtgctgtatgagttgaaaacaaaactcaggctgcaggccgtgcatggttggaaaacaaagctcaggtgaattttgttgcaccgcactgttacatttggagtagatgttggtttaccgaagcttgcttttgccaatatattggcagcaaatccacatccaataaatggtgagctcattcctagcaaaatgtagcacaatatgggtgtgaaaacacaatataaggatctaaggtcggatcataataatattccttggtttaggaattaggatggtctgtgtgaccaaactactgagattatattacaacttaccaaggtagtgtacttaatttaggagaatatgattgataatgaggatacaatgcaatggtagagtagtactcaaggatcactatgcactgttgtgagttagttgatgacaagccttggggcttcttgctgtagttgggaagcaaaatggagttgggagctgtcacgcccagaaattcccgaatagaattccaagcagaatgtgcattaaaatccccgtccaggaccagccggggtacacaaacgacaatgttgacatacagatccacgtcttacaaacatcgtaaagtcttacataaatgcagcggaaaacagaagaaactggagctaatccttgactaaactgcagcgggaacaccactccacaggcatcctcgacggcacggacgaagcctactcctcagagaaaccttcatctgacccgaactcgaactctggggttgggaaaaatagagcaagactgagtactacccactgtactcagcaagtcataccggaatagaggtatgatgcagggaatcatcaaagaagagctaaagtggttcatttgcataaagcgagcatttataaacagagattgaaaaactccccagttgtagattaagcagtattatcatcaagaccacgacaccagtgcacaggcccaccaccacgaaccatccaaattcattagactaaactaatgtgattctaatcacggtgaatctggttgaccgcccataaccgcgggcgcggctattcgaatagttttactctgatcagaggtgtacaactgtacccacaagacacagccccacgacacgtttccgtgcgccggcatgccaccacgacataccggaaagaggccgtgacaggacccttcgcataaccccctctagccaagcacaccacacctcaggtttcacccccgtccccagcgggcaacgggcagtcccctctcgtgcctaggtgaatccggaagcgacagaggccgtcgcagggcccgccccgctccatcacgcccacccttgcctggatgcgtcgactagaggaaagctacactacaagcccagccgttgcccacgctggcttgtggtaagtacgataaattcttccagggcatcccgcgaaccggtccttaactgccatgggtgcgaccagcaaaaccatgcacccacagcccaccatgtggttcattttatttaaccaacaccagagcggtggtattaaaccaacattaccattagaactaacagtctaaacattaatatgattttccccattgtgatctagttgaactaagcaaggctaagcaattcctagtccaaactctaatcatgttataacccaagctaacaaaggagcatggtatccaaaaagcatggctgtaacaataggtaaccatcccatagtaatattataaaacaatgcaatatttgaaaggaaacaattgagcatttgcaatataggatcaacatgttcaagtgacaagcatgacttgccttgctctgctgctgggggaacctcggcgactatctcgaagtacaccggagcgtcggagggatcggaatctagcggcatacaaagcaaacattgcaaacaggctataagactactgaaacagagaacaaaaccatttttaatggattctacacatttttcttgatttactgagacttgagtgcttgcctccttattggtaaaggatgcaacggtacgagcctatagaacagctcccgcagcacctccagttccgcccgcagttcctgcagctccagttccagctcccgcgttcactctctccttcgctccagcatcagccgccaggggtccagccagtggcaccggaggttggttgtctgctactcccagtggcagcggcgagactgatctgtcaggctccaggagtcgctcagagggaccgggtgacgagcaggaggacgccttcgactccaccgaccgcaggagccgttccgagcattagtctcgttttccaattagtttatcgatggtctagcttctggttgttagtttgcgtgtttaggttgcttgtttggggtcagttgacggtcgatatcatgtgcctatgatatggctgtcttaataaggatttttgcttgctttttaagtgttttaatggagatcagaacaaaagcagtttta

SEQ ID NO: 23403 - DNA, 8387 bp, Oryza sativa
ttctttttccccgtctgcttttccctccagatggtctacaccaggactggtagccgcgcaacaggcgagggcagcaacggcgaagaacgcgctgatggtgtgcaccccaacagtgattctggcaatggtccgccaccacttcccgagaatccgacgcttgcccaagttatggcacatcagactcagatgatggcagccatgatgcagcagatgcagcagcagcaccagcagatgcaccagaggatgatgcagcacgccgaacagcagcatcaacagtttggtccccctccccctcagtccaagttgccagagtttctacgcgtcaggccacccaccttctccagcaccaccaaccctatggaggcgaacgactggctccatgcaatagagaagaagctgaatctcctgcagtgtaatgatcaggagaaggtcgcttttgccacacaccagcttcagggtcccgcgtcagcttggactgtgacagagtacctccatgagttcaatcgcctcgcgcgatatgcaccagaggatgtccgcaccgacgccgagaagcaggagaagttcatggcgggtctggatgacgagctgaccaaccaactgatatctggggactacgccgactttgagaggctggttgacaaggcaatccgtcaggaggaccaacgcaacaagatggacaggaagaggaaggccgctcagttcagggcacatcagggaagtcaccagaggccgcgcttcactcccggacagcagggtggacctaccaccatgatcgtccgccagcaccgcccgttcaaccctagcaacttccaccagggcaccagtggcagtcagaaccaccatggaggtcagcccaaccgcggtgcagctccacgcccatcagtggcaccggcacagtcaggccagcccgcgcaagccaagaaggagacgggagcaaaaccagggtcctgcttcaactgtgacgagcttggccacttcgctgacaaatgcccgaagcccaggcgtgccgggccaaggtttatccaggctcgtgtcaaccacgcatctgcagaggaggcacaagcagcaccggaggtcgtactgggtacgttccctgttaactcaatccctgcaacagtactttttgattctagtgcaacgcattctttcatctcaaagaaatttgtcgggatgcatgggttaataagagaggaacttagcacaccgatgcgggttcataccccagggaatagctccacttcggttcaattcagcccttctataacaatagaaattcaaaggtcaccatttctagccaacctcattcttctcgaatccaaagacctaaatgtcattcttgggatggattggctgaccaagtttaagggagtcatcgattgtgcgagtcgcacagtcaccttgaccaacgagaagggagaaaccgtggtgtacaaatctctagtctcgccaaagaaaggggtctcgttgaattagattgagacggaaatcccagtggacaccgtagagaagaacttgagaaaattggaagatatacccatagtctgcgagtatccagaagtgttccccgaagacctcactaccatgccacccaagagagagattgaattccggattgacttggcaccgggaactgctccaatctataagagaccgtacagaatggcggccaacgaattagcagaggtcaagaagcaagttgatgagcagctgcagaaagggtacatacgaccaagcacttcaccttggggcgctccggtcatttttgtggagaaaaaggataagacgaagaggatgtgcgtcgattatcgcgcacttaacgaggtcacaatcaagaataaatatcctttaccgcgaatcgacgatttatttgatcaactgaatggagctaaagtgttttctaagatagacctgcgatcaggctaccaccagttgagaatccgggaagaggatattccgaagacggccttcaccactcggtacgggctatatgagtgcacggttatgtccttcggacttaccaacgcacccgcattcttcatgaatctgatgaacaaagtgttcatggaatttctggacaagtttgttgtggtgttcatcgacgacatacttatctactcaaaatccgaggaagaacatgagcaacatctccgtctggtacttgaaaagttgaaggagcaccagctatacgccaagttcagcaagtgtgacttctggttgacggaagtcaaatttctgggcgtgacaggagccccagtggccagtttagttttctgtaaagtcaacgtacaaccatcttcacacatgtcacgcccggaaattcactagtaatttccgaacttatttgtgcataaaatcctcgtccaggaatcagccgaggtacacaaactgacaatttaatatataaatccatcataataataacgttacacacttacaaaagaaaagaaaacagcagcggaataacggtctagcgatggcttcagctccactcccacaggcagctcaactggggtataagccaaacgtcttatccttctggatcctttttcttcaactgaggttgattgattattgcaagaatgagcatatgacatactcaacaagccacacagcaaatatgcaagtgcacaaagataccaaaggatggcataatataggctcatttgcaaaagcagcatttagcaaaacatttaagagaagtaaaacagtggagtaattaatcagaaattttaatcaacactgaacaacacacccatgctgcacaggcccaaccattctgaacaaccatacccggccgtacagatctaactccaaaccaggagctaaacaaattattaccagttatagcatccataattattgtgagaggtgtgagactaatcacgaaaaacattgctcaactcgcccataaccgcgggcacggctattcgaatagttttactctggccagaggtgtaccactgtacccacaagacacagcctcaacatcatgtctaccatgcgtcgcgatactggaaagtacccgaatagaggctgtgacaataccctttgtacaacacaactcaccacagtgcaccattcctggatcataatcacccccttataaaacaaggcatggactccccagcgacccccatgggcttatctccgccacttctcagtctggtgctccgcaatgaaccatgttatacaaaaggtaaagccgttgcccacgctggcttgtggttggcacggttaatgtttcacaacagtagctcgcgaaccggtccttaattgccatgagcacgactctcaaaaccatgtgctcacgacccaccattatcaagttttagttggcaagtaattaattaaccaatcacgattgaccatcgtgaactatcattaagccatcattaaataatagtgagtcataagttatcccaatagtgtgctaatgtttctaagcatggctaagcaatcatatctaatatctagctgaaccaatatataaagctcaactagtcaagttataataatccaaggtatcaaggaataaagtaatcaatgcaaacaggacataacaaaggaatagattcacaccacccagtgacattcgaaaataaatgcacagttgaaataaatagagaatttaaatataggatcaacatgctcaaaggattgtgtttaggatctgtgtgacttgccttgcaataatcggtcttcaattagtcttcttgaatacttccggcgcactcgcgaaccttcgcaacgacggaaacgacaagctaacacgcaaaacgaagaaaaagactaataaaaaccaaataaacagtacatataaagtactcaaacatgtagatcataattttagatgaattatgagacttgaacggcctcattctgacttcatatgaatttattatgaattttacaagattaaatctaattaaagcccatttaaaaagaattaaataaatttaattctatttatggataattttaatacgtagatctttattttacacaacttttgcaacttgaaccacattaaactgagttacaaagaattagttatgaattttcaaagattaaatcggattaaaacacttatatagattttaattgaattatgacgcaataatgaattatttttgaaaaggaaaagaggattattgcgtcagcgggctcgggttcacggtggaccgggtgcacggcggcggctcatggaaacgaacggccgagatctaccctatccacaacgaacggccgagatctaaacggtctacgaccggtctatggcgaacggcaacgatgacgtcagcgatgacgtcatcaccggcgacggctcgggcggcgcatgctcaccggcgaacgacggcgcgacgacgcaaacggaggacaccaacgggtagagggcgacgcggcgaactcaccggtgaccaaaacaacggcggaagagcaacagacggcgccggcgacgaggaagaagcggcgacggtcttcgggtcgacggtgatggcggtgctccggcggtcttcggcggcggcgaagcggtggacggggacgacgacgacctcacgatcccgatggtggcgacgacgaccgacgacggcggctgcaacggcgacgcggcgcggctgaaccgacggcaacgacggcgacggctagggctgcgcggaggcggcgctagacgcgacggcgggctaaggcaaaggtggcggcggatagaggagagctcgggggtgcttataaaggggctagcgagcggcgacggaggcccacggcgaccggcggcgagaaggaaagctagggttcggaggagagaagtcgatccgaatcaaactcgaatccacggatttccaaacgaaattagccgacgattccaaaagagaaaaggtagaggagattgagaagatcatttcccctctattgatttcaccggattgggaaaaagacggtcggatttggaaggagacgacggcggcgcggcgctagggttcgagcggcggccggcgcgaggaggaagacaggcctgacaggtggggcccacctgtcagcgggagagagagaggagagcagcggctcggatgcgggccggcttgggccggggaggagagagagagcggttttgggccgactgggccggggagggagagagaaagagagaggttttaggccggctttcggcccaaagccaaaagagacttttaaaaacctttttcaatttaaattattcatgaaatgatattccattgattaaaaatacttccttggctcaaataaatcccagaaaaatctaggaactttagaatcaagtaaagtatttaatgaaattttatctggccctattttatattggaatttattaattaaaattagatcttctcttttaggcttttaagatcatttctaataattccttttaaacaacaatttataatttaaggatttttaaacaagaaaagctcctaacaattataattagatcattaatgatcaaataattactgaactgttctttgtatcatttaggaattgagctctgaaaaatccgagaaaatttcagagagtgtaattaatcatggagaatttaataaaaattaaatccatccatgctttatatttaggaaattttatttcccacatttaacttcacttgtaaattaaagaacatttaatataaattctaataataatttattaaataatttataaatcctgaaaaaaaatcaggatgtgacaacacagctgtatatggccacatcatataaattgcattgaaagctaaactaccattaaagataaaaaaaaatttagttagccgtacacaatgcaatattaataaaagataatctcgtaagacgaaactggaatggtaatgaaacttgtgccttttgcaaggaaaaggagactgtcaacgacctgtttttttttttcactgtgagttggccaaatatatttggagcctcatggctaatggcttatgtgtttggagctcaaatgtcgtcccaactctttcgagcaatttttgatcagggcatagtttatataccaaatggaaaaaaaaaatcacattgcgggattggccgccatgtgttgggccctctaggaagccggcccgtaatatgttttgaaggataaagaagatcaagtctcctgatatggtgtgtttcatctgtttgtttccctcttatattggtcaggtttacaaagccaggaggatcaaatcaaactggaacaatgtgcggaagaactgacgtctacagcactgcactgtcatcagcaagactgagttctgttgggtcaagatggagttgtcctgtgaagctggagttgtatcgcttgggttgaagcctttcactgctgcacaaccgattttgccgccggttggcaaccatctatttgtcccggttatgcaaccgggacggcgaatccgggactttagtcccggttggtgttctaaagatgtggtcccgactatagggtttttttttcattttttttcttttctctttttcttttttactgttcttttgctatttgcccaaatcatctcagatcaaacattcatcactcatagcaatatagttcatcccaaatcattcacacaatagttcatccccaaatcgttcacaacaacaacacagatcgaatcacacattcaacacagattgaatcacacattaagaaaaaaataaaaaaaagaaaaaaaatacagcagcagcgccggcctccaccgcctgccgccgcaccggcctcctcgccggccgcctcccctcccggatccgttgccacccggccgccgcggcgtgaggctgcctccgcctccgcccggccgccgctgcccgtcgctacctgagaaaagggaggaagagaatgaggagaggaggaagaagaggaagagatggggtgaagagataaggtgagggtggaggagatagaacttattaactgatcccgtattctcctcctcgatctcgcgcacgccttggcctctccgccgcacatgccgatcttttttcccagttggttacaccaaccaggactagaaacatatctttagttagaggggtatggcaccgcctgttattcttttagccgggactaaaaatgatctttagtcccgattggtgtttccaactgggactaaagataaaaaagtagctcgaaccttttgaactgggactaaagataatagttagtcccggtttttattgcaaccgggactattgtggtttttgctcgaccgggcaaagatgttttctccagtagtgttttgatatgctggaatgtataaatatgttcagaaacgtctcaagttggagctgtagtacttttgagttttagccagtaaactttttttgctctctgagtctttgaatttcatatgtcatggcccggattagggttgacaacggggcgggttgagctggaatgcccccgcccccgctccccgacttctccccccgaccctgaccccgcagaggtggttgggtggaaaacgtcaccagccccgatccccacagggacctggcgggtgagcagggccccgcactacccggctgggccggtggacggcaagatagacaatggcgacgaggacagcgagttggaagacgatgaggcgagccgccgccgcctgcgcctggccgtcgacgccgccggccacgccctggtcaccgccgccgcctgcgccaggccatcgacgtcgccgcccgcgccctggccgtcgccaccgcccatgcctggcggtcgacgtagccgccgcctgtgtggtgtgagggtgacggggagaggagattgggagaggaaagaggataaggctagggttttatttttatattttagactattgttggattgggctcttttgggtcttccatggactacattttaaggtttaatttacatcccacggggccccgcgggtcacccgcggtgaaatgcctcccccgtcccctccccgcaaaaatgtggggccccgaccccacctcacccgtgggtcaaaaaattgaacccgcccccgccgccgaaagggtggggtccccgcagggagacggggcgcaaaatgcaccaagcccagctggaggagatccaggcgcgcgaggagacgctggactcggtcatgcgtgagacggaggaggagcggcaggcggcgctcatcacctcaagcgccttagacgaggtgctgggcaacatccgcctgcagtatgaggcctacgccgaggtcctggcgaagagggttgaggacgcccgcggggtcctcgacgcggccgcggcccaagtgcggcgggcatcgaaggtcgacgcctcgctgcgggcccggtcggaggcgcttaggccgagcgcaaggcctggacgagcgcacccgcttcgcgcaggagttcgaggccacgattcgcggcgga

SEQ ID NO: 23404 - DNA, 5527 bp, Oryza sativa
tgaggagcgggcgcgcgcgttggaccagcacgagacaaccttggccgtccacgaggcgacagcggccgaggcggaatcctcccttcgcctccgcgaggaggccgcgaccgagcgcaaccagaccaccattgccactgaggctttagtggcccgtcgcacagaggagctgtggctccgagaggaggcgtggcgggaacgagatgccgcgctcgccgagcgtgaggccgaggtgaaccgccgcgaggtggcggcgcgccggctaggcgagcagctcaccaaatgtgaggaggccgttgctgggcatgagacccgccatgtggaaagcgcccgtgttgagcgcacggcgatggtggcgagggcgcttgagctggaggccagggagaaggaactggcagcgcgcgggcagcccggcgacgccgagttggtcagccagctcaccgcggcccaagatactctcgccaacctggggtgtctggtacagaaccaggctggggagatcgcggccctccacctcaccaacgacatcgggcctggccaactctacgatgccatcgaacggctggagtgcgtgggacgccgggtgggcatctccgtgcgccgggacaagaagctcctgcccacaagaccggcgctcgcgcttcggctggacgagatggcggcggatctcgagaggctggaggaggaggtcggcgaggccgtgaagtcgtcatcggcttccttggcacgggctgcggtggagcttgtcctcgcgagtcatcaagctcgcgaccccaacatccttccgtggcacgtgctcgaggatttcccccagggattgagacgagggctcaggagcaagttcgggacgcggccgacgtgatcatctcaagctttgaggggacggccccttggttcaccctcgcgcttccctcagatgaggagagcgggagtgatgacggcggcggcgatgatggcaacgaggattgggacaaggtggtcagcggcgctgtacttggaggcccaggcactccgtgattgcccccgcctctcctcctttattttgttatgtgctcgtggtgaacgcttgaaactctaggccattgtgccatcctggttgtaaataaagcttctcctttgcacttttacatccttgctttctcttctaaatgcctgcggcaaggaaaaaaacaaagcgaacgcatttagttgacttctttacgatcaagttgccatttttactccctttgtcccgcccctcgggctcgttccggtaaaaagggggaatttgcacttggtccgcgacacttaggtggcgaggggcaaggccgtcgctccaggggagccgcccagcgggactaaccagaccgaggccacggtgatcgggggtcggggatggccatgtgtaggcccttccgagcccctagggttcgctgcagcccggggcacggcccgcgttcaggctccccttcggttattttcaggttatccaacgccacttagggtccggagcaagcgcgaatcgtccttaagccaggacgagccataggaaggagtaagaaagggcgcgcaacagcttttgattaagcagaaaaatttattgctgagggagggattggatacaacatatttaacagtggtagccctcggccaagcccgcacaggctgaggagtgtgcgggggttggcccgagccccaagaaagcaaaaaacgcgcgacattatgggtagaaacggtggagatgctcgatattcctggggttaggcaactccgtgccgtcctccatggttagtcgaaccgagcccggccgggggacaccgatcactttgtatggcccttcctacattggtgagagcttgctcagccctaaacacgactgtatgcggcgtaggacgaggtcgctgacttgtagtgatcgggctcggacgtggcgctgatggtagcgccgcaagctttgctggtagcgcgccgcacatagggcggcgcgccttctccgttcttccaaataatcgaggtcatcgctgtgaagatcatcttggttggcctcatcgtacagcgcgacgtgaggcaaacgtagggaaagctccgagcataggaccgcctcagggccgtacaccagggaaaaaggcgtttcccccgtggcgtggctcggggtggtccgattcgcgcacagcaccgcgggttgctcctcgagccaagaatacccgtgcttctttaggatgttgtacgtcttggtcttgaggcctttgaggatttcggcattggcccgctcaacttggccgttgctcttggggtgggcgagcgaggcgaagcacagcttgatgcccatgtcgtcgtagtagtcgctgaatagctcactggtgaactgggtgccgttgtctgtgatgatacggttgggtactccgaatcgggatgtgatgcccctgatgaacttgagggcataatgccagttgatcttgacgaccgggtaagcctcgggccacttggtaaacttgtcgatggcgacgtataggtgctggtacccgcctcggccgctttgaagggccctaggatgtctagaccccagaccgcgaagggccaaaagagcgggttgggccaaaagacctggttcatgaccagttgggaatcgcttagaactaggaggcagcggatgcccattccggctgccgctctcagtcccgctatgagtcctttgtattctgccatattgttcgtggctcggaaatcaagtcgaacgacgtacttgaggacatccccgcttggcgaagtcagcgtgactccggtccctgcaccttgaaggttgagagagccgtcaaagtgcataacccaatgtccggtgcgaatatcggcgttcgggtcttctccatctccggggagggagggaatatgggacggaatagagtcgtccgccggggtccactcagcgttgaagtcagccaaaacctggcttttgatcgtgtgctgtggttcaaagtgcagatcgaactcagcgagctcgatggcccaattcacgatccgaccagtgccctctcggttgtgcaggatctggccgagagggtaagacgttacaacggaaacccgatgcgcttggaagtaatggcgcaatttccttgaggccatcaagactgcgtaaagcatcttctgggcctgagggtatcaggttttcgcatctcggagtgcctagctgatgaaatagacggggcgctgcacctttcggtggggtcgacctttgtcgttagggcaacctagctcggggcgcccgtgctcgggggccccgagggggtctcgagccacgtcagtgcgacaggcctcggggccgtccgccggggcctctctctctcccacggggacctcagggccttcccgggggttgggggcttcgggcatcgggctgttgggggacgaggggccatcactagttaaggggacccctggtcccttcccatagccgggctcgcgacgcaggtcaccttcgtcacgctctactacaagggcggcactcaccgaatggggggtcacagccaagtagagcagcaacggttcctctggtcccggggccactaggataggggggaggtgaggtaagctttcagctggctgagagcttgctccgcttcctccgaccatacaaacggcccagagcgtttgaggagcttgaataggggcaacgccctctttcccagcctcgatattaatcgactcagggcggccatgcatcccgtgacgcactgcacatccctaagtttgctggggggcgcatcctctctatcgcgcgtattttctcgggattagcttctatgcctcatgaggaaactaaaaaaaccgaggagtttgcccgccggcacaccaaacacacacttctcggggttcagtttcatgcacgtggacctgaggctgtcgaaagtctcagctaggtcttgcaacaacgtgtcctggtggcgcgtctttaccaccaagtcatcgacatacacctctacattacgcctatttgatcactcaaagtaatacgagtcatgcgctaaaatgtagggcctgtgttcttgagaccaaaaagcatagttgtataacaaaaggtgcctacaggaataatgaaagcagttttttccttatctttcctagtcatgcggatctagtgatacccggagtaggcatctaaacaacacaaaaggtcgcaccccgcagtggagtcgactatctgatctatgcgtggtaaagggaagggatccttagggcatgccttgttgaggtccgtgtagtcgatgcacatccggagcttgccgttggcctttgagacgaccaccgggtttgccagccactctgggtggatgacttctcggattccaggagccgcatcacctcctctcggatgaaggcttgccgctccggggcttggtgccgtactttctgctggacgggtcacgcatctggccgcactgcgaggcggtgctcgatcacctccctggggaccccgggcatatccgatggctttcacgcgaagacgtcggagttcgcccgcaagaaggagacgagcacactttcctatttggcgtccaaggtactgccaatcttggcggtcttggatggatcatcgccaaggggaatctccttgacgggcaactcgtcggccgaggcgaggcgcctcttggaggcgcggggtgtggagggctccggggcctgcggcttggtggctgccgccaagttatcggcgcgctgctctgcacaagccagggtgactttgacatcgccaaagacggtgatggggccactgtggcctggcatctttatctggaggtaggcgtagtgggtggcggccatgaacttcaccaacgcgggcctcccaaaaccgcactgtagggcatattaagatccgccacatcgaagtcgacccgctcggtgcggaggttggtagagtcacgaaaggttaccgggagctcaacgtgacccagaagctacgtgtgtcccggggtcacgccgatgatcggcaggtacggctgaagcttcatccccggggacttaagggcatcaaaggcagccggggagatgatgctgaggccggcccccccgttgactagaggacacttcatcttgatgttgtggatggttcgggagatcacgagggccaacttccctccccaagcgagcaccgtcggatggtcgctctggtcgaaggtcagtttcacttccgaccagcgcgccttccatgttgcctcgtgagttgggatcgcggccagaagctcatgcctcatggccttgaaactgcggcgggaggtgtgagcgcaaaccccccgtcgcgagtggcgacggttccctgaggtatctggaattccaggtcctcgctgtcatcatcatcatcggcgggggcctttttattggcctccccccgccggtcgctagcgggggtcgcgggggccttgccctcccgttgactctgccgcttctcctcatcggcctttcggtaccgctcggccaagttcctgaccgagctgcagtcggtgaggctgtgccgatctgtgcccataggtgttgtgcatcgagcaccacttaccgcaga

SEQ ID NO: 23405 - DNA, 4597 bp, Oryza sativa
ccgccaccgtgtccgccagctcgaagtgctcggcgatggtcttgggctccttggaggcaatcttctctagcatgcagttgtgtcgcacgccgttctagaacacataaacgaccgcgtgggccggtatgcagggaatagtgttgcggacctggcagaagcgctgtatgtatgagcggagggactcgtcgtccttccgttgtatagcgtgcaggtctgcctcctctcctgggcggggatacgtgccttgaaagttcgtaatgaactgctggcacaggtcctcccaggagtggatggagtcggggggctgagtcataagccagccgcgcacctgacctttaagagccatggggaagtaattcgccatgacctagtcgtcgccccccgcatcatgatgatcgtgctgccatcatatttctccgtgaggttggggcgaaacttcgggggccaccggactctggagactcgccttgaaggccctgcaactggtccctccaggggtaaatgtgaggggcgggccgcctcgcgtggaggagcggggcactccggatgaggaggcgccctccccatgcgggccgcccagtgctcgtccctgtgttgctcaatgttgattcgagcgtccctcctcgtagaggccaccatgacgtccccggcttcccgagatcctcgatgacgttggggccgtcgaccacctcgaagtcagggccgaccgacgggccctccttcttgctgacgaggaaagagcggtgggttacgcgaggtaccagaggcggcgggtcggccacccgcagcctgctaccgctgggcagtggtgaccaggttggtcatgttgtccaaccatcgctggacaggggtctccggctccgaatttatggggggatgccgtagaagggctcccgccgcctaaagtgcgcctcgggatgagccgccgttgccgtatgtcaggcggccccgtgccccgacactgcgcggtttctccccgcgcggcggcggggagaggttcctccctctgtgggggggtcgcggtgggcaggagtgggagagttgttgcgacggtggtgggggccgcggctcccgctagcatcgtcactcccggagggagtaggggtgtgcgccaccacttcttcctctaggacctcgaccatgatcgttgaggatggagggaaacttgtggtggaaggaaacgatttctctttcaaacgcgcgaattccccctacctggcgcgccagctgtcgaggaatgatcctctcttgcgggtgattgagggacccccttttgtgagttcggccgggggaaagggcgcactgatcaagaacgtatatctgcctagagtctttcgagaccgcgtgtgagagctgggattgtacaggttcgggccgctagggagcgtaataccctactcctgtgcgtgggatttagggttgagtgttacaaaggtttctaaactccagggagaactcttactcttcttcctctggggcttaggctaagtgagagtcatccccccttttcagtgggcaaggtcctccttttatagttcaaggggataccacatgcaccgcctctacctactccttcaagggagggggcccacgccgcttggagcggaccaccattcgtgccttcaccggaagctaagcagccgtccgtcctcgagtggggcccagcgccgtcccctgcctgacacgggggacgcccttgtcattcccctttaagtgaatggagacttttggcggttcacctcacgtggagggggctctagacgatgcattgatgggacggggcatacctgcccccactccgccgagcacagggcggaacgtgggggcaccgccgcccgtccgattggatgtgatcggccacagaccggtcacgcccgattgacgcgggtcaatcgggcagcgccgcacgtccgccctcaccgcattaaatgcggtgtgggacggttggggtgctattcattgatggcggctcagattcggccaccgccccactcactccccccgccacgtggcggccgggcgagggcctcggggcgaggcagcctgagggtcaaaggggcgtgacgtggcaccccgaggccccctggctgcctctgcgtcgtccgagatgtggggggagggccaggctgtatggccgcgtggctggacgggattgagacttccccatacttctcatatcctcaggcccatatcaccgacaattattctcacccctagttagctaatgtaactagttagttcaggtggtggtttgggcttgtctcaatgtggtgtagtgttgagcagtgattggttaatattgattaaatactacaactgtttttactgctttcaactactgcttttaaatgcaagcattatgcaaatgaaccgctagcctcctttggttatatcttgcatcatacctcctcttccggtatgacttgttgagtacagtgggaagtacttagtcttgctctctcttccccacaccagagttgaagttcttcttagttggagatgtctcgaagaaattggtttcgtcgctgccgtcaaggatgcatgtggagtcaagtcttcaggcttagctggctttcatcttttccgctgcatttgtaatcttttatatttttgtaaaacgtggatctgtatttcaacaattgtcgtttgtataccctggctggttctggacatgggtttaatgcacattcagcttagaaattctggttcgtgaatttctgggcgtgacagttgtccatcattcttgacaagatgtagtgtacaaggcattctttagttgagcctcgctcactttgcatcacagaagtataacctagacataactaattcagtatagaagcaaaatgtgcagcagcaacaataagggtgaaaactagaaagaaggatttatgatgcttcttagtttattcagtcacgaaagagtgactttaaataaatgtacacttcttccaaagtgaaaattatgagatgtcttacttatggaatgctcctacacactaaggttgtgtaatgccccgagtttcgaattagtatatttcggggaatattagaacaaatgcgcaaaagttcaatttttttaaaccgttgttcgaataggcgatcaggaaccatggatgtatagagctcgtcaagtagtgcaaaatatactaagtcccggggattgaaacaatgtgggacgttggatctcctttttgtctctttatgtaactaaaagaaaaaagaaacaacggttttgctaaaaaactggcgacagttttttctttagaaaactttcgattttctagccattagatgcactccaggattcgtgcaacatatacggccatatgggtagaataaaaaaaatctcgtgtgggctagacaagcattgaacgagctaggatctatccatcaaacttgccacacgttacgctgaggtacgggcactttctgattattaatagcatttgtagttatatatcacttacaccctaggtacataacacttatactctagttacatactctagttagttacatagcacttacaccaactagagtagttacagggtaattacatggtataaaattaggatttgtaatttttttcagggacatatatatgcatattacttttgaattgaaagttattatcaatttgggcactaagactcgtggtttgtactagtgcagactgttttcctgtaatcgttgatgacaaatcctatggttgaaaaatttgacagttctggacctaaaaaactgtcgacagcacactagctagtccctttcttgggactagctattctatgagaagttcattctaacatagcaagtcgatagtttactgcaaacaaaatggataataaacatgatgtttcaacaaaactagaggaactcacgcatgatgtacccaaaggaaaccggttcttgacacactacaaatctgtggtagttcttttctatctcgaaaacgaatcaaggctgtgtttggaatcagctgttcccaacatgcaaagtgcgcatggaaaacggagcggtccattagagcttgattagttaagtattagcttttttttttcaaaaaatggattaatatgattttttaagcaacttttgtatagaaactttttgcaaaaaaacacaccgtttagcagtttgaaaagcgtgcgcgtggaatataatggagatgggttgggtaccctggattccgaacacagtccaagtctatccaaaaagtttagacaagaaaacacgtaacaagttagtttacaagaatacgaattacgtcaatcctgcactacaagtagagcaaaatggtgatttcttgtaaatctctcgaatggtgatttaagaattcagtgcaaacctaattcttgctataaaatcaaatgttcggtaccgtatcaacggaacaataaaaagcacttggcgtaccataattttgtcattcttgttgaaattttgtaacataaaatgcatgaggccacacgaccttaatgttcaacgtgtcatgcattagtgaaataatagcttacaaaacataacaaatatagctagataacggttgcaatccttaccaaactaacgtataaagtgagcgatgagtcatatcatt

SEQ ID NO: 23406 - DNA, 3592 bp, Oryza sativa
tctgatgtttcaacaaaactacaggaactcacgcatgatgtacctaaaggaaactggttctagacacactataaatctgcggtagtccttttccatctcgaagacgaatcaacgatgtgtttagaatcagctgttcccaacatgcgaattgcgcacagaaaacggagcgctccattagagcgtgattaattaagtattagcttttttttttcaaaaatgggtccatatgaatttttgaagcaacttttgtacagaaaccttttgcaaaaaacacaccgtttagcagtttgagaagcttgcgcgcgtaatacgatggagaagggttgggaaccctggattccaaacacagcccaagtctatccaaaatgtttagacaagaaaacacgtaacaagttggtttacagaaatacgaattagatcaatcctgcactacaagtagagtaaagtggtgatttctcttaaatctctcgaatggtgatttaagaattcagtgcaaacctaatccttgctataatcaaatgttcggtaccgcatcaacggaacaataaaaagcacctggcataccataattttttcattcttgttgaaatttgtaatttaagatgcatgagaccacacgaccttaatgttcaacgtgtcatgcattagtgaaataatagctcacaaaacgcaacaaatatagcaagataacggttgcaatccataccaaactaacgtataaagtgagcgatgagtcatatcattatctcctgcctgctaaccatcatgtacaccatccgatcccaaaaatgacaacttctagggatgaacctggacaaggcttagggtttagggatgaatctggacaaatgattgttcacgttcatccttagatgttggtttctccttacgggacggagggagtatatgtgatggacacaaaagttactttcatgatgaaaccaaaggggatttgttagggcacctaatagaacatctgtccaaatggcatgacttacttatatcctaataggatatccaagaaaaactaacactctaaagcaaccgatgaggaattgaaagaaaatacgtgccaacgcatctataaatggacaagcgcaatggaaaccctccttatcgttcacacagttcaagcattatacagcaaaatagaaagatctagtgttccgcagcaatgaagatcattttcgtctttgctctccttgctattgctgcatgcagcgcctctgcgcagtttgatgttttgggtcaaagttataggcaatatcagctgcagtcgcctgtcctactacagcaacatgtgcttagcccatataatgagttcgtaaggcagcagtatggcatagcggcaagccccttcttgcaatcagctgcgtttcaactgaaaaacaaccaagtctggcaacagctcgggctggtggcgcaacagtctcactatcaagatattaacattgttcaggccatagcgcagcagctacaactccagcagtttgatgatctctactttgatcggaatctgggtcaagctcaagctcaagctctgttggctttgaacttgccatctagatatggtatctaccctaggtactatagtgcacctagtagcattaccacccttggcggtgtattgtactgagttttaacattacagtggttcggaagttaaaaataaactcagatatcatcatatttgacatgtgaaactcagggtgatatatcctagtacatcatcgtaactaattaccatcattggtactctacaattttactgtgtgcttacattcgatccgaagctactttgtctttaagatataaatggagtgtataaaagatgtccatcctttaattccaataagaacaaacacgaagcacatatggcaaatactaaatccactacaacaaaatcatagaccataaaacgcacgtaaagatgtagcaatgcacattgattcttcatccactactaaaataagcgcatatgaaaggccgcatatgcatgatcattgtgaatatgacatgcgcttatcgaccaaacgtgtcacttcatgcaaatatgttgtttcaagcgacatcaagatatgatttcaaagttttaaacaatggtatattaatgactttcatatatgcatattagtttcaattgaaagccatcttgttgtccatccttcctgacaagatgtagtgtacaaggcattctttagttgagcctcgctcactttgtatcatagaagcataacctagacgtaactaatttagtatagaagcaaaaagtgtagcagaaacaacgagggtggaaactagaaagaaggatttatgatgtttcttagtttattcagtcatgaaagagtgactttaaaaaaactagtaatcatgcacgtgcaaggcacgtttttcatattacatatggcatcaacgtaatattttgctgtcgcaatatgtatataagacgatttatttcaatgtggtgataaaataaataaaccaagcttcatgttaatccccattcaagctaaaaaatgcaaaaaaaaaaagagagctcattgttgcatacgatcggaatacaatagcgcatgaaatctatgttggtaaaaaaataaatcactgaaacagagaaggaattaaagtttttatatagtcaagtcaaatttgaaagagagtaatgggttttgaaactaataagaatgtattattataaagatgttgttattccatatatttccaaattgaagttggatcatccattaagatttctttgagttgattatatactacgggccttcagatcgaaaaaaaaactcttctcgaagttgaactccatttaacatacatggaacttccttagtattttgcgaacatcaatttcaaatattcattaataagaaacatacgtagtatttttctgatttttcaagtttacgacttattgtttaactgtcattcatttgttttgaaaaaaaaagcaattttcaattgatatagcacagccgcacaccccttctgagatgagttctgattagcatctcctgataacatggcatctcttctttacaagcatacaaaaggacatacatcagaactatttatgttaacaccaaataaatggcagagaaataactaattttgatttaattagattaagacagtcacaatatccagcttgcgcttgttgccggcgttgttgattgactgcttgctcatgctgaagtagcctaggaagatctgcacccaatgtccctacatcaggagcagactttcttgtgttaagttcatgagagcttgccaggcttgtgttaagttcatggcatctcctgaagtttatgcattcatcatctagctttatctcacattagatggagcaagctggggtcttccgatagcatcataggttgttgaccctccgcaccgccgctgctatggaaccatgaagaagtgtctgtgtcacctattcatattggaactaaatttggtaaaggttagtcagatatctgaacctaaaaccagcattgcacatattgaaatttgatgctgaaacttattacctgagcagcagcacattgtagtcatatgcttctttgcaaagttctcctataca

SEQ ID NO: 23407 - DNA, 1022 bp, Oryza sativa
acaaggtttagggtttaggtatgaatctggacaaatgattgttcaggttcatccctagaagtgggtttctccttacgggacggagggagtatatgtgatggacacaaaagttactttcgtgatgaaatcaaaggggatttgttggggcacctaatagaacatgtgtccaaatgacatgactcacttggattctaataggacatcaaagcaaaactaacactccaaagcaaccgatgaggaattgaaagaaaatcagtcccatcgcatctataaatagacaagcgcaatgaaaaccctccccatcgttcacacagttcaagcattatacagcaagaaagaaagatctagtgtcccgtagcaatgaagatcattttcgcctttgctcttcttgctattgctgcatgcagcgcctctgcgcagtttgatgttttaggtcaaagttataggcaatatcagctgcagtcgcctctcctgctacagcaacaggtgcttagcccatataatgagttcgtaaggcagcagtatggcataacggcaagccccttattgcaatcagttgcgtttcaactgagaaacaaccaagtctggcaacagctttggctggtggcgcaacagtctcactatgaggatattaacatttttcaggtcatagcgcagcagctacaactccagcagtttgatgatctctactttgatcggaatctggctcaagctccagcccaagctctgttggctttgaacttgccatctagatatggtatctaccctaggtactatagtgcacctagtagcattaccacccttggcggtttattgtactgagttttaacaatatagtggtttggaagttaaaaataggctcagatatcatcatatttgacatgtgaaactcggggtgatatatcctagtacatcgtcgtaactaattaccatcgttggtactctacaattttactgtgtgcttatattcgatccgaagctactttgtctttaagatataaatggagcgtataaaggatgtc

SEQ ID NO: 23408 - DNA, 1679 bp, Oryza sativa
cttggacattatggaatggttggattattgtggaattggattcacaccttccccctctattcaaaatcctcaaaatggttttaggctgggctcgaggtgcatcgttttgatagtagcacctcggccatataaggaccggtcttcgggcctctgttgcaaagcactaccgtacttccacatgtctagtgggtaaggcttagtttgtggctcagtctggttataaacaaaagtacacggatggagatggacgaagtcgggggtcgatggacatctctagggcaaatgaaagctacacgagctgcggcccggtagtcgagatgtcatggcacagggctggtgtcctgctgctaggggctcagtcctgcctacctgtcccggaggttccggccgtaggtggggtttggtcggtactcttgtctatggctagggtgggttggaaactatgtcatgtcttccgtccgtatgccgtggtggtatgtggcacgtggttacacgtgaggaagacatgtcttgtgggtaaagatgtacacctctgatcagagtataatctattcgaatagccgcgtcctcggttatgggcaagccgagcaatgtactcaagttagtgttttaattcttaaaacctgcttaacaactaaaatgtggaatggttggcctgggttggcttgggacgagctgggacccaaggtcgggttgccagttcggtctgaatcatcataggccttgggttaaggcaggttcgtgtgggttcacggccttgattaataatattgtatagcactaggatcgtgtttacaaagtagctttgagcaactaagtgacttttaatgctgtttactgcaaaccctaacccccttgacggagcgtggggctcctcaccgggagacctcgcaggcccccctttgccggttcggccgggagcgctaagtgaggttcttcgccctcgatctgaggaacgtcagcgagagaggaagtgcacaagacacgggcgacgtagacaggttcgggccgctgagaagcgtaacaccctactcctgtgctctggtggatctgtgtgtgaaggaatacagagagctggagagccagagagagttcaggctctagaacccccttttctctcctccctttcttctaggcctgggcctcctttttatctggtcaggggtcaccacatgggcctctagctgcctaggaaaggaaacatgctttttacaatgagggctagtctacagccggaagcgacctctgacaagcagagcacacgcctcctgccccgctcgccagctttaccggtggacgcccatttcaaccttcattcaatggccagcgacttccttgccatgcttgcgccgaagcctggactggatctgaccgggactgacataccaactccaggagttagcacgccggctccggctagggacgagtgccaggaagctctcatcattccgacgggacgaggcgaggcgtgtgacaggccgcctgttgccacctaacccgtgatctgaccggtctgtgactggtcacacgccgcgaccggtcacggaccggataagcgtgcgctgcgcggcattaaatgctgcgtggcgcgctcgtccaacccgctataaatgcggttaggtgagccccgctgtgctcacctaacccacacacgtggcgccaaaaccatagggggtcgg

SEQ ID NO: 23409 - DNA, 2613 bp, Oryza sativa
tggttgatatagaagttgaattcaaatggatgaatgggaggatcaagtactggatgaaccgatcgaaactagggatctgaattgtattcctcatgaagttatcatttaatttcttcagaagtttaggacggtttttggaaccttgaggttgagacatcatttttagagacatcatactctaaggctgataatgtatcactttaatatggagataaatctcgtaagggtaaaaattggacatatatgaaatttgtaaaagtaaaaaagttgattatataccaaatctccatgcgtttcccctctttctacacattttgataaagatacctaatctagacttatcacttgctactcttttcccttctcgtcactactgaaaaacgatttttctgtacagcgacccatttagattgtagatggaccataactggtcgcgtctaggaaaataagctcattttcacgtgtggtccatttaagaggaccgcaagaaaaaatcgatttttctgtgcagtcctcttaaatggaccgcacgcgaaaatatgcatttttgcgtgtggacctattaagagtgccgcatgcaaaaatacccactccctcttttccctcttacccactttaaattttcccctctatctctcctctcctctctatctctttttcttctatcagtcaacaatagtggcctcactcatctgtgccctctcctctccttccgatggcagcggcaggcgtaggtgacggcggcggcacggcggcggtggaggcgtgggatccggcgggcggcggccaacccccgcatggatccggcggcaggccgccctcgccccccccctgcgggatccgcctcccctcccctccccttccttccctccccagattcggcgaaggggaggggcgttagtggtggtgcaaccagaagggagcacagatccggcggagcgcagcgcggaggccgctgccaacgagggcatgagcggtgtcctcgagcgacgacggcaatgacaaggaggaggaggaggccgcaccgctgccggaggattatggggttttcatttttttttgaaattttgtttttttcagatttttgtttttccgtgtaggcgacataagcacccgcacgcgaaaatctgattttcgcgtgctggtgcgccacccgcacgccaaaatcgcgattttttgcagaccctgggtgctggtgggctgctcacccgcacgcgaaaaccggttttgaccgcacacgaaaatctttctcgtagtagtgcgttttcgaacagtttttacatagatctagtgcaacaaggaacaatttcacccattaatatccaaaaggaaatgcctttgcagtaacaaatgggaatatttacgttgcctggggtctctataatatatgtgtcgatcaggatattgcctttacaaaggtttcattctgccgcgaaaacacttttattgcaacataaactccattgtgtgaagtcaaacaagaaattaaactataatcccagaaattctctatgaagtaggcaagagaataattgaattgatcttgggtgccttaaagtggacacaagatttgctgtaaatcttttaagtggcttcaataagttaaattactcaatcgtggttacaccactatgtagtggtggcacaaactatatgtacagtgcaagcggtactatctcaaaagtttcagtacaaagtatttggagcttatttaaaggggttaaaaggtaaagtgagaacattttcttgttactaattcctttggattaacctttaactactgtaccgacaaatccaacttttgaactacacgaacctataaaagaggacatggatttttaccgtcgtctgccatttgactattcaaaatattgagacttagagtattgagatcaagacaataaaggagtatccaaatttgattgtgtgcctcttatttctattgaaggataaatgaattgtccgtcttttctcattacctcaaaagcttatatggtcagcctatattgtcaaatatgaaacagtaggttggacttgcaatactccgtattaaggaggcataagcaaggtgatggaaaaggcagcctacctacgaaagaaatgtctcgatcgaaagcaagtcagaagccaaaaactgaagccaatctcttttatcggttcaataattgcttggaccacatgaaattccccggatacttacacaagtcgaactattttccacgaaattcttgcaagcacttacttgagcaagcaaaaaagactagctattagcccatatcggcgatagtgaactccactgctcaaaacaaatgatccaaacaagccctgaaagctccttttccccaaggcaacagctaactgaaccagcaaaatctgtctgcctctgaaagaaacaaaacaaagagaaaaaaaaaaaccctttccctcccttctcacggcactggccaacttgcaagttgcaactgatgtgaagcactcactgagactccaagcacctatatgcaggtagctctcagcacgcttgagttggtgatgccttgattcccactgttttgtccgtcaaatactactgcgacgacgacgacgatgacgatgacgatgacgatgacgatg

SEQ ID NO: 23410 - DNA, 2033 bp, Oryza sativa
tgaatgaatcagggttccagtctaaagcaaactacataacaaagataaggtttttgtaagccaaaataaaaggatgtctttgctatttgttccacaaggatgagtatgataaaagcagcttttctttacctactggcttggctactggttcctccaacaaaaagggagaataaaaagaaaaggactcgtagcatagcactatagcagtgctccctcatttgaagttacttaatttagttcattattagctgttgttcctttgcctttgttgattgatgactttttacagacaagtgacagcaattggaaattgacaaccagcaaagtcacactgatttttttttatatagcagctactaccgacaagcaaccaatttttccattgcttttggagtacaactactagtgtcaggatagaaatgtttttcattagtattttttataactagtgctagtgatctgtcaaggatgaaaaggatgcaatccttcaaaaaaaaaaaagataagtagtgcagtcctgaaaagaaaaggaggtagagttgagcaactaaatgactaatcatttgtccaacaggcaaaatgatgagaattaactgagtgcttcaaatttctgaaatcttgggcttttctaaacacaattaaatttctgaaatcctcggcttttctaaacacaattgcaactttcaaagattcacctgcaactctctgtaagtaccactgttgacactgtatgcctaatatcctgtaatcagcaatcacattacaaaaacatgtgaaagtactcaaatattaagtaggtgctatgttcatccagacgacgatgtgaggtagcttatcctttgatgtatttcaattacgaacactgaactgccaacaacaaaaaataactagtattacactgcattataagttcagattccttagaatccaattacattgttgtgcgaatttcattgagctatggattttgggaagacagaagatagaacgaataataagcaaaaggataagcagtgcctttcctaaggcaacgaaacatttcgacattgaaacaattctatggctggccatgatcttcaggttgctgatcctggcgttcaccttgccaagcccaaacaatgtccttaagagctggtttcatgtcctccttccacaaatgttggtattctagtgtatctccattgttcttcttgatttctaccaaatgaaatgaaggagtcacctcgaagatctctgcatcgattgccaatacacctttccttccttcacttgcaccttccattttcagcacaccaccttctttctttttcactgtcaacttcgaacatgaggcaacatcctctagttttgagataatagctgaagctgattgacttgatgtaaaccttgcttctttctttttatcagtctcctcaaacaagccagaaagatcaaagccttccgaaagagaaataatatcgaaagcgttaaggttggttagctttcctgcatcctgtttctcctcagtctttttgctactactgctacccatggaggagaaaacaacattaacatcagcaagagctgtaactggttcatttgtctccacgttcttaaggattagcttgctatcaagtcctttcttgaaccagtaagtttccattatttttgtaattggcattctacttcttgggtttggatcaagaattctcgaaactaattttcgtacatcagacgaaaaccaagctgggcatttgaactctgctttcccaatctttctgtacatctccatcaaatttgaatcttgaaaaggcagataaccagccatcagaacaaacaggatcacaccacaagaccatgtgtcaaccttgacaccgtcatacccttttcggctgatcacctcaggcgccacatatgcgggagttccacaagttgtgtgtagaaggccatcttgtcgtcttgattcagcaagagcgctcaatccaaaatcggtaattttcaggtttccattttcatcaacaagtaggttctctggcttcagatcgcgatgataa

SEQ ID NO: 23411 - DNA, 755 bp, Oryza sativa
ccgccgttgttgggcgtctacgtcttcaccgaccggcttgccttcgccgccgccgactggtgtttccgcctgcacggctggcctttatgccgccgtagttgggcgtctacgtcttcaccgaccggcttgccttcgtcgccgccgactggtgtcctcgcctgcacggctggcctattatgccgccgttgttgggcgcctacgtcttcaccgaccggctcgccttcgccgccgccgactggtgtcctcgcctgcacggctggcctttatgccgccgttgttgggcgtctacgtcttcaccgaccggcttgccttcgccgctaccgattggtgcttccgcctgcacggcagacttattatgctgccgttgttgggcgtctacgtcttcaccgaccggccgccgcatccgctgactggtgtcaccgcctgcacggctggcctgttataacgccaactgatgctaccttcttcacggctggctacatcgctgtcactactaataggcatcagtatcgtcaacacaagctgcctacgtttgccatggctgccgactgatttcttcacttccatggctgcatgattctgccagtgttgattggcctattatgccgctgttgttgggcatctacatcttcatcgccggtcgtctcgtctgctgctgactagtgcccttacctctacgtctggtttatacagctaccactactgatggacatcatcatcttccgtcgccgactgattatgctgccgccgattgg

SEQ ID NO: 23412 - DNA, 4006 bp, Oryza sativa
tggatgaacttccaagccccagaacagcaagccatgcaaaccatcacagattggtggagtgagctctgtaattccatacctttgttgatgatgtggtggaacatatggctggtacacaatagaattttccaacaattgttgaagaatggattctaagtcgcttttctagtgaaggaaaaaattagcctaatagtcaaggatctgtctgtttcatgatctttcaatcaatcgctctctttttttatgtaaatcaatcctcatatcttccctagatgtttttttccttttaacagacatatgtaaggctctggtttactacttcttttctcgttctaatatatccggcaaatcttctacagtttgaagtataaaaaaagaaatagtttgaatattacacccttcattttattctattcaatcaaataaaagaataaaataataaagataggagccgagactccaataaatataacatcagataggagttcagactccaataaatataacatcaatattgttgtcaagacaaccgaatatgcacaatgtgttgaactttcaaattgacagttcactttcaaattgacagttcaaattattgaaaaacttatgcaattcaactcgcttccttttcttgtctcactattaagttaagataatttcaaggttgcagcaaccgctactaaaattaatgcaaaacaacttagtcagtctacagtggcagatatgatcaaggggaaaagaggattttaatggcgtaccgtcaaaggaattatttgtgcagtggttcaatgaagaaagctcccacctttcttgtttcctgtacaatacagaacaatacagagtattaaaaacctttataaagttgctggacataggaataacaatattatgctaatgctaaaaagatcagctgaaaatgcagcataataagaagtgtaaccaacaatgaaaaaagggtttttaatagcatataaaatgaaaacggcttcaaatattgttcaacaacacagggcactaaacaattatgaaatttatgttatcatatgaaaaaaataagagtaattaaaatattaattcaaatacgtaccagatacaaaaggaaaggataattggaatgtattatgaaagtcaaatagaacctcaagcaaaactgcaaggaagttaattagagcgattagtctatgaagattagtctatgaaaatcagaattggtgagagagagacgaagacatttagcgagcgagcaacaacaccgagcatgtcattatatagcagcaatcaccggcatcggcatgtgcatctttcacatgcacatgaacatgggaagaggaagagtaagaggcaaagtaaataagtgtgtgactgttagcggaaattaaagaggattattcgtgtagttgggctagcgagctcgtcgcttgcgtgaggggaggagaagcggcacagtacggctagagcgcgcgggggaatggggaggcagcgctgtggggcgaggagaagcgaacgcagctgagcttgtgggcccgctgatggcatgcgcggcggatggggaaggagaagcgagcgctttgcctggaggtcccacggctgctgcgtgccagagatgcggaggtgaagcgcgagcagcggcaggaggagaagcgagtggatgtgtgatgcgacagtgatcctttttttttttgacttcaaagagggaattttattgattacggaagagatgattacattcttggtctatcaagtctaagattcctgcgggagcacacaacttctactccacacacgatctagacctcatagccatttgagctaaagcatgagcaatcctatttgcttccctcttgatcttgcaaacctgcacactttagagacactgcatcatccctctcgcttcctttattgtcgctgccaagggtgatctcgacagctcctgttgtgacagagccttgaacacctctacgctgtcagtttccaagattcttggcatatgaatccattccatggctgcccttaatccttctagacatgccaatgcctcagcttggacagcagtagcacaggatttttttgcacagcaaacagcactaaacccctgcagtctctaatgatgattccagcagctgaaactcctgtgtcttctataaaaccagcatccacatttacctttgctgaaccttcgggaagggcgtgccatttatcaacctgattggttgtctgaacctgcagtaatttcaccattggttcattatacattaatccttttcctttgatgtcatcgctttgttgtcggatcggcaacagtaccttctcatagttgacgaggaaatttacagactctgcaattgtggccgtcccctttccatggatcatatcattcctgaggaaccatgctctccacaacaagtacaaaacacgcgccttgtctgaactattcaagctatccaacaggacaaggagccagtcaggcccagtcatagcaaacttcctttccggcggtagcgcccagaactctctgatggcttctcgcaacgatctcgccattgtacattcaacagtcgcatggaaaccattttcctcctttacaccacagatagggcagatgcctactggttgtatccttctttttcgtttattctcccaagtgggcagcctgtcgtgagcaagtttccatgcaaaaatcttaacttttggttgaacgtctgccttccacacattctcccagagcttcctttcaccattggtagcagtacttgatgcggcctgaacttgagcactcttagttaagttccatgctactccctccgtttcacaatgtaagtcattctagcatttcctatattcatattgatgttaatgaatctagacatatatatctatctaaattcattaacatcaatatgaatgtggaaaatgctagaatgacttatattgtgaaacggaggaagtagcttataggcgcttcttactgaaaaaaggcctgttttctcatagtgccatgcaggaaagtgagatgtctcctggtttggcacatggatctttagaatagcatttgcatcttcctccgtcgcaacatgtctgattaatgcctcattccaggcgtttgttccagggatcaaaagctcatgtacatacgtgagcctattccaattcttcttctgtataacctcaactttctcaccatgcgccacccatctattcctccaaatcttggtagtccgcctgtctcctatcctccaaatcagtcctttctttagcaattccagcccatgttcgattcctttccaagttggtgaagtattggacgggaaagctgtatcagtaagggagccattggggtaatactttgctttcagcaaccgagcgcacaagctattcggctccgcgatcaacctccatgcttgacgtgctaataaagcctgattgaaagaccgagtatcccgaaagcccaggccaccatgaagcttagggctcgtgagcttttcccaggatatccaatgtactttcctctcccctttgtcatgtccccaccaaaaattgcgaaccatctattcataatcattacaaaaatgttcaggcatcttaaacactcctatcgtgtaggtggggagagcttgagctacactctttatcagagtatccttccctgcagctgatagaaacctctcacaccaatctgttaatctcttagaaaatcttcccttgattggttggaattgttctgatttcatcctaccttcgggagttggaaggcctaggtatttatcttcaaaacctgctctttgaatctgcagaacagctttgatctcctcctgcctctcctatgagcaaaattcactaaacaacagagaacactttgctgggttaataagctgccctgtgcttttctcgtatagactgagcgcctccagcaaattctcgcttgatcaacctcggcttgaaaaaacaataagctatcgtcagcaaaaagtaagtgggagatccccggggctccccgacacaccttaat

SEQ ID NO: 23413 - DNA, 516 bp, Oryza sativa
atagccaggcaaatatattatccaaaccagagtaatccaagaggtcgaatgtactgatgcagccttgaacgatgccgacgtagacgatacaattgcctgggccgacggaacattggactgatcccttcgccggagatcgaagacgatgcagccccatgtcgggtgccaagttccgccggaacgtaaaaacaaaagtagaagtaaaagggtggcgatgcgccgaattgtattgatcgtgaagatagtttacaatgaccccgggtgtacatatttatacctatgggtagatactagtccttgtaggacaagaaagaaactttcctaaagataaaaggaaacttacaaactattcctaattaatagataacttgccatgccgcattcttttgaactcggtctcttctggataaacttcatttagtagatcaatttccttaaccgaatatagcaagaatccgacaactgacgacttgacaactctcatcggctaatctcagacttcaaagccgatgctga

SEQ ID NO: 23414 - DNA, 9667 bp, Oryza sativa
gtggatcccccctgttttcaccctctccctcatcgtcgtcgctgtactcggcccgctctatctagctagttccactagcgggaaggatggggtcgctagatctggaggcctaggcctccccgttggccgatgtgacagcggtactgggcagcagtggaggcgactgcaaccagcggtgttggaggcgacaacaactggcgacggtggagagagaagggaggagggagaagagtgggagagagatagaaagaggagggaatcagagggaccgagggaggagggagagactcgagggagtttggtgggcagtaggtgtggtgggctgtggattttaatagcgtcaaaatttgtttcgcagcggtgccctttacttaccgctaacaaaacccgattttcgcagaggcctgcctcgaaaaatagagttggttttttatagcggacctcctaattgtccatcagcgaaaatccgttttcactggtgatttgtgatccaaaataatctaatatatttttacaagcatttgtttcgttattccgccggcaaaaataaaagggtaacgccatgaaaaattatttttatagtagtggccatctcgatattacattatattgtcgaggaggactgcaagaggcgaaggctggagagcacgagcacctgttggagattggggttgcaaccaggaagttagatggggaggggagggaagatgatcgagggaaggtagaagaaacctgctcagagattcgtgctggacgcgtgtgaaatccttccgaaggagtgaaggacgaaagtcctctgtaattttcttcagctcgagggccagtcaagcaaatcaaggcatcatttctagaggatgctacgtccggaccatagaattttaattgaaacattccttttcttcttttttttttttttgcctacagcaattttcgtgtttggttacttttcttttaggaataacttgggccaaacatttgaagtataagagattatctggttcacagaatcacagccaaacgttaactcactttaccgcgtcacaaatagtcacgtttaataaacttcgctgcctatttggttgaggtcacactggagtataacatgattctttctcttccatctatattgtttgattgcatgctcactcgagattattcttcttaatgaaataaaggacatgaactttaattaaggagctgtgttgtattgtagccctttcatgcaaccatttgggcccacacggccatagtgaacgggcaaagggagggtaaggtggacacacgcagctggtgggaaaaactcaaaaactgttcttcaccgtcacaaatttgtttggcacaagagcataattgtggagattatgggtaccccatacccacacggcatggttatccgactagtcataggggatagcttatatctatggaatatgtaaccgatcatgacttgggtattacgtttccttttatattatgaagcggcctaaagtcctgatttgataatattgtaaaatagatttaggaaaccgataccgtattggttaaggtttctatcttgtaatcctgccccccatcctatataaggtgggcaggaggccctctagggggcatgagacaacctgatcgtcagatcaatacacactcggcggattcaaatccccaaacaggagtagggtattacctctcatcgagagggcctgaacctgtctaaatcctttgtctctgcatccatccacttttaggtctcgtgcgctacccccttttattattgccgaattcatgtttcgacagttggcgcgccaggtaggggttgcgtcgagtttcctatcaacgagcgcgatggaatcaatctcatgagtcgccgacttcgctttcgctttgggagttttcacttcctttccgtcgaccacttcttcaagctcctcttctctgacttgatccaaatcagtcagggggaaactcaatctgatttttatcattatttatcatattgatttttaatctcagattaatttcttgctattttttgttgttgttcgcatataactacgcggcactattgaggcgattgatgctggtcatggactcgaggcgtctcagctttccggtcgatcggccgcgagtccactccaccggcttgtcctcgccaccgccattgctgatagcaacaacgtcttcaccgaccggctggccttcgccgccgccgactggtgtttccgcctgcacggctggtctattatgccgccgctgttgggcgtctacgacttcaccaccggcctgcctccgtcgccgccgactggtgtcctcgcctatacggtcggttggtcacaccaccgttgatgggcatcgtcatctacaccgccggcctgcctccgtcgccgccgactggtgtcctcgcctatacggtcggttggtcacaccaccgttgatgggcatcgtcatctacaccgccggcctgcctccgtcgccgccgactggtgtccccgcctacacagtcggttggtcacaccaccgttgatgggcatcatcatctacaccgccggcctgcctccgtcgccgccgagtggtgcctccgcctacacggctggcctattatgccgccgctgttgggcgtctacgacttcaccgccggcctgcctccgtcgccgccgagtggtgcctccgcctacacggctggcctattatgccgccgctgtggggcgtctacgacttcaccgccggcctgcctccgtcgccgccgattggtgcctccgcctacacggtgtttccgcctgcacggctggcctattatgccgccgttgttggatgtctacatcttcaccgttggctcaccttcgttgccgtcgactggtgtttccgcttacacggctggcctattatgccgccgttagtgggcatcttcgctttcaccgtcgaccgccttcgtcgccgccgactggtgtcttcattgttattgatggacgactttgttcccacattggccacttctgccatcaccaaggggaatattacaaagctaagtcatcatttattttattctttatatgatatttttccttttcctctgcctcactacaccaattggtcttccattgagtagtgagtcgggggctacagatgttatatcatattttttataatatttatcttgattgcttgcgacataatctgagtacaaaagtacctatcgagttatggagttctatcttcctatgctttccgtttggtttgccaatggatggttgcctttgggccgattcctagcacccgggggctcgttggatggaccgagtagcgcaaggtgctaagtattattcggaataaatcaaaagcatagagatgagataaatttattttctgctcttaataattgcaaaagtacccgagtagtaaactccgatccgtgaaactttgttccattaatgacgaactcatgtcactcatatgcatgtttgggaagtgcttaggccgactcccagtgcttggtggctatgactagttgggcagagcgtttaaacgtaatgagtcatctgctcggggaaatcaaaattgacaagaggagaaatacatatttataaatattttaaaatacttgattttttctcgagtattatatttatatcagatactactcatcctatatgtttgttttgcaggatccagatccggatatgcataaaagggattcatggctttcagcttatctcttacgctccaggaatggatcagtcagaacatcaccgaccggcttgccttcgccgccgccgactggtgtttccgcctgcacggctggcctttatgccgccgttgttgggcgtctacgtcttcaccgaccggcttgccttcgccgctgccgactggtgtttccgcctgcacagctggcctattatgccgccgttgttgggcgtctacgtcttcaccgaccggccgccgcatccgctgactggtgtcaccgcctgcacggctggcctgttataacgccaactgatgctaccttcttcacggctggctacatcgctgtcactactaataggcatcagtatcgtcaacacaagctgcctacgtttgccatggctgccgactgatttcttcacttccatggctgcatgattctgccagtgttgattggcctattatgccgctgttgttgggcatctacatcttcatcgccggtcgtctcgtctgctgctgactagtgcccttacctctacgtctggtttatacagctaccactactgatggacatcatcatcttccgtcgccgactgattatgctgccgccgattggtgcttttatcttcacaactacgcgtcttcactaccggatttctacttggacaccttcaacacatatcttcaatcaagcaatgactactcgacgacaagaagctataattctcgactctatgttcagttgtttctcaactaaccaaagagtcgggggctacacaaatataaggctcaaaatcaattaatcagccaatgagtcaactccaggagtcattatcttcatctttgcttcggagcagatgttctacttcagcaacttcaattatttcaccgacaattttggcttctcagcgctgccataatctactccaaaattctcaagtatcaagttcaagatttaatctacatgttcggaagtttggagttatcaaccaatcagctcggtttagacgagttggacaacaacatctactttcctccaagtgaagcatctacaacagctgtaacactaagttctacagtcatcttcgtaaatcaagaagcattgcattagttttctttatgcacacgctcacatcaaggaaacttctcaagcttcgatatcttctcaatggtttgatggattgttgtcactggcattatcaccagcacgtttacttcatcggccctgacgtctccgccgttgctaaggggtgactacgtcctcaccgtcggttacttttgtcatcaccgactttcatcgccgacttgttatttcgtcttcacggttggcctactatgcaactgccgatagaggatctcatcgttatcatggactgctacactactattgactagatcaacgacatggttatcttcatcaaacatcctgtcaagtctcttcaacatagcctactctgctgtcgttgatgggcaacttcgtcatcatagccggctatctctgttgccgctaatcatcattaccgtcggatgcgtttgccattgccgactattttcttcatcttcataattggtggatttcgccatcaccgttgatgcgcgtctacgtcttcatcgttggtttgcttttgtcaccaccgactgttctttcgttgttgttgggcgcctacatcttcactgctagctgacctgactgttgccgactggtttcttcacctccatggttatgcaacttcattacatttgattggtggcatctttactaccactgacatcttccgttacttctgatgagcaatttcgtcttcatgttggtcatttcatctccatgccgactgcgtcagttattgccaatagacaattttgactatgacagaaggacaagctatatgctcaggggctcatcaactcaagcgtgaggattatatctccaatttggacttgttccggatacattccacatggattcatagtcatgagtctattttctatgctcaaagactggaccaattattattccccgtaagggctatcaaccgaatacttgcgccagtcgggattcaattattatatttattttggagtatcccataagggataatcattcagatcagaagctattcatatgagctacacttggtctatattacccggaagatttattactcgggagcatgttacatgcgtcatcctttaaatggtgtcgaaggcatattttttggcctaggcctaatatgtctgcagcccatattttcaggtgtggcctgtcacgttcttttagggacttaggcacttttcgcttaggccaaagtgcgcgtaatcaagtgcccaataccttaaaatccttttataccgcagttactcaactttttaggagttggtacaatgcatcttaaaaggtgtcaaacagtaaagctttatatagctggcccgctgacttttttatatagtcatggtgctgtttgggtttttaagcaattgattggatacaatatcattgctttttgccacgtaagtgtgcatttttattgaccaatattatggcttaggctgattatatattgtggtcatttttcaggcggttggtaaatcctttatgagtttatttactcggattttataccacatatgccatatatttccaggtgtggtgggaccatgtgtcttctagggacttaagcacatctgttaaagcagtgtgcgcatggcgtatgcccaatactttggaaatttctttattcacaacatacaagcttctttatagctattttgctatgtgaattttcaatgatgtagtcagctttaggttgcacgcatcatattttacaaagcagtcggtatatcactcggatcatgttattcagggattcacaccgcatatgctatatattaatattaagtcacttgtttgactacgattatcaaaaccactcagttggtgcatctattaggtacatctactcgatgcacctgactttatttttcagccctccacagtcttcatatttggtaaaagtactcgggagatcatggcgaggatgattgaagcactcggctttggagtaatctagttcgagagaagattatctttccgactgtgaaggtctcaggggctactgtggagattatgggtaccccatacccacacggcatggttatccgactagtcataggggatagcttatatctatggaatatgtaaccgatcatgacttgggtattacgtttccttttatattatgaagcggcctaaagtcctgatttgataatattgtaaaatagatttaggaaaccgataccgtatgggttaaggtttctatcttgtaatcctgccccccatcctatataaggtgggcaggaggccctctagggggcatgagacaacctgatcgtcagatcaatacacactcggcggattcaaatccccaaacaggagtagggtattacctctcatcgagagggcctgaacctgtctaaatcctttgtctctgcatccatccacttttaggtctcgtgcgctaccccttttattattgccgaattcatgtttcgacaataatcattaaaacagcatcaacaaaaagatctaattatcacgagatttcttcagtacgagctttgatcatttggaaaggcaaagcaaggggtccatggccacgaactcctgttcggaaaaggaaaagaccaggatgcatagcatagcagtgagagagtacaattaatgatcgatagcaaaaggacgatgcgacgctacatgaaaaccaaaaaaccacaccagcacacacatgcatcaatcggcattattgacgagtgaggaccccgggcatgtaatcgtcccgtcctctgtggagtgtggatccagcatattgattccagattcagattcagctatgcaccgaatcgaaacgacgttggttgtagcgtgctgcgtgcatcgtcactgtatggtggtggttggtccaggtacgctcgctcgagattggagaaccaaccgggcgggccagacggcggtggggccgcgcgcgcgggggccatctccccgtcgcttttgccgtaaaatccaccgtcccgtccccgtcccgcagagctgggccaccggtcgactactcatacatgtcgctgtgtcgactgctcgtttgctacttacgccgagcggcgcgtgcccccgccatgtgacggttttggagcatgtactgtacaaactagtagcacaagccagcggcagtggagttctcccgtggccagacagcgcgcaccgcagagtattacaagtggcgcgctagatgctgcatgctgtctgctgctcggccgtttcctccttcctgcaacgatcgatccagatccggtccacgggtagcaccgtgcggtgtctcgctgcttgttctggggcttgcacaccaacgttacaccgcacttgtacctttgggttacgtggcaattaattatctgtcattcgttgtctatgatatatgggtccagtggtaaataatttaattattctttgggttaattattctttgagttcggggtatctcacagcttgtagcttctggggcttgcacatgcgcttggtttctttcttttttcgtcgatttgtaatatacgtttgttgagcctatagatgttctgggatattgtttgatttcgtcgattttactgcaccgattggttttccactcaaactggtttgccatctttgttctcacgttttcatcggtttccaaatttctgctcaaacaggttttcattggaaacagatcaaaattctgttgcttttttgctcaaaaccggatgttgggattcttttttctttttttttggacgaggattaggattcaaatttcgatttgggaatatttattggttcaagaatttcattattttgctgatgcacgtatccttcaaatggtactgatgtacgttcactttatcaggaaattggaatggatgagaaaggcggaactaggctctgttctgcttttattatctccatcagcaacaattcaagaagataattaacggtaatcttcctaaacaactaaaggaaggcctccacagggaattgaatctgtggttagcgtcatctcgctagaagagaaggacgaggtaaaaaaaacacataacatcaacatttaaattactaggatactgaactgtattataaagtactgatgtataaatcatttaacctccattgtgtcatagaaatatcaggcaagatcaaaaattggtgacaaaaccttgctacgctacagaaacctgagcttgtgaaaatagccgaacaaatataacgatgctctctctctctaaaaaaaatgatgctgtatgcaaaaatagttgtttccgaaggtatgcaaaaattgtattatccaagtctaatagagcttcagttggcaaaatgcagggcggtgaacaacaccatcctagttcaatttataggctgcttgagtcccttccatagatgaaccgcctgccccaatcagatactaccagcatcctggtgcgccagctgaattgcttactgcattccataagagcaaaacgccattaaaaactctacacgacacgtccatacatgcgagggaagatgaagtgcagaaaggaagacaagcatgttcagtagggtggcattattaatacctggcatagacagaataccatagccattgggtgctgtgaccaacatgtatccaatcacccggcaattgagcggctgtttgctctccacccagtggagcaaactggccaaggtgcctgtacctgtaaatcataaagggcgaccattagggactgctgtattctggatgccatgcaaaagaaatctcgtgtatcagcaatatgtgacaagattggtaggcttttgtttggtttgctccaccaactttggtttggcaatgccaattgtttttagctaccaaccagttagatgactaatttattggtgttgtcgatttcttggcatagttgattggagtcataaacaaaaaaacgggggatc

SEQ ID NO: 23415 - DNA, 2242 bp, Oryza sativa
ttgctgggagcatcttaacttgcgagtccactcgagcaagggctttcttgaattcctctatgttcagctcttttgactccttaatagcattcccgtctgaatctttgagtaggtcatggaagtccttcatttggttagttttaaggtacaactcaacctgtgggtacctttcatagatgtcgccaagaacatttttaattttcttgacagtcaaagagccagaattgtccttgtctgctacccggaaaattgaagcaatatcttcctgaatatacatatcaacacaatccattaagaatgtcagaaattcataaacaaaagtagttgacaatacatgaaatttgtttgctaaacaattactagcatttatgttaagatggcattaacactacaacaggtagatgctagatcatgtcaatcttgcctttctcacaaaaagaatttgaagtaggaactgaaaacatcctccaaaaattttgaagttggttcagaaaggaacaccacggtgtaaatctttataactataatagtgatatgtttgagatggctaaacagcttcacacaaagttgcagtctttaaaccataataatttcagcatttgtaattttttatatttaatcatatgaacttattatcaaaacaaagacttagatataattaactggcaacttaacactgaaaagggctaattgctgtacataggccactatttgaaattcaattatgctagcttagtattctagagagcaggcgatgaaacatgttaaattataattataccataacatatcgagatgttcttgccaatgacaaaatatggtgcattctttacttgaacaaaaaatatggtatctttgcattgagaagtacacacataccataacttttctttgagttattgtcgcgcaatcaccgagagcatatacatcatcacatccatgaaccctgagccattcatcagtagctagcactcgtcggtttgcctataaattaaataagtgttttaaaaacataatttagtgtaatatgttgaaatgtattctcttatgagttctgtacgagatatacctgaccaacttgcttcatgaaatccattatgaggggacgggttccaataccagtggaccaaacagccatgccataaggcacagcaatctctccagttgcagaattagtcatagtgatagccttatcagacaccttcacaaccttaaaattcgtcttcaaatctatgcctgtcctcttgaatttatcttcagcaaattgggtaattctcttgtcaaacctgcatatatagaacattaaaacttttttttgcaaagaatatcataaaactgcatcaagaaacagaattttctgaaatttgaaggcctcctacatatgtaattatcaactaaaatgcttctgatcggtaaaactaaaagggtgaaggttcaaaattactaacataaaactaaaaatgtgaatattttgcaatggttcaacaagtacaacagatctcaaggtcttacattgtaaggatatgatctccagcttcaattactgaaatattcgcatacttcttcacatcaggatacaactttgccaagtcctcattgacaaagtcatgaagctctgcagcaaattctacacctgttgggccaccaccaataacaacaaaatgaagattcttcttcctctcttcctcagttaggtttggaagggacgctctttcgaaacatttcaggacactcttcctaattttttgagcatcttctacttcctgacagaatgcacatgacgattcaattcaccatgcaaaatatgttgcaaaattgaacaacataatggatataacatactaaagaaaaagaagttatgacgaaagatggaacaaggatattctttgtttgacaaagaacaagtatatgtaaagatgtaaaagcaagtttgctgaaggtaattcagacattgaccaagagataagctgaaagagtcgtaactgataagatgataaaataaaaccgagttttgttacaacagttaatttctttcattaacctactgccttattagtactgacctttagaaaatggcagttttcaacaacaccaggggtattgaatgtattaggtctagctccaacactgacgaccaggtaatcataatctacaacaaattcactatttccatctgagtctgatctgcagtggatctttttgttagttggatcaatcttgtagcactctgcttcccaaaatc

SEQ ID NO: 23416 - DNA, 3041 bp, Oryza sativa
caccgccggaatcgagctcgcgccgtcgctccctctctccgccgtcgccgtcgagctccggtccgccgccgtcgtcgccccggaccacctcccacctcggcgccgcctccttcggcttcgccgcatcctcgccgacctcgtccacccctccgtttcgctcgtcgaccgccggagcaccgtcgaccccgtccacccgagccgcgccgccgccttcctccgctccggtcgccgtttccgtcgtcgccgtcgacccggggtgagccgtggaccgccgtttcgtttcccccttttccctcccctctctcggccgccgctccgccgtgcctatggccgccgccggcgaccataggggcgcaggcgcgccgcctcccgccggccgcaccgacgtggccgcctccgggcgcgcctagcggctgccgcgtggggcccggccgtcagccgcccgcgcccttaggtgcggctgacgcgtggggcccacggcgccggccggtgcgagcccgggtacgcccggtccaccgtggaccgtgaggctgccgcgtgggccccactcccgtggacccggtccgcgcgcccctcctctcggctgacgcaataaacctttttttttttaaattaaaatttaaatgaagaaattcgcaaatattcatttaaagagcatataaacttcaaatgaccataacttggccatttgaacacggaattggaccgttcaagtctctaatttttccttaagaagtcaagaacccatttttgtgctttgtttctgcttgttatatggagtttattagagtaaaagccttttctttttcgttggtcgtgtagacgctgcagcttcggaagatccgctcttcgtggaagttgaagtcgacgtttgggaaagcgagcaaggcaagtcacatcatccttgaacacattgaatcccagtttataaaattatattgatttaaattattgcattatcgctttatttaaattcccgcgttatcactgttttgtttagccatgcctatttgcctttgtatgaccttattattgttattgttattatttccttgttcaccctaggttaaagaaaaccccaactagttgacactctactcatggtaccactagtatgaatttaggtagatgcttcgctggttaattaggtaacattaggtggttttacaactctagatttcgggaatattctcatcacctggacactatggaatggatggattattcggaattggattcacacctccccctctattcaaaaccctcaaaatggttttaggctggactcggggtgcatggttttgatagtagcacctcggccatataaggaccggtcttcgggcctctgttgcaaagcactaccgtacttccacatatctagtgggtaaggcttagtttgtggctcagtctggttataaacaaaagtacacggatggagatggacgaagtcgggggtcgatggacatctctagggcaaatgaaggctacacgagctgcggcccggtagtcaagatgtcatggcacagggccagtgtcctgctgctaggggctcagtcctgcctacctgtcccggaggttccggccgtaggaggggttgggtcggtactctcgtctatggctaggttgggttggaaactatgtcacgtcttccgtccgtataccgtggtggtatgtggcacgtggttacacgtaagaaatgtcacatcctgatttttgtttcaggatttataaattatttaataaattattattagaatttatattaaatgtttattaattttcaagtgaagttaaatgtgggaaataaaatttcctaaatataaagcatggatggatttaatttttattaaattctccatggttaattatactctctggaatattctcggatttttcggagctcaattcctaattttaatcttacaaagagcatttcagtaattacccacatattaaattaatcattaaatggtctaattataattttgttaagtactttgagtgtccaagtattttcatgatttttcttgaaattatttgagcattggaagtatttttaacaattcaaagatcatttaagtgattattttaattgggaaagtaataaaatcctcctcctcagcttgggccattttcggcccattccttcctttccttcctctctcttccgccggcccaacctgtgccgcctcctctcctctcagcccagccggaaaagtctactttccctccctgagctactgttcatcttccagctcaggcagagcccgagccagccgtgccgtgcacagtgccgccgcctcctccttccaaatctcgcctccccgttgctcctttttccaatttagttgaggggaaatattcctcttatcctcctctatcttctttacccccaaaaatcggagctaatcgttgagtatcttatccgaatcgaactcgttttcgagtttatctccaaaaccgagtttttgatttcccggatcgatttcttgcgggaggagtccgatctcttcaatccaaggctataaataggaccccctagtcctcctctttcgtttgcccctctcccgtggtctcccgtgccccgtagcctctccgccgccgccgccaagttcgccgccgccgccggccgagctccatccgcgtcgcgccgccgactccgtcgtcgccgccggtcgccgtcaccactgttaggtgcgcgggagggtggagaagcccgaccgcctgacccccgaagtcgccggtcaccggagccccgtcgccgccgtcaaccgaagccgcgccgccgctagacctcgtcgccggccgtcgtcgttcgtcgtttggttcgagggtgagtaccgttgggttcgtctcgtcgtcctctacgtgtacatgtcctccaaagtcgcagccgaccatccaatctccggcgaggtcgccatcttggtccggccattgatgaggtcatcatgacgtcatcatcgtttttctttttcctgtttttctaatagattaaatcttcggaaattcataactaaatcatcgtaactcggtttcga

SEQ ID NO: 23417 - DNA, 1184 bp, Oryza sativa
gattggttaattaattacttgccaactaaaacttgataatggtgggtcgtgagcacatggttttgagagtcgtgctcatggcaattaaggaccggttcgcgagctactgttgtgaaacattaaccgtgccaaccacaagccagcgtgggcaacggctttaccttttgtatagcatggttcattgcagagcaccagactaagaagtggcggagataagcccatgggggtcgctggggagtccatgccttgttttatatgggggtgattatgatccaggaatggtgcactgtggtgagttgtgttgtgcagagggtattgtcacagcctctattcgggtactttccagtatcgcgacgcatggtagacatgatgttgaggctgtgtcttgtgggtacagtggtacacctctggccagagtaaaactattcgaatagccgtgcccgtggttataggcgggttgagcaatgtttttcgtgattagtctcacacctctcacaatatttatggatgctataactggtaataatttgtttagctccttgtttggagttagatctgtacagccgggtatggttgttcaggatggttgggcctgtgcagcatgggtgtcctgttcagtgttgattaaaatttctgattaattactccactgttttacttctcttaaatattttgctaaatgctgcttttgcaaatgagcctatattatgccatcctttggtatccttgtgcacttgcatatttgctgtgtggcttattgagtatgtcatatgctcattcttgcaataatcaatcaacctcagttgaagaaaaaggatccagaaggagaagacgtttggcttataccccagttgagctgcctgtgggagtggagctgaagccatcactagaccgttattccgctgctgtttttcttttcttttgtaagtatgtaacgttattattatgatggatttgtatattaaattgtcagtttgtgtacctcggctgattcctggacgaggattttatgcacaaattagttcggaaattattagtgaatttccgggcgtgacaagaaagatgtgtcttgtgggtaaagatgtacacctctgatcagagtataacctattcgaatagccgcacccttggttatgggcaagcctagcaatgtacccagttagtgttttaattcttaaaacctg

SEQ ID NO: 23418 - DNA, 12627 bp, Oryza sativa
acccctcggggagacagagggaggggtggccacgtctccctcgggcccgaccccccgagggggtcaggccacgtgggtgaccgcggctacccaagcctctagtcacaatacccccgaccccatgtcaccgacagttgcccccggcgttacgccagggcgatcgcctccctcgagggaagcgctcgggcgtgacgccactccttaggcccggtgacaggtggggccggtccctacaggcgggcagaaacccagcggtcgcaaatcgcgcgcatcggcaagggaaaatcgaccgacaataatgagcggcctcttcaagaccgctacattactcgagcagcgcgcgaatcgggacgagccggttcgtttcgcctggagagatgatgatggcgtttttctcggttggcgagcgtagttaatgcgcgcacgatctgccccatctcaaccgccgcggccgcgcatctgccgtgggcaccgcaaacgggcgagtggggttagtggaggcgtgggcgcgagaaacgagggggcaaggtagtgggcgcgggaagcgaggagccgggcatagcgttggcaagggtgtaaagacgccgaggaagggattcgtttccttcctctcgccactcttccccttgccttcgccacttgcgctctaactcttcgtttcctgtgtcctacccttgccgtactcgctcgctctcaagctcctcctctgccggcgtcatggcacggggctccgcaccgctcgatggtagcgtgctgccgccttcccacatcgtgagcgagaggcaggccgggctgccgcgccgattcatgccggaatctgccaccggccgggaggtggtcgcgctgggcgagggacgcccggcgccagactacccggggcggtccgtcttcttcctctctttcgcaatggcggggctggtcccgccattctctatttttttcatggatattctggagttttatgatctccagatggcgcacctcacccccaacgcgataatgacgctggccatcttcgcgcacctgtgcgagatgtttattggggtgcgcccatctctccggctgttccggtggttcttcaccgtacagccggtgtcgccgccgacggtagtcggtggctgctacttccagccgcgggggcaggtgctgaaccgctacattccctgcgtcctccgcaaaaagtgggacgactggaagagcgattggttctacactcccctcgccgacgaagcgcgccttcgacttccgagccagcccctggcgcaggcctccagctggcgggcgacggtagatctgggagacggctacgacgccgttcttgaccgcctggcgggtctgtgatcccaggggctcacgggggccatggtgttcggcgactacctgaggacccaccaggggcgcaaatgggactgggaccctgaggacttcaggatggtggtccaacgggtgctgaatctcagctccgtggaggcatccctcatcccccaaggggtcctccccctctgctgcgatccagagcgcgccaacatcctgaccatcatgcaggaggtcggggcgtcgggggagcgggccccccgaggccacgacggcgcgggcgggagccgcaggggggaacaatctaccccgggagggggtcgtgcttctgggccccgcgacgggggcccggggggcagccgccctgccgacgcccgggggaagaggaagcaggagggtacccctcccccatctcctccccgagggggcggggcggtgcgtgccagcagctggcgcccggagggtgccgtgccgacgccgcagcccgagggggagcgaaagaagaaacggctccgcaagatgggggggaccgagccatgccgggggaacctcatctcgcccccgaggtggtcgtttagccgacctccctgcaggtccgtccccgcgcccaccgcggccgcattcattctcccatctcccaacgcgagttttcactcacccgtttctttttgtcttctggtttttcttctgcctcagcgagatcccgtcgcgcccccccccccccgccattctaagtccggccggtctgaggtcgaggagacggcgaccgcggaggcccggaggcgggaagctgaccggcgagaagccgcggaccgcctccgggaagccgaggaggctgcccaggaggccgtcctaccatcgccgaggaggctgcccaggaggccgccctaccatcgccgagctgcagggcgcactggactcgtccgccggggaggtcgaggccctccgcttggcgagcgaggtagggcccggcatgcttcgggatgccgtctcccgtctagaccgtgccgggcggcaggcgggcctctggggcgggcggtacgggaagtacgccgccaaccaggggggcctcgcccagcgcctctcagagatggccgggaccctcaagcggctccccgagaagctcgaggagacgatcaagtcatcctcgagggacctcgcccggggggcggtggagctcgtactggcaagttaccaggccagggaccctgacttctccccgtgggcagcgctggaagagttccctcctggaaccgaggacggcgcgcgcgcgcaggtccgggacgccgccgaccacatcgtccacagcttcgagggtacggcccctcggctcgcgttcgccctcgactctgacgaggagggcggtgacgacggtgcggacgacagcgacgacgaggccggcgacccgggcgcgtcggagtgagcccccaggcccccgccaatcttaataacttttccttcttcttccgaggccttcgggcccccttcttgtatagactgatttaatctgtaatcaagtaaagaggaaatttctgcgtcagttctgtttgttgtgtgtatgagacgaggatggtctgtgccgcggtccttctgtgttttggcttgaacaagggctcgtgcccaggtcccagcctcaaacggcgcgggtcggggctagtgcctggggagatccacatgtcgagactggccaggccgggagcgcggtgaccgagggttatggatgacccgattgtgggcctttgccgattcccccccggagttcaccacgccccggggcacggctcggttctgggccccgtttggcgattttagccggcccgggccaccgagggcagggtcgagcacgagcgtgctaattcaagccaagattcttcaaaaggaaaatgatggcacatacacagtcctcaggaaatcgaaaatgcttttattgaaatacggaagagaaaaaaggtaagtatatgcatgtggtagcccccggccaaccctgcacgcccgggggggtgcggggttggcccgagcccgagacatgacacccgacccccactaggggtagaagcgacgaaggtgttcgatgttccacgggttaggcagctctgtgccgtcgcccgtggccagccgaacggagcccggccgggggacgccgatcactcgatacggaccctcccacattggtgagagcttgctcagtccagcacgcgtttggacgcggcgtaggacgaggtcgtcgacgcagagtgatcaggcccggacgtggcgctgatggtagcgccgcaggctctgctggtagcgcgcggctcggagggctgcgcgccgtcttcgctcttccaaatagtcgaggtcgtctcggcgaagctgatcttgatcagcctcgcaatacatggtgacccgaggggacctcagggtgagctcagatgggaggaccgcctccgcgccgtagacgaggaagaaaggcgtttccccggttgctcggcttggcgtggttcggttcgcccagagcaccgctggcagctcctcgatccacgagtcgccgtgcttcttgaggatgttgtaggttttggttttgaggcccttgaggatttccgcgttggcgcgctccacttggccatttcttctggggtgggcgggggaggcgaagcagagcttgatgcccatgtcttcgcagtagtcaccgaagagctcactagtgaactgggtgccgttatccgtaatgatacggttaggcaccccaaaccgagcagtgatgcccctgatgaatttaagcgcggagtgcttatcgatcttgatgacctgataagcctcgggctacttagtgaacttgtcgacagcgacataaagatactcgaacccgcccggggcccgcctgaacggatccaggatatcgagcccccagacagcaaacggccacgaaagaggtatggtctgcagggcctgggccgactgatgggtttgcctggcgtggaactggcacgccctgcaccgtcggaccaggtcgaccgcatcgttgagagccgtcggccaatagaaaccctggcgaaaggccttgccaaccaaggtgcgtgaggcggagtgggctccgcactcgccttcatggacatcggcgagaagctcgacgccttgttcccgaggaatgcacttcaggaggactccgttagccgcgcgccgatagagggtcccttccaccagcacgtagcgcttggagatgtgccggacgcgttcactcccttcgcggtcctcgggtaaagtcttatctgcgaggtacgcctggatctcagtgatccaagcaatcaatctaggggagctgggagcgctcccctcgggccccgaggcctggactccgacgggcctcgggggccgttcaggcgcgtccgtctcccctagggggtcgggtcgcgccgacggatgggcaagcctttcttcaaaggcgcccggtggggtctgggctcgcgaggaagcgagccttgacagttcgtcggcggccgcgttatcccgtctgggcacgtgccgaagctctatcccgtcgaaatggcgctccatacgccgcacctggcgcacgtaagcgtccatctgcgggtcagagcaccggtactccttacagacctggttaacgagcaactgcgagtcgcctaacactaggaggcggcggatccccagtccagctgctactctgagtcctgcaaggagtccctcgtactctgccatattgttggtcgcccgaaagtcgaggcggaccaggtatctgaggacgtctccgctcggcgaggtcaacgtgacccccgcaccggcgccctgaagagacatggagccgtcgaactgcatcacccagtaggcggtgtgaggcagctgcgaggggcccgagctggcctcgggggcggagacgggctcgggagctggggtccactccgccacaaagtcggcgagagcctggctcttgatcgcgtggcgtggttcaaagcgcaaatcgaattcagagagttcgattgcccatttcaccacccgtccagtaccctctcggttatgtaagatttggccgagggggtaagacgtaaccaccgtgacccgatgcgcctggaaataatggcgcaacttcctcaaagccatcagaatagcgtaaagcatcttctgggcctgagggtatcgggtcttggcgtcctggagggcctcgctaacgaagtagacgggccgctgcacctttcggtggggccgttactcttcgccaggggtcgcatctctagggcgctcttcgtccgagaggccgcgcggggcgccctcggcttctgtgccgacaacctcggggtcagagggcgacaggcgcggccttcccgcagtggccccgaggccatcctgggggtcgggggcgcctggcaccgtcggacaagcaagcggagggccaactcctgccgtcgggggccttgggccgccgttcggctcgggggcctctcctccctgctctctctcgggtcgagtcgacacagggtgaggatgcgcggagtgagggttgtcctcgtcgcgctctgtcacaccctgaaaattcaaaatatataaattgttgtttaaatggaatttttagaaataattttaaaagtcttgaaaagaaaatctaagtttaattaataaattccaatataaaattgggccagataaaatttcattaaatactttgcttaattctataattcctagatttttctgggatttatttgagctaaggaagtattttttaataaatggaattgcatttaagaaataatttaaattgaaaaagttttaaaaagtcttcttttggctttgggccgaaagtcggcccaaaaccgccttctctctcttctcggcccagtccggcccagtccgcagccgcccgcgcgcgcgcgcgccctcgcagccgctgacaggtgggtcccacctgtcaggcccgtcgtcttcctcgggccgaaaccctagtttcgcgccgccgagctgccgtcgccgccgctttccaatccggccgctcctttccgtttccggctgaattgatagaggggaaatgatcttcgggatctcctctaccttttctcctttggaaacttcggttaaatcggtttggaaatcgatggattcgagttcgaatcggatcggctttccctctctcctagccgcgagtttccttcgccgttgccgtcgccgtgggccttcgccgccgcctccgagcccctttaaaaggatccccgtgctcttctcttctcgccgccaccctcgccttcgcctctcgtcgccggagtagccctagcgccgtgtgccctagctttgccttcgccgccgccgctccagctgagcgccgccgtcgttccagccgtcgccgtcgctcgggaaggtcgccgtcgtcgtcgccaagtcgtcgccgtcctcgtccgctctttcgctgccgtcggagaccgccggagcatcgtcgccgtcgtcaagccgaagaccgccgccgtttcaacctcgtcgccgtcgccgtccgttggtcgtccgccgtcgctttggtcgtcggtgagttcgccgtgccgtccgctacccgttggtgtcctccgttcgtgccgtagcgccgccgttcgccggtgagcgtgcgccgctcgagtcgtctgcctcgccgagccgccgccgccgtcggtgacgtcattgctggcgtcatcaaggccgtccgccgtgaaccgccgtggacccgatcaatctcggccgtccgatttggattggatcaatctcggccgtccgttcgcgtgaaccgccgcccgtgcgccggtccaccaaaccctagcccgctgacgcaataaatccccttttccttttcaaaaataattcattattgcgtcataattcaattttaaaccgatttaagtgttttaatccgatttaatctttaaaaattcataactaattcatcttagctccgatttagttggttcaagtctctaaatttttctaaaattgagatctacacattaaaaatatccacatgtactgttcatgcttgtttatgtgctgttttggtgattttgcttctttttgcttagattccgtcgtttccggagagtccgttttcgcggaagaagagtttgaagagttccaaggctagcaaggcaagtcacacagatcccaaacaaccctttgagcatgttgatcctatttaaagctattgtttctattcaactattgcatctattttcgaatgtcattgggtggaattgacctattctttgttatggccctttcgtacttgattaccttattccttgataccttgggttatattaatttgactagttgagctttatttatattggttcaactagatattagatataattgcttagctctgcttagaaacattagtacacttatgggataactaatgactcactattatttcatgatggcttattgatagttcacgatggtcaatcgtgattagttaattaattaatgtgccaactaaaacctggtaatggtgggttgtgagcacatggttttgatggtcgtgctcatggcaattaaggaccggttcacgagtttcggttgtgaaacatttatcgtgccaaccacaagccagcatgggcaacggctttatcttttgtatagcatggttcattgcggggcaccagactgagaagtggcggagataagcccacgggggtcgctggggagtccatgccttgtttataagggggtgattatgatccaggaaggtgcgctgcagtggattgtgttatgcgaggggtattgtcacaactcctttccgagataccgtggtggtattgaggcacatggtgacatgatgtggggttgtgtcttgtgggtacagtggttcacctctggccagagtaaaactattcgaatagccgtgcccgcggttatgggcgggtctaacaatgtctttcgtgattagtctcacacctctcatcattataaaagatgctataactggtaataatttgattagctcctggtttggaatggtacattcctggtttggagatagaactgtgcagccggggtggttgttcagaatggttgggcctatacaacagggtatgttgtatagcgttggcttaatattgtttaattacttaactgttttatcaaattctcaaatgtttgctaaatgctgcttttgcaaatggaaccctattatgccatcctttgttatcctgtgcacttgcatatttgctgcgtggcttgctgagtatgtcatatactcaccttgcaatcattcatcagaggaagagttctacaatgaggctgatggtgtagaggattaggtgtagccttggtcaagctgcctgtggagtggagccgtctgcgccgtttatttaatttccgctgctagaactttattgattgagaggaactatctacctctgtaatgacattttattcgcttattaattagagtaatatttgtactctattatcaatttgttattgtgtgcctcggctgattcctggacgagggttcacacacatgtaagcgtttggaattttggatagaaattccgagcgtgacacgctccacgaccaacgccgcgctgaccacctgcggggttgccgccaggtagagtaacaacggctcatctggctccggggcgaccaggactgggggagaactgaggtacgccttcaattgagtgaaggcccgctcagcctcctccgtccaggtaaacggcccagagcgtttaaggagcttaaataggggttgtgccttctctcccagcctcgatatgaaccgacttagggcggccatgcagccggtgacgcactgcacatccctaagcttgctgggggggcgcatccgctctatagctcgtatcttctcggggttggcctcgatgcctcgggcagagaccacgaacccgagaagcttgcccgcaggcacgccgaacacgcacttatcggggttcagctttatgcgggcagagcggagactttcgaaagtttccgctagatccgagagtaaggtctcttggttgcgcgtcttcacaaccaagtcaccaacataggcctcaacattgcgtcctatctggctacccaaagaaattcgagtagtacgttgaaaagtaggacctgcattctttaacccaaaaggcattgtcgtataacaataagttcctatgggggtaatgaatgcagttttttcctcatcctccctagccatgcgaatctgatgataaccagagtatgcatctagaaaacacaaaaggtcgcaccccgcggtggagtcgacaatctgatctatgcgtggcagggggtaagggtccttaggacatgccttgttaaggtcggtgtagtcgatgcacatccgaagcttgccgttcgccttgggaacgacgaccgggttcgccagccactccggatggacgaccttacggatgaatccggccttcagaagtcgcgccaccttctcgcggatgaaggcttgacgttccggggcctgccgccgcactttctgccggaccggccttgcgcccagccgcacggcgagacggtgctcaatcacctccctggggacctcgggcatgtccgctggtctccaggcgaagacgtcgcgtttgcccgcaggaaggagacgagcgcgtcttcctatttgtcatccagaagaccaccgattcgtgtggtcttggacgggccgtcgcccagggcaacctccttgaccgggacctcgtcgcacgtgaccatccgctgccttggggcgtccgggacggaggtgctgagcctctcgtcgccacccgcgggcttggacaccgcggcgaggtggtccgcgcgctgctccatacaagcaagcgcgactttgaggtcgccatggacggtgatggggccaccggagcccggcatcttcatctgaagataggcgtagtggaccgccgccatgaacttcaccaacgagggcctccccaggaccgcgttgtagggcagactgaggtccgccacatcgaagtccacccgctccgtgcggaagttggcggaaccaccgaaggtgaccgggaggtcgatatgacccagcggcctggtgtgccccggcgtcacgccgatgatcggctgggacggccggagcaccatccccggggccttgatggcttcaaaggctgcgggggaaaggatgttgagggctgcacccccgtctatgaggacacgccccaacttcacattgcagacggtgggggaaaccaccatcgcgatctgtcctccccgggcaacgcacggcgtgtggtcggtctggtcgaaggtgagggcaacctccgaccaccgcgcccgccgcgtcgcctcatgggtaggggccgcggccagaagctcgcgcttcatggccttgaggctccggcgagaaacgtgagcgcacgctcccccatcgacggtggcgacggtggcctcaggctcctggaaccccaggtcatcgtcgccatcgtcgatgtcctcggcggtggccttctgcttggcctcacctcgccggttgccggcgggagccgccggggccttgccctcacagcgctcctgcctcttctcctcctcccatttcctcgtccgctcagccaaacttttgaccgcacggcagtccgcgaggtcgtggagggaggtgttgtgcacggtacaccacttgccggtcgggcgctccctgctgggagcgccggcctccttctttttgtcgctcgcaggcctcacctttcggggggcccgcgaagcgccctcgacggcgaggacatggccctcgtcgtcggaacgggccgacttcttcttcctcctcctgtcccgccgctctgaccgagcagcggacccgggggcggccggagctgccacaccagaaccggaggagttccaagtccaggcctcctccttgcgagccacacggtccgcgagctcaaaaagctgcgcggtggtctggggctccttggaggcgatcttctcgagcatgcggttgtgccgcacgccccccctgaacgcgtagatcaccacgtgtgcggggatgcacggtatggtgttgcggacttgacagaaccgctgaatgtacgagcgaagaggctcatcgtccctccgctgtaccgcatgcaagtccgcttcttcgcctgggcgcggatatgtgccctggaagttcgtggtgaactgctggcacaaatcctcccaagagtggaccgacgcgggtggcaagttcattagccaaccccacgcctgaccctttagggccatggggaagaaattcgccatgaccctgtcgtcacccccggcggcctcgatcccggtcgtgtagatctggagaaactcggcggggttgacgcttccatcgtatttttcggtgatggtgggccggaaccttgggggccaacggacgttccaaaggctcaccacaaaggctcgacagccggcaccgccaaccggggacacggagggccggcccccgcgcccggaccgaagtggcgctccgagcgaggaagcgccctccgttgcgtgggcggcgcgacgatcgtcgcgccggcgctcgatatcgaggcaggcatccggccccccacgcacatcttcttgggtcggaggcgttgacgagggaacggcggacgaacggtgcgtaacggccgccgctcgccgcgccctccgcctcgacgacctggagccggtggcggcagcgccagaggcctcggtggcggaggaccgcccgccggcgcctaggcgctgctgcgccgtcatgaccaagtcggccacatcatccagccaacgttgggccggagtctctggatcggggacgacgggcgggtgacgcaggagcgcacccgcagcctggagcgcgccctggggcgtgccgccatcgccgtagacgagacggcgacgcgccccgtctcgccgtcctcccccgtcgcccgcaggcggcgaagtcgcggatcctccgacctccccgagtgcctccccccgcccaagattttggcgagagggggacggtggggtgcgagcccgacggcgcgggttcggctcccagtcgtcaccactagcgctcggagagaggctgtgcgcctctgcccgttcggccattgggctgagcgggagaagcttggcgcacacgaaagaggacgagggcttagaaagacacgcgcgccccctacctggcgcgccagatgacggagcgtggggctcctcaccgggagaccgcgcaggcccccctttgccggttcggccgggggcgctaagtgaggttcttcgccctcgatctgaggaacgtcagcgagagaggaagtgcacaagacacgggcgacgtagacaggttcgggccgctgagaagcgtaacaccctactcctgtgttctggtggatctgtgtgtgaaggaat

SEQ ID NO: 23419 - DNA, 2818 bp, Oryza sativa
acggccgggccccacgcggcagccactcggcgcgcccgagggcggccacgccggcgctgtcggcgggaggcggcgcgcccgcgccccgatggtcgccgccggcgaccaccggcgcggcggagcggcggccgagagaggggcgggaagggggaaaggaggcgacggtccacggctcaccccggggcgtcggcggcgacggaggaggcggccggagcggagggaggcggtggcgcggctcgggtcgacggggtcgacggcgttccggcggtcggcggactcggcgagggcgtggatggggtcgacggcgttgcggcgaagccggaggaggcgacgccggcggcggaccggagctcgggggcgacggcggagagagagagcgacggcgcgagctcgattccggcgaggaggaaggggatggcggaaacggacggaggaggagcggggagggtttaaatagagccggggcgagagagggcggccgggggaaggaaggaaaccggcgcgggaggtcggccgccatcaatggcgccggcgagatttgcgggggcaaatccgcccgtttgaacgagagagagagagggaaaaatgggggaaaagggagaggggatcacgcggaatatttccccccactttattgcacgcgagggcgacgggaggcggcgggattcgcggcggcggcggcgctagggcgcgggcgaggcggcgggagcagcgggtggtcggggatgacgggtgggccccacccgtcagcgagggtggcaggcgggcccgcccgtcagcggcgcgcgcacggggagaggccgagtgggccgcggggagaggagagagagaggggggaggagagatgggccgggccggcccaagggagggaagggggacttttacggtttttctttttataaaactttttcaactttgtttatttattagtaattattatttgtgctctaaaaattccactaaaatttatttacaccttttaggcttttaggaaatatacaaaaatcccctaagccttatttgacttttaactttgcacattttaattgttggaggctttcacacggattttaattattctaggcataatttaaaggatatattttagagtcgttttgggacgtgacagtcttgctgagtacggtggttgtactcagccttgctcaatttttcccaaacccagaagagaagttcctggaagatgaaggctttggtgtctagctcgtgcctgctgtcaagcgcctgtggtcgtcgccctagtcttccgctgtttcccgtttgtctttgtgtgtgctgggccttcgccgcccatgtaataaattaattatttacgcttccgcttgataaactctgatgctgctgatggtcttcctctgattgtgagtacaccagtatgtcgtcaataaagaccacaacaaacttatccaggtattccatgaacactttgttcattaagttcatgaagaaggcagaagcattggtcagaccgaacgacatcaccgtgaattcatatagtccgtatagcgtggtgaatgcggtcttcgggatatctttttcacggatgcgcaactggtgatatccggaacgaagatcaatcttggagaatacagtggcacctttaagttgatcgaacagatcatcgatccggggaagagggtacttgttttttatagtaacttcattgagagctctgtagtcaacgcacatcctctttgtcttgtctttcttctccacaaaaatcacgggagcaccccagggggaagtgctcggccgtatatatcccttttctttcaactcttccaactgtttcttgacttcggctagtttatttgctgccatacggtagggtcgcttgtataaaggagtggttcctggagcaagatctatccggaactcaatctctcgcttgggcggcataccgggtagctcttctggaaacacatctccgaactcattgacgatgggtatttctggcaatcctagctaatgaagtactgaactgccggcggaagttgggggtgcaaagaaaacaaccggttgatcagggccccgatacagagtgacagtgcgccttgcgcaatccactactccttggaattgagccaaccaattcatcccgaggatcacatcaagttcttggtgtctagaagtatcaaatccgaggggaaaggaattccttggatttctataggaacggcagggctataatactttgttgtcataacacctccaggggtggtgatgagcagagggttcataagcctttctacccccagctgatttctccccacgaatggcacagatattgtcacgtcctgataaattcatcccgaaataaacaaatcattttctaaaaggaataatagaattaattaaaattcgaaaagaaattggcaaacactaaaatacgtacaagaaaaattcaaatgtggcccggagaatttttgctaaattctccttggtctaaaaggagccctcaaattttcgtgcaattttcagagcacaaataataattattaagaaataaacaaagttaaaatgattttataaaaagaaaaaccctaaaaatccccctttcctctcttgggccgaattcggcccatctctcccccctctctctctcctctcccccgcggcacactcggcctctccccgcgcgcgcgccgctgacgggcgggcccgcccgccatccccttcctcccgccgctcctgccgctcccccgcgccctagcgctgccgccgccgcgaatcccgccgcctcccgccgtccccgcgtgcaataaagtggggggaatcattccccgtgattccctccccc

SEQ ID NO: 23420 - DNA, 2737 bp, Oryza sativa
aattggaccgcttcaagtctctaatttttccttaagaagtcaagaacccatttttgtgctttgttcctgcttgttatatggagtttattagagtaaaagctttttcttttccgttggtcgtgtagacgctgcagcttcggaagatccgctttcgtggaggttgaagccgacgtttgggaaagcgagcaaggcaagtcacatcatccttgagcatattgaatcccagtttataaaattattttgatttaaattaatgcattatcgctttatttaaattcccgcgttatcactgttttatttagccatgcctatttacctttgttatgaccttattattattgctattgttattattaccttgttcaccctaggataaacaaaaccccaactagtgggtaccctattcatggttccactagtatgaatttaggtagatgctttgctgattaaataggcaacattaggtggttttataacttggaatattcatatctcttggatactatggaatggttggcttatggtggaattggacatacccctctcttcctctttcaaagcccctaaaacctatttttcggtggggtttgggtgcatgccagtcgtgggaagtagcaccccggccaatataaggactaagctcgggcctctgttgcaaagcactaccgtccttccacatgtctagtgggtaaggcttagtttgtggctcagtctggttataaacaaaagtacacggatggagatggacgaagtcgggggtcgatggacatctctaggacaaatgaaggctacacgagctgtggcccggtagtcgagatgtcatggcacagggccggtgtcctgctgctgggggctcagtcctacctacctgtcccgggggttccggccgtaggtggggttgggtcggtactcttgtctatggctaggatgggttggaaactatgtcacgtcttccttccgtataccgtggtggtatgtggcacgtggttacacgtgaggaagatgtgtcttgtgggtaaagatgtacacctctgatcagagtataatctattcgaatagaagcgccctcggttatgggcaagccgagcaatgtatccaagttagtattttaattcttaaaatttgcttaacaactaaaatgtggaatggtttgcctgggttggcttgggacgtgctgggacccagggtcgggttgccagttcggtctgaatcatcgtaggccttgggttaaggcaggttcgtgtgggttcacggccttgattaataatactgtgtagctctaggatcgtctttataaaatagctttgggcaactaagtaacttttaaatgctgtttactgcaaaacttaaaccctatattattaccccttgtacccccttgcattaatcatgcatctgccggtgtggcttgctgagtactgtggttgtactcattcttgctcaatctttccccccttcagtaagagaagctttggagaagaagtcttaggtggagtcctggcttataccccagttgagcgcctgtgaagatggagccgtaggcccgctagtccgctgctgtttatttttgattgtcaggccttaagtgcctttgtaataatgtaaatattatcgatataataaagatgtgtcttttatatcatgtttgtgtgatgtaccccggcttttcctgggacggggactaatacactagcgttcgggaaaatgtatttttctcggtcgcgacaataaacgagtgggaagctctagagtcgaacaaaatggtagcagggatggaatgaatgaggaacgtaccaacgatgacgtctggagttgtcaacacatcctcggcagtcacgtggttcacacggccccgaatgacatccttaccaccgttgttggggcggggaggcgcttggccttgctggcgcctcggctttgggcatttatccgcaaagtgcccgggctcgaagcagttgaagcacagacgctgttgaccttgagcatccctgtggccttgtccaggttgcacggctggtgcaggagggcggggtgcacgggtcccttgctgattctgctgctgatgcggctgtgggacgcgcaccacgaattgaggtaagggcgcggagcgaggttgctgttgctgctgctgcgaggaggatccccttggataaggattggtgtagcggatcctttggttagcccccgttggttgcggaaattcgccaagcgacgcttgtgcgactccaattccttttgcttggcttccaggcggatgctcttgtccaccaggcgctggaaatcaggatagtccccggagaccagacgcacagacagctcagggttcatccctgccaggaatttctcctgcttctcctcatcttcacgaacatcctctggggcgtaccgggccaaattattgaactcgtgcaaatactccatcacggagcggttgccttgtttcaactcccgaaattccctcttcttaagggccatgactccggcgggcacatgggtcctccggaaggcggcagtgaaacgggcccaggtgataggctgtccctctggctgcgtagcctggaagtggtcccaccatagagatgcgggcccctgcagttggtgagcggcgaagatgactttctcctcatcattgcactgtacggtgtccaactttttccccacggcatgcaaccagtccaaagcatcaatggggttatgggagctagagaaggtaggcgggcggatgcggaggaactcg

SEQ ID NO: 23421 - DNA, 1315 bp, Oryza sativa
tccgcctgcacggctggcctttatgccgccgttgttgggcgtctacgtcttcaccgaccggcttgccttcgccgccgccgactggtgtttccgcctgcacggctggcctttatgccgccgttgttgggcgtctacgtcttcaccgaccggcttgccttcgccgccgccgactggtgtttccgcttgcacggctggcctttatgccgccgtagttgggcgtctacgtcttcaccgaccggcttgccttcgtcgccgccgactggtgtcctcgcctgcacggctggcctattatgccgccgttgttgggcgtctacgttttcaccgaccggcttgccttcgccgctgccgactggtgtttccgcctgcacagctggcctattatgccgccgttgttgggcgtctacgtcttcaccgaccggcttgccttcgccgccgccgactggtgtttccgcctgcacggctggcctttatgccgccgttgttgggcgtctacgtcttcaccgaccggcttgccttcgccgccgccgactggtgtttccgcttgcacggctggcctttttgccgccgtagttgggcgtctacgtcttcaccgaccggcttgccttcgtcgccgccgactggtgtcctcgcctgcacggctggcctattatgccgccgttgttgggcgcctacgtcttcaccgaccggcttgcctttgtcgccgccgaccgatgtcctcgcctgcacggctggcctttatgccgccgttgttgggcgtctacgtcttcaccgaccggcttgccttcgccgccgccgactggtgtttccgcttgcacggctggccattatgctgccgttgttgggcgtctacgtcttcaccgaccggccgcctcgtccgccgccgaccgatgtcctcgcctgcacggctggcctttatgccgccgttgttgggcgtctacgtcttcaccgaccggcttgccttcgccgccgccgactggtgtttctgcctgcacggctggcctttatgccgccgttgttgggcgtctacgtcttcaccgaccggccgcctcgtccgccgccgactggtgcttccgccggcacggctggcctttatgccgccgttgttgggcgtctacgtcttcaccgaccggccgccttcgtcgccgccgactggtgtcctcgcctgcacggctggcctattatgccgccgttgttgggcgtctacgtcttcaccgaccggcttgccttcgccgccgccgactggtgtttccgcctgcacggctggcctttatgccgccgtagttgggcgtctacgtcttcaccgacgggcttgcct

SEQ ID NO: 23422 - DNA, 1032 bp, Oryza sativa
catatattctataacacgttaccctttgagcactcgctcgggggatatttttatctaatgttcttttctgagtgttgatttcaggaaaattctattcaacattgtcgaagacttcatgtctctgtggttctacaccaagatcgactaaggcgagtacgacaaatgttgacaaggctccgtcgtagactctgcgccttctcgatcactcaagaatggttggtggatctcaacaaggaatacggaatgaagagatggtgtacccgccaagataaaatttcatgacttcaatccaaattctcgattacagcaagacgggagacttagtcgtatgctctgtactttcttggttgacgttggagattgactcagacaaaccctttaggtgcctgcacgaggctgataaaggaaatctaacgttatctctgaactcaccgaaaacggtcacatgagctcgataacagttcctccaaggtctgctgtggagaataggaactcgttcatttgcattgaagtcgggggctactgtcagggttatggataccacatacctaatagtagttgactaaatcttagcaggacccaccacataccatgtcctatacggaaacaacctgcggatataggaggagttatggataaggaaagacaaccagagttctatatggaaacgacaaggactgctcggattgtatccatattggtttccctagttctacttggacaaggggacacttatgggtataaatacaagaccccctaggaggagaggggacacgaccacctcaatcaacaccaaccacaatcaacatacacggaacaatagaagccacaacatacaaaccaacatacaccaagacaagacgccggatatcgactttagggataagcacggctagtcccctacggtgtctctggatactgtcaggagagacgaaagtgctatctctgacctcaccgggcatgaactcgaggaggaagactaccctgttgtcgactacgagtcagacctacagaccgccatgtcgacaacag

SEQ ID NO: 23423 - DNA, 700 bp, Oryza sativa
ttcaccataggttaaacaaaaccccaactagtggacactctactcatggtaccactagtatgaatttaggtagatgcttcgccggttaaattaggcaacactaggtggttttacaactctagactttgggaatattcatatcacctggacactatggaattgttggattattgtggaattggattcacacctccccctctattcaaaatcctcaaaatggttttaggctgggctcggggtgcatggttttgatagtagcacctcggccatataaggaccggtcttcgggcctctgttgcaaagcactaccgtacttccacatgtctagtgggtaaggcttagtttgtggctcagtctggttataaacaaaagtacacggatggagatggacgaagtcgggggtcgatggacatctctaggacaaatgaaggctacacgagctgcggctcggtagtcgagatatcatggcacagggccggtgtcctgctgctaggggctcagtcctgcctacctgtcccggaggttccggccgtaggtggggttgggtcagtactcttgtctatggctaggatgggttggaaactatgtcacgtcttccgtccgtataccgtggtggtatgtggcacgtggttacacgtgagaaagatgtgtcttgtgggtaaagatgtacacctctgatcagagtataatctattcgaat

SEQ ID NO: 23424 - DNA, 31270 bp, Oryza sativa
aaataaagcaaagcataacaacaaatgatcatttacaggatagtctaaacaaaacattccatatgtaatcacttgtaaccaacaacatgcacgtttctattgttctccccaaaagaaggtgtgttgctgctaacagcaaggttttgacatgccaacgcaatgataatactttgaagtctgtattaatctcattgatttattcaagaaattcaaagcagattatcaaagaaaaaagacaaactgttggccgtaaatttcaccagttaacagctggtaactggccttgaaactggaaacatctatgtggatgtttttgctaccattagaactcctcaggttcacccctctaataacacttttttcaaatttaagttctatacaaaaatactccaatttgcttccactgatacagtgtaaatcccaaagcccaactctaaaactgaaaaggcaaaaaccagacgcagccagatctggtttctgatgcccttgtgagtgatatcatttaaacacatctagatgaggatggaagaaacgatgagctgatttcttgtatatagatagatcatgcttactcaattcaaataaaccaattgattttccaaaactcagtcctgctacatatgcactagccagtttgccaagccatgctataagcctataactagcgtagtgccgtagttccataatactactctattggcatattaaagaaatcggctagatagatattatatttttaccagccgaccagcatcaaatgatgattacctgtaagcaagcgaccacacacaagagttatgtcccactagcggtgaaacacaacgaccagaagatatatcccacatcatgattgttccatcttcatctccagaggccatgtatcgcccatcaggagacattgccaatgataaaaccatactcctatggccaataaacatccttatacattcacctgtttgaacatcccatagtcttactgttttgtcactagagccagtggcaatgtagttgcagttgacatgccattgcacacactgtcaggcaaaagtattttttttaaaaaaatgcagacatcaatataggaaattagagaataagcatgtatggaaatattccaacattaagtgatcccatataagaaaatgaccaaaaccatgagtacacttacatcaacatcagataaatgcccagccattattctcaaaggctggattttatccatggaccagattctagcagtcctgtcatgcgaagcactagcaaagtaatgtccaactggactaaactgccaaaagaaaacagaacagtgtcaacaactatcatagcacaaggactacaataacagaatcagataacttgcatccaaaagaatttgacagtgagcttttcacaggacatataagtacctagtactccatcatggagagtactaacgatgaaatactagttaggaatagttcataaggagcacacagaaacccatgcttccttttttctttttggcattgaaaacagctttgtatccacactaataatatactaaaagaactggtaatcacatacttggacatcccaaacagggtagttgtgtcctttgtagcaaacaagattagcattcaacttggtgttccataagcgaactgtagcaagtcaaaaaaatatagataaattgtgaattctaattaataaagtaacaaggaagagaatgatacaaaacaagcacaatgagaaggctttacttgttgagtctgcagatgatgacaagaggaagtccccaattgggctaaacatggcagaataaactggtccagaatgaccttggaataatgtacaggatttacgcgcttcatctgatgtcgatacccgctcaatctgggagggtccattctcgccttgtgaacaagctgaaaattatagtttcttcaatcagtaaataccatcattgcataattgactttgatgctaggaggattaatgttctaagactatcataaggttctgaacaggttccagagtcaaatactgtaatgacacaagtgcatcagtacatccagcaagtatgactgaaaaacatcatacttcttaggacttgtaactggaacttcgaatgatacaaatgaatgtaccattatagtatttttaagaaggcaatagccaattagtcacataaaccagacgcaaatttatataagtgtttcagcataacacaaagcagaacaaataatcaaaaataaggagtgaagaacaactaacatgctttggaaggctggccaatctttgacatatcccaaacctagtgaacaccaaggagattttacactttttactattacgaattaatacagaaatcacataataagaagatgccacctaaaaggactagccttcactgatgaatcagcgaatccaccaacgaccaatgaaccatcatgcgaaatcgatgagcaatttaacctgagttccacatataatgattaaactgaaggaggaaaaattgaaaataaaaattgtcaggcattgatccatagttaagtttacccattatgtgtattaaggaatgtatagaagctaacagatggcaatgacaagctattcaattgtgcacggtttcgcaagtcctcaagaattgactgctcaacttcaacagacctgaaaaaaaataatcagtaaacgtctatcagattcttacagataaaggtaaggctgatgagtcaacaaagatgtccaacaaataaaagtaaacatgtgtacaaagaaattattacaacttaatataagaaaaaaacatcactatagaaaatcttatcagtgggcttaggctctgtttgcaagagctggttcccaacaccctactctcgttttccacacgcacgcttttcaaactgttaaacggtggtttttttagaaaaagtttctatacgaaagttgcttaaaaaaatcatattgatccatttttgaaaaaaaaatagcaaatacttaattaatcacgtgctaatggaccgctccgttttctgtgcgtactgtttgggttgggaacctgtttttgcgaacagagccttaatggccatgtcgtgatgatagtttggaaggcaaaggaaatataatctttggttttgttaatgtcttacaaaagtgcttttgaacagctcaaatattctacggttaaacaacatctaagcaataacatattggcaggtggacatgggataaccaaatcatttgaacagtgtggatgaggaagcaatatgttggtgcatagaatatgcaggcccctttgaattggagaaaaaacaaaggaattgaaatcctatagggaagatcattgttcatgcctttgatttgtaggaatgaggaaaggaaaatcacaggagattttcctgttcctacaaatctagaggaaaacataggaaatttaacatccattccaagctcatgtttttgttatctcgcgttggatcaaggcaaatctagtagctcatggccacttgtctattcaattagtgagggtaagatgtgtataagtagataagaaacccaatttactcttataatccaagcccattgctatgtttttcctacggtccaatcaacctacaaaattcctttgttttccatattcctaagttttttaatcctgcgtttcaaaaggggcagtctgcaggaaaaatgaaacaatggccacatgaatttaaaaaacatgtggttgccttcttcccaaccacggaccaggaaatggatgcagaggaagttataattttatcataacctaaaatcctgaatcatttcaggagaactttttaaccttaggtcacaaaccagacaatattcaaaattagatgaccaaattggacttctcaaaagaaaatttgaagtgattaaagatgtattgtacgacgtacgtcattggaagcgttagctctggtttaactcgtggtgctatagaaaccatgctagtttcagatttcatgtttttccctgtggttcctacaaacttgtcctttttgatctttttatgtgagccaccctgctttccaccttctgaggatcttttctgtagcaaaaataagaaaagagtgaaatgagaaggctaagaaacatcaatggtgagtgaggaacatagttccccctatgcagctgcctagccttcccaggtgctaggttctaaccagtctgcctgctagcatttacgggagcactgaacaaaggagaatgcagaattacatagtggaacaaatcaatgaaacattgatatcatatacagctgacagccagtgcacatcagaaagtactgtttttataataaagcaaccataaaaatcacaagttgctaacagaatcgcacgcactaaaaaaaaggaaagcttgtgtttcaatgaccgagggcataggaagcaaaatgaaaaaaaagactggcatactacaaaacagtttcttgccttgttgtcttctgtgtctgcatccttgctttctatttcagttttatcagaatctgaaattgccttctccatacgttcttcaagtgaatcttcaagtatctgcattacagaatttaaatcacaaaaataaaatgtctgagcatagtgaacaaataataaaaacggctagaatcccattaaatattaactgatcgatctatataatttcaattcgtttaggctgtatccttaactattgataaaataaatgatgagaattgggaaaccaccagactggtacagaacataccccccaatgcacctccttctgatttatctgttttgtcaagtccttgctagttccaatcagaacaacagcatccgagtcatcaatgattaatggagactgcccaggggatactatcaatattgtaaaggaaagttggaacagaagattcagataactcacaaggagcaaatgcaggatgaacatttaggtcactaatcatgagtcataacagattggggaaacttaccttgaaaatctatgcgttcattgattattccaagcaccacaagagcttgtgttttgtggagatactggagaagcaattcatatgaatactgcaataaaaaaagacagaaactttaattgggacagctgattatatttccagaaaagcaattttgcagcaatcaagaaattacagtggctatcatgaaatgctgccccaaaaaatagtacatggtacagggttgaaatgaaaggggatttggaaatggtatacaacctcacatagcttaattctgaatttattctgccttaaagatcgagccacttccatttgctgaaattacaatatttagaaggataagccataatttgtaaactttgaggagatagaatcaaataaacaaaaaataagtcttcattcaaaatagggtagtgcaatgtggaaaagctgagtcactaacttccaaatgtaaaggagaaaggatgctttccagcttcttgagatccctcgagtgttcatggtcttcacgaaatgtgtggaaaaatgagcaagctgcagtgctcaaagttagtgtatcaaagaaagaactgccccgaataaactgatagaaagcaaaaaaaaaaaaaaactgacagaagattcattatcatatccacctactagcattaccttcctgtgtatgtccctctgccactaaatccatgaagcagtggaaaaatagtggataaagaatgcggagtaattcatgctacaatagaaataaaaatttagaaagagattatatagcttaatttaggaacattaaaatacatataaaaaaattatacaaaataaaggtgcaatggtaattatgtacattacaaatcgcaggaagcaaaacatactttctgcctgtgtaggaagtacagatgtttataggaatactattttgctctccagaaggtgggcagcactggatggatggaagagaatacacgaaagaagactcttcaagtaaatgctccatctgaagcaacaaactgtgactctagaagcttgctatacaaaacagacttgaacatttttaacaagagaaacaagtgatcagctctatgtgaataacacagaaaacactcttaaaagatggtataggctgtaacacagtaacaaatgaacagattggatataacagttccatgcctcaaagcagctaaaacacatatggttgtaaaatacaaaaaaaaggggcaggttatgaaagtgaattacaatctgcgcatgtaacacaccttgtagtgatcaagataactgtatgcccatgttcttagtttactatagccatcatagtacctcgctggatcgttttctgacctgtcattgcaggcaatgacacaatcaaaatgatgtagagggtaaagataataagaacaacacaatgagctaggaattagatgcggaactacccctgctgcagtgagaagaagtgctacagtagaatccatgcggtaattaagaatatgtggttgaacacaatatatgaaaatcatgacagaattcctcgtagaaatgtggttccgcactcatcctcgccgtagaaattgtcggttgagagttaagcgctcaaattgatcctaccaaattgcttcctccacaaaaccatccccaaacacccaagcaaagctagtaatactactacaaaaatggaacaaattactcctgcgtgggggaaaccacacgaccaaattgaggtcccttagtactagttgagtgtgaaaacaacatctcgaacaaaaaaaaatcaatttataacaataataattgcactacgacactacaaattccaccactaggtttccgaaactccggcggctgagccgagcgcgagaggccgcaagagcagaatccgggaggggagggggaggtcgttacctggagagcgcggcgtcggagagggagtgggaggaggaggaggcggtggtggtggtggtggtggtggcggagaggcgggtgcggtcctcgagcagcgcgagccccgccacgcggaagcccttccgctgcaggtactggtgcaccttcttctccatctcctcgtcctccattgccgccggggcggagaaggttcggggagctagggttttgagaagagctcggatccgtggcggggcggggaaacgtcagaggaagaagaagaagaagaagaagaaagcaaagcaacagcagcacgaggaggagcagaggcaaagggaggaagaacgcagcacagcgtcatgtgtgcttcaggcagaggcccagcccaatccgttatatggccttggcccaggagtacgcaattgctcctagaaaggaataagttcacttcacgtccctcatcctacggtcgagttacaatcacatccctcatccgcaaaaccgtatacaacacattccttatcttataaaaccggcgtaaacaacgtcttaaggcagtattcagcccggttttagttaacgtggtgcttacgtggcactctaataaaaataaaataaaaatcatgttcatgccaattatttttctctcttctctacccttctcctacatttactggtctctggttcatcgatgccgatgggaaggtggaaacgttgtggtgtggagaaaggagacagcgatagtagagaagcagcagcaggaaagcttagcggagaaagggggtggagtcgccgccaaggagtcatcgggtcgagcgacgccatcgccgccacttcctgtcatctaggcaagtccatgacgcgcgtgcaaaggaaggcggcctcatcggtgacgcagaagggtttcagctaggggtggaaacggtacggaaatggacggaaaccatatttgtcgttttcgttttcatagttttttcggaatcggaaaccccggatacgaaaacggaatcgaatattatcgaaaccgaaaacggagcgaaaacgaaccggcgcgaatacggtaacgaaaacttatcggaataaaaaacccctcaaactgataaatccaattgaataaattatctatatttaaaagagtaatgttgttgataaatcccaatgtaggacaaaaaaatattcttatgtaattttagatttgcataacaaatattttttaaaaaaataacagccaaacaccatgatattcactatttagtgcttaaaaagagaatccaggatatttcagtcacaaaatttctggtaatttcgagaaaatttccggaaagtttccgaccgattccgagttccgacggaaactgcccttatcatttccgattccatttctgagaaaatatttctgaattcgtttccgtttccgaaaaattccgaaaaaattccgaccgacagattccgttttcgaaaataggtctggaatccgaaaagttttcgtaccgttttcacccctagttccagctggtcgcggaggcgacagcagcttgacgcccacaacagcttttggttggagaggagtcgtcaatggagagatgaagaaaaagaggagagagaggaggagagaagatgacatgggttccacataaaaatgccacatagccaaaaagaccatgtcaaattgccacgtaggtgccacatcagttaaaactgctttaaatactaccgagggatttgatttacatcgggttttaaagacgagggatacattgtatttggtattgtatttggttttgtgattttttgtggttgaggaatgaaatccaaactcaactcttagatgagggatgtaaggtaaattattcctcctaggaaagacataggccgaacttacaagattgtgggctcgtttggggattttctgctacctacaacttctctagaataaaaaaaaaactcccaaacagtttaactttccgcccatattataagaagttatagttgtggaatctgaaaataaactagaagccagaagatagtttttcaagttctatagtagctggttggtacccagattataagataatctctgcttttcgcccatattataagaagttatagttgtagaatccagaaaataaactagaagccagaagacagttttccaggttctatagtagctggttggtagccagattctaagataatctctgctttccgcccatattataagaagttatagttgtagaatccagaaaataaactagaagccagaagacagttttccagattctatgataaactctgctttatagtttattttctagattctatggttacatataatcagaatctacagagtttgaatagctgaatatcatggaagaaactacagctagaagctttcctaaatagggccgtaaaccctcccaacacaatacgtttaaccctagttaatagcttagcctatcatcatttgctctactaggttatcacccgtagaaaaaaaaacgaaaccaccaaaaataatttctaaatataactttttatatatttttgtgttcctagcaatttaaaaaccaatgctacaaaataaactaagatgaaaaaaaaactttaaaatcaattataaaattaagcttcaaaattcaaattttagctacaactgataagcctagtgaaactcgaaatgaacatagtaaaacaggaaaatacggctcagagggtctgtgcgacaatgaaaactttcttacctactcagctccaagtgaagctatatagagttttaaattgattacaaaacatacaccatatgtcagttgtcataccaaaaggtatctatggagaactgacggtgggtatcttcacataataagcatacacataacacattacacaacaaggattttagcataatacatggtacataatcgtccactgcgttttattgaattcactttcatacatcaagaaaattagaaacaggcctacgaagtagacgcttcatgggatggtcctctggtacagggggagtgctcccaatgcttcgcgctctgcgctctcctttttcacctgaaaagcatgatgtgtcaaacagtagccagcaaaagatggttttttatcaaaatttaacatgagttttgtttcttaaggcccacacatcagagtagtcaaggattgatttctttggaagaaacatctgctcatatacgatgatattctactaccaacagaagaggaaacaagtgtaataaaaggagtactacccaaatcatttataccgataacagcagactgtttctctggacaatcaccaacagccaatgacacactattagtggatagcaattaaccgtcagtaaatcatttgaatggggccttgagcagaaataacctttgcaattatgcacacaattttttagatactaaatcagcatgaggaaccaacattcaggaattcatagtactgaaagccaatcttaagacagcaaacctagtattttcatacagtagtaatagttgtacatgtactttggctaattattggtcaaaatatacaaagtttgatctttgaaatcaaaatacttggaaagtatcaggtaccacaaacatgtataatgaaaacaattgttcaagtaaagtggctcctaaaagaacattgtgatgagcgaagttcattttattccagtatgtatagtgccaattgccagctcccaagttgtaatccatggttcaagtaacaagaaaggtaaggtgataaaaaaggacacttaccagtgctagcatatcagataaatagcctctgaacggtgtctgcttcgcctgccaaaaaatgaaaattaatggtgtcgcaaatcacaatatatgagatatgcagataggtcctcttaaataactgatcagacggtaattgacaggagaatgtcaaaacagaatgtgatgaatgtggagaaggaattaaaggtcttatagcttcaaagggaagctcactatattctgaacacaggataggaagcaagaactcagtacaccccgaaaacaacaaagtataagaggtcaattgaagcaaattcaccaaacgatctcaacaaaatagacctaacaaggagacacaagcaaatgtatcagagagagaggacaaaactaacagtgccatagcatcatttagtaacagttccattccctatcacaagcatcaaatcggtgtccaccgcccattcctattcaccaattgtctaccagttgccatccttctaattcctacgtcaccaagccacggagcgtcgcggtctcgcggagcaaaagctcgaggaacgaactagccacatcgacaagccacgtctccgtaagtccccggccacaattgaccgtatccacattgacaacgcaaatggaagaaacaattctactaattccacaggtcgcgcacacattcatacatacatacaaacagaatgtgggactgaaccaaaactaccgaggatgattgcgaaatcttgttcaacctgggcatcggcggggaggtactggtgcttcatggagaggtccatggcgcgcttgaggcgctggttgcgggcgtccaccacctcccgcggcagccgcgccagggcctccttgatgtcgaggtcgtggtaggggtcgtacaggtcgtcgtaccggagccctgcgcacaccagaacccccgatcagagatccctcgccgcggcaaaaccctaaccctaaccctagcggcggaattcgaagggggggagggggcagctcaccgtatttgcggaggcgggaggcgacggcgttcatgtggaggcgggccagcgggttccgccgcgggttcaccagccacgccgacagggaggacagcatcttcgagaaccttccagaagcttccacgctctctctctctctctctcttctccgatgtggcgggtgctttgcttgggtttggtttgacgagagaggagaccgtacggttgcttggctttgggtggttggggttgggccgcgaagcttgtggaacattcgacggtgatgggccgatgggccggcccatcttcatttaaaaaaatatcagagtaaatttcattttcgactacctttttattgccgatgtttcagtttgggccacccttcaaccaatgttttcactttggactaggtaattttaccattttgtcactttaaagtgcactcaatttttttatccatctactttgttctatgtcaaagcaatggtctacatacaactaaagaggtttattgatgaataggagctgacatattcgaggtcgttcatacacttgagaaaagagttagggtggttcaaaataaaacaaaggtaagattatccagtccaaattaaaaaaacattagttaatctatggtctaaagtgaaatattggtaataaaaagtaacccaaagtgaaatttactatgaactatgaaactgatgaatttttgagtctttgtaggaattgaattaattcctgtggaacttatgtcttgaaggagccttggagagaacttgtattttgttttcgtgcctctagtcctttttgaaccgtgggtatatttttttcgaatttcatgaaaatatcatgtgctcctctattgtatatttgaggtgttttctatttttcctaaatcaattttttaaaaaagtttggagaagttgatggaaaaatgtatacaacaccaaattagtttttattaaattcacaattaatacatttttataggatattttgtctgttttgtgttgaatgtgttgctacttttttcaacaaatttggtcacaattaaagaatttggacttaaaagacaaaataaaacatcttatatgatatgtgaaattcttatgtttcaaacgtaccttaggtgtatcttttagtagcttcttttttcttgcgaggtgtcttttttttttcgcccacctgctttacatgaaccatactcacaccaaaaacatactaactcgtacttagttagaatataatatgtgcacttacttgtgtgtaatcacaaaaaggaaatgtacagttatgcattgcggttgagaagcactacgtggcaaagcaccagcatcatattcatgtatactagtgctctgtgttgctttagctggttaattagatgtcatctgtttgtttcggagccggcacgaatatctgcccaatcgcctccaatgcagagacatcccagctctcagcatgtctagtgacctgaacatattgtaacagccaaaatattcttagctcttgaattaaaatgaaagagaaaaaaaattagaaggttgcttccttttcttttcacctccttaccttgtattcttcatccaaatcatatgttgtattccctctgatggcgatgaggggtctccatggaagccttaaatatgtcctgtaagaaaagcatattagttgaacacaagaaaaaacaaagtagtgtgcagtatttaatacaagtttctgctaaatccttctgggttcatagagattttagttcagttactctgaacttgcaaaagatgactagttttaccccacctaataattaacgaaacaagatttaatattacagtatcaccttagtgtccatgttgccatgatgaactttgtttcaaccctcaacccctgcttgatttgcaaagagcatcaggaagttgcaaaatgggtatagcttagacaaaactttgacaaatcacactgtgccagtataactaaactagaagctaatcagtaaaggcacatctgcaataaaaatagcttgcatgtttactagcacaatataatggcattccttacagttcagaacagaagggcaatctggagatggaaattgacatttggtaagttggtagctacatcaattttagcaaaatggaatggaaaagaaagaaaagacaacaacacatgcattgcagatgcatcactggtcacttgacaatttcagcaaacagtgttaccttttcaatgttttcaagctcaagtgaagggctgtcgaagaacggtacaagcagatctaggttctgggaatatctagaccttcctaccaaataacaacagtgcatttagcataacaaaaattcatagtatttctttgaaattggagcgaatcaaattaaacattgcttgacggggcttgcattgcgcatttgtgaggtcaaatagcaaagaaaattatcgcaaacctcggaactttattgtcgggtcctcaaacaagcaatcttcggtatatatgtccggagtaaagttccctgataagaaaacatccgatgtttcagtgcattataacttcagattctgaaactatttggcatgtgtactatatatatggcagtcgattaacctaaattttaagttctatgtaaccatcatcagtactaaaaagtgaaattaaatgtgcaatttccaactcttcaatttatcttatgttctctatgacatggcagcatcaacagacagagaaaactcatactacataccagtgaggaaatatgctcgctggtaatcggcttcaagaacagcaatcacatcatccacgctgcgcggcgaatccaactctgctcctcctcctccttcatctcccttctgaagatcatcatcaacaactctgcaccctcaaattgaatcccagatgcttgcatcatcagcaaattagagaagaattctcaaaaaccaaatggtgaacagcaacatcagatgaactcgagcactttgcatgcctggggttcttgggagtcaggaccctgagtagctcggtgacggcgctgaccgccgccctgacgagcggcggggcgccgccgccgccgctgtccggcgagccggagctgcaccggacgccgccggggaggcggcgatggctctgcagaatcctccatttctctgatccacaccatagctgaagaactgcgtttctgccgcgagaggagagggaagcaggccgtttggcggttaatcttggcgccatttttctttttcttttttgtttttgcagttggctcatacacactacatgctgctactactactacatggaaattggaaagcattattctcaatgttgcagaggcagatccagaggcaatggccaaatggcaatccaaccacaagaagctcacacttggacactgctggggatcggcagattgtgaggtgctcaaggtgacacgccacgccagccaatggcagttgctgttttgccagagagcccaaagaaaaacacaagtcgctttgattttttttcccaattaagctttagaagtatgataaaatttatggaaaattatagtagtgttttcaatataaaacaaatatattataaaaatatattcaacgttagattcaacgaaactaatttggtgttttagatttattactattttttttctataaatttgattaaaactaaaaaagtttaatttgtagaaaaattaaagtgacttgtaatatgaaacggtgctgcctccatgatggtgctggcgtgctgcaatccatattctgaccaaaccaaaaatttcagtgctttaggtatgcttagtgttatcctagatgtaaaagatgatgatcatttcattttcaataggacatggaaacttcagacttcaggcatggcaaggggaaaaaagagtcaaatttccaccatccagtatcgacgaatttcagtcacaacaattcaatactacctcctttgaatattttttttctatattccatattttagttgcgcacacttagcacactatctcacaagacatctcacaaggtaattttactgtccttgataaattttactgtccttgacaaggtaccgacttggtaccaaaattttaagataccaacagcttactagtgtaaaatttaagtaactcgtacttttaagtatctaaaatttctcatctcacaatgttcaaaatatactccttataaaaactctaaagctgccttataaagtacagcagtactcaccaaatttaagcaccatctctcacaagattttaagtgatgtgtgcactatataaacatcatcatcatcatcaatgggttcaatgatcggttaagctgaacaaaacacacgctgcctgatgtaatcccgtatgccacctttggttcccaatcacaaattcacaataacgaagaacacaccattgacgggcgaacgaacgatcgtgtcaaggcaaaaagggcagcagcagattggacctaaatgctcaatcaagtaggatttacatgagagtcgctgcggaaatcgcctactacacccaggaagctgtttttgttttgggcatagcaatccactcactccagcatgtgtcatttgaggaagctcagcttgtctgaagggcctcgaccttacccctggccttctcgctgtcgtcgacaatgagcttctttcggagggcgagcagctcctctcctgcaccacagatgtaggccgcggttctcctgcctgagagagttgccccttccatgctgtcaatgtagtcctgcaaacaagatagcagattatgagttcatgggatcgtcgatcatgcttttacaggagcagttatatatgtttcatccaatattacgaatatctaccaaacgaaccttcctgcttaaaatctaaatttacagaatcaaaacaattgtatttgatgagcgctgattgattactggtgacagtgactaagtcaatggtttagatacctgttttgtgtaagagccagacaggaagaagtttttaactggtgtcttttgatcaggtctaaatggatcatttcctggtgactcgcggtacaatgattgaccgattttcaccacactcgaccatgtaagttccaagccttgtgatgacgggaacaattctaagacctgcatgaatcataaatggatttgcactgaagtgagttttgaaagaatgaaataattaacaaaagcagaagaaattatcctgatttaaaattaacacgcttcattatttgcaatggatctctaacaaccagttctagaattttggtaatggaatacaagaataatttgatcaacagagtggtatttacaaacccacctgcttttgaaccttgctaattatctcctcattcggcaatggcatgtaaggatcgccaggggttagcacagctctacaaatgaagtagtagcacacggtgattttaattgcaacagttatcaatttgatgcatgaaattcaacagttctactacactagtcaccaagtaagctgcttgtgtaaaaataaaccataattacaaactaacagctacaatagtgaatgatatcaaatgtcaagaacactgaatggtcaaacttaattccagaccacaaaagcaaagaacatggaagagaaagtagccttactggatcaaggaaccttgtccttcaatgtagtagtcagcaggagatgaaagtgcaaggtctgaaaaacatgaaaaatctgcatctggagtgtagagaagattatccaagccaactgcctttttcagttgtctacatcaaagataaacagaggtatcattcagcatcatgcaaaaaagcagactgcatttgtacggccattgttcagtacaaacaaatgcactctttatgaaaaaatataatgtgtgcatcacgggcattgataaaaatattgggctaactggggaggggagactggagttaccttgatttctccaaatcttgaagttctgtaacccatccattataacgaagctgtactgtgactacaggaacaccatctaacttgtagatgttgtcaaatgtatcccattgcctccattcagaaggtaaaagtcttttgatccccgggacatcacaagctacaatcaacaattccaatttaatcttgcatggtaggacgtggtagtcaaagacaaaatggaagagaaagaacctgcgacatatgcatctgctttgattatctctctacttgtagcctaaaaatgtccaggcatggcaaaagtgtcaattaaagtatcaagaaaagggttaagctaagcctacagcaatgcacattattatcaaccataatctagctgtacagtcatgcaaaggataaccacacttcatagataatggtgctaaccttggataggagaaggcctttaacataggtttccccatcaggtgacttatcatagagaacctccctacatccccacctcaggtgaaacctgaaggatttgttaaatgatgtaagctttcaacggtgcagtacatactaatgcaaaacaaatttcggtctttgccatcatacctaccacccctgtctgttatgtacttctttattggaccactcagataaacatcaggtgaaccctttagcatgcgtaataaagatgcctctgtttttgtggcaaacagagtgaaaatggtaagcatgcaacgtgcactgatattatcacagtcaatgaaaccaagagcataggcaacaggatcccacatccttgtgatgctctctcgagtaccacctttcgacaagaaccaatcgctgaaacttacctgaaaaaagtacacttgcaaattaacctttagatagaagctatctacctctgatttttcattaataacagttctacgatatttatagtgcatatgtttatataactaattgtgatgagaatgaaacagaaggaagtgcactagtaacctatgttccagattcgagatataatgatgcattgcctagacagtagatatacactcctaatgacacttaaataagaggagagagatacatacatcatccaaatcccgtacttgctgcaatgcaccatctggatcaacaagagctcgaacaactgggcttagagcaagagcaacggcatttcttgctttatcataaacctgaaacatgattcaaatattttaattagtccatatattgaatccatctaacaaatatgtactgtataaaatagatgggcaaagttgaaggtttatgaatccttatagaatccttaacaaatatgcttatcacccttatagaatctttcaattatgaattataacaagatttagaagaatccatatcacattctatctggtgacatggcaatcaagaactagctatgcaatttgcatatatagacaggtaggaagacattacaatgctttgattcatgacaatacaaatatcacagaaagccacatctttagtagattatcacagtctgcaaggaatattaaacagaccaatcacttttaggagctttcaaggaatatttacactcaactcagctgattacattgtgccccaaagcgccaagcactatattcaaaaagtaatggcgtgtgactaaaaggtatgaatacagagtataaaaatgaggatactgttagaagcgtgggcatgactttgacagagttcaaagcaagaatattacaataagttggaaagtcaaaatattgtgattaaacatggtcaataaagatagtcaaagtttgatatcctagttaccggacatgaatttagagtaattaccttgagttggttagttcgtaggaatgcttggataccatgtaacggagctcccacaggaaaccgaaaatcaagttctgtatagcaattagcaaagcaaatagtatgaaagtttagaaaataagtggaatataaatacatagcaaaatacacttgagttagtttagcacacttagtagaaatatggcaagttgtcttatcagtattggcctaatgcaagatcaagaaaataacacgccagagcactttttttttgccgcccacaaaagaacaattagtgttctagcaaatcgtctcatagtaatttacactttgtaaactttaaatattagcaacggtttaactttctatgaaaggtagctcaaaagtaatgaagaatgatttcagcacgacaagtaaaaaaacaccacaactcctacaactgttaggcacatgggtataggataactgaacataccaccaatcgtgcctcctttatttacaaatgtatgggtatgctccttcactagcagattattatcagctccaacctgaaacaaaataaggttgaactcgattaacagttagtgtcaaacctggctaatacagaaaaagtacaaattatccgactcatgaaataaagtaattgactacatgcttcatatagacaaaaataaagatagcatgttctcctcacaatatactccgggagtacagatttaccatactctagtaagtgcaaacagatggcattcctaacttttcatgatggaagaagcatctaactcagctccattatctacttagtgcagtctagattaacaaaatacttgaaaagtagacattctccaaccatctgaaagaacatagaaaattaccttcttcataaggcggaaaagattgctgtaacacccgaagaacacgtgcagccccatctcgatatggttccctttcctatccacaaaagaaccgactttgccgccgataaacggccgggactcgtacagatcaacctgcaaaagaggaacatcaccccaattttggtaaaccaaaaatcactgtcttttccctggaagagcagaacacggacatcattgcaggcaatgaattgaagaaacctcatggccctggtccaagagctccaccgcggtggacatgccggcgaggccggcccctatgatggccaccttcagcttcggccccctgtagtgctccggctccggcgggaacaatcctttcggagctgccacacacggaaaaaagatccccaattcaattgctttcagcctttcacagtcagcagcatattcaggtaatcctgtagaaagctactgaatgaacctagaaaagaagaatctagctactacacatggtcagactcatcacaagcaacaactaactaactaactaatccacaaattcagttcagttcagagccaccaaaatccagggttcaagaatttgtgtctccttggttctatccatataccaaaaccgttcaagaatctctagggggagagcggagtggcaccgcagaagaaagaatcgaccggagaaaacgaaacccaagaaaccctcaccgttgacggccatgtcggagacgttgctgtcgagcgagcaccgcacccccacccccacccgcaccctgggattcgggcaccggcgccgcctcctgctgccgccggcggcggagaacgacgccggggccagcgtggacggcgcgcgggacgtggcagccatggccatatgcctcagctcaccaaccaacgctgctgctaggagtagaggaggaggaggaggaggagagtataaatggcgtgagcgcgagaggtggaagaggatgcgggtgggggaggaggcgaagatgccgtcgagcagcggatttgtcggcctccgtggcgccaccacgcgcgcaccactgaagtgaacgccccttttttttggatggatgggtgaaggctcattcagttcagacgattttcaccaggattatcgtagaatttagggacaatgattttttttaaaataaatcgtttgttttgcatgaatggattctactactaaattccttaggattttagtcttacaagctaagctaatttcataggattcttagcataagatgatactacctctttgttcttaaggaaatttcgtaaggaaaagtgtacgtgtgacatcctaattctttattttctctattctttgatctggaaattatataaacaaaaataaagggagaaagcgacaaaaaaaaagaaaacaaaacaaaaaccttgtgactgggggtgctccccctttgtgctaggcgcacacacaatcacacacacatgaagcgtgattttagatttctttggggaggttcgtagcttctcgaatctccgcctctcagaagtaaattttacataactacgtaagttttcaccaaaatatcgtaaaactataagatttagcgttaactttatcacaaaatttcatatttaatattgaagttatcgcaaaactacaaatcgtattgttttaatccaacactattgttgtgcgcgagctatagacatgtagtttactgattaaattgccactaaatttgtagttttgggataaatttgctacttaaaatgtctgtagttttcctataactctatcttaaatctatagttacatgataatttgttgctagatctgtagttttgtgatataaacaccttaaatcttaaatatatagttatacgataattcggttaaataatttactcttttaaaaataagaatatacagttgtacgatctagaaaattatgtgcttggtaaaaacttaaaaatggattaatataatttgcgaagtgagcgcaactcaactggttagatttccttgtggtggaaccaactcaccccggttcaagccctagacttgatacaagtgttcgcatttatggctaattattctctcaatggtatacgatatatccgtcgatagtgaggcgtccgtggtgatttcttcaatctcaagatatgccggcccaatctttcagatgtactcataggggtagggtgtgcatgtgttcacacgttatgagcatctgcgtttgtactgtgtttctaaagaaaagattaatatgtttttaagcccatctttccctatggaatttctttttttttcgcataaagcacaccttttactcgttcagaaaacacacatgtgaaaagtgagaggagaagttggaaaagtgtattatataatacactcttacggaacttctggtataccagtaatcgtgcacgtgcaatgcacgtctccgcaaatacatatttcaaacacaagctatgggtaatgtaacacaaaaagtggcggtacattcatgtgacatacaacaaaaacaaagaaaaaccctaaaggtacatttcaaaaccagatgccgtgcaaaaaaaatatatatttttgagaaagcgcaccactctcggttaccctgtctggtgctaagagggagatatcccaaagatacatttcaaccaagtgtcatccaataaaaatactatgagaaagaacatcccagtggagagttacggttgccctggctataccgtggggacatcagagtggaaattgaagatgcttcaatttattgtgaatggattatacttctgtgaggattgtgtcctccaattattcatgttagcttctagacaaaggtgtcaaacaatctgagttttctgttgtaatcacccacacctattttgaacttcctctgtttatctgcattctaaacctgaaagaacatgacagacaaattaacatatcaaaattctctaaatctgaaagacatgcaaacaaattaacatacatgtctcaccgtcttctttgagttatacatgtacattgactgccactctaaatacacccttccacatatttccaggtcaagcagtacatgctatttttctacaacaatttaccagtggtaaaacttctaaacgctgaatactgcataattggatctcctaagatggctagcacttggtatgagtccaaaatttaggcacctttgcttgattgtagatctgtcacaagcaatcttcctatttccacaaaaaaaatctattttttgcaagcatgtctgtcaaactacaatccaggtttctactctgaagtatataaaaccgtggcattatattaccttgatccctttcagtgaataactgaagtaccttggatattatacaacatgctttgagtggctttttatgattcttaacggaaattcaagctttggtttcataacaagctcaatactgtagctgcagaagtggagagaatctatagctcaatgagcacacatttttcttagacaatcccatatccaagaggtagttgattcactaaacatttgaatactgtcagacctgaggtgaaatccttctttaaaacattattagaaagctaaaaagactttaaaaatgcagaaaaaagcaactataatcaaccaagttggcactgtaattcatcagaaaaaacaattcttgaaatcatcatctgcaaacacaaatatttagtcctctcttaaattcattaaaattgacattttatgaatatgaatttagagaacagaaaataagaaatttgaagtgataaagaagcgtgttcataagcaggtatctcaggtttcgctagtcggtgggcacagcggtcaggatcaagctataaaattcacttatagaaggaatatctgtaattcgttaagcctcaaaattcttcctgtttctcctcagccttaacagtaatgacaagaaaaggtattcttttttctttctcgaacacgaaaattgagtattctttaagtaatggcaaaggaaaaatatagcattacagaacatgacgaaagaagttgtgaggcatcaaatagttcgatacctaagcattgcatgaaaaaaattagttgctaagctatatggttcagattttgcaagacttgtgtgcatgctagttttttttggacgcctagtaggaaactgtcaagtgccaacttacacttctcaaagtgtcaagcacctgtgtctaactacatatccatgaaaatcaagcaagtcttctcaaataatcttgcattctcaaaacgacataattgtaaacttggttgctcaaggataacaaaagtgaagtgtttgctaaaaaatgattaatttgaatgagatacacgccttatgattaacaaaacccctcagctgttaacatgcaaaatatctgtgcatcaagtgaactgcagaaggctttacaccatatggtgaagatggcagcggactacatggtgatggatgtattgtcgtgctaaatcctcccatctcaacttccaaccacagaagttcttctcccatctcaaattttctgttcaaactccatcttgattgaattcatcaatagcttgtgctgattttagcattttcctgcaaggtttgcaaattagatatgcttatgagaaggacagaatggatgcagcacataattttagattaacataaacatattttatatgggaattaaataagtaggggtcttcagcccattgcagcaaatatctagcagtcagagcatctctaagtaaaaagattgatcacaacttgaccatgttacatgtcatgttcttactactgcttagtacaacttaatgaggtcaaactcatgtacttatgacaaaaaaattaggcttcactttttttttcgtcataatgcacagtcgagtagtagaccaattagaacacactgctagatcaatatcaatataagttagtcaaccacctaaaaatcactgctaattgacatggcatacacatactttggatagagcaacaattcacaagaattgacagagagcaaatgcatagttacctgactcttagaggaactccttgaggtcgagacttaagttgatagatatttgtgacctgataccgtgtacgaataaaatatttgccaatcactttcacaactccctgagtgtgtcaagtgattaatcaggtgtgcagttaattctatagaaattactcatcattgggtatggtgctcatcctatatcagggcatccaatgttttatagagaaattaagaaaatggaggagtgggagctgttgttaccattttatttacctgccctctgtccttgccattgttgatctcatgatctgtagttctacacacaggaaacattaaaggttaaacttgctaatacttacccaatatagttccaagcttacaggcaatcacccaataggccaataactgatggaacatagagatcgtttgatgaataattgtgtgaaacatgaagaatgaaaataattcaattgtttcgaaacatatcattccctcgatctagggagcaatactgaaatttttttccctaactatgatatcaattgcaaaccaagaactgacacgacttgcaagtgcatgcctcgtaccatctgattatgctaaaaatagatccatcaagaaagatgcattgagaattgacatgaaaacttatgccattgaaaagatcactttataataaaatactcacaagggaatcagtgtaagaaaaatgaaattcttggcaagaaataggagaggttaccttgcttcgtcatggagatggctgggatgaggtgcagcggcactgttcttggcaagggagagcgaggggtcggcggtgcgactgatcttgccgatggcgagtgagtggctggcagcggcgccaatctgagagagttggggtgaggtgggaaggaggaagcgtcgtcgaggccgtgctccgcgggagcagagactggttttcgctcctggtggatctccgtcgcgccacctcaaactccgtcgtcaggcggatctccggcgaggctgcgtacagcggtggtgaaggagatggccagcaagatcaagcggaggaggaggctgagcgattttgtggatggtgaaatcgtgtgtaggctaatcgattttgtggagagcgatatcaaggggaagaggaagctatcggcagcgtgatttcaggggaaacgattttttgctgcgccagggtatcagtgcgcgaagggatttacagcggcggggatggggattcggtgcgttcacacgtgggcccagttttctctgatttggcacgtatgattggagggcaaactactcatttttatattagtatagatgtagctttttctacaatctccgaatgtgaaaagctctcctaaacaatttaaattgtagtaatagaaagttgtagaatctagaaaaaaggaattagaaagcagaaattagaaaactcaaacttttccagattctcgcaagccagcttcttaaaatcttaagcttccttgtttgaaagtaatgaagataaagattaagtactacatgtacgtaaaatgggaaagtttttagcacatgattaattgagtttaattattttaaacttggaaaagaaatttatctaatattttaaagcaatttttatatatagttttttttgcatgaaatatattgttcaacagtttgaaatgtgtactgattaagataaagtctgtaccataattaagaaaaaacatggccggctagagaatgtccgtgtccttgggaggtgctagtagcatgtactaagccactgtttggagaactagtcaaaagttattttaaaaactgttttttagcacaaggaaatagccctaagttgtcaagagttattttaagagttattttttagcacaaagaaatagtcctaagttgtttggatccaagggtattttgagagctatttggcctttaatgcactttcccatggagagagacaaaaaaacactttttcagtggaccccacctgaaatagcctcaattagcactccttgagagggatagttttttttggtgggttgtttccgaataactttaaaatagcttatctgtttagaacttttgagctatttaggactatttaaaggagggctaaaagataacccatggatccaaccagggcataagacgactttctttattagatgggtcttgacaaagacttccctatgtgaaaaaactgtatacaactccatgcaagtatatgaaaaattagaaatgaatccactactcattggtaaaggagaaaatctcttgtatacctctaaaattttagctaatcacttctatacccttaaattttgcttacttctttttatacccaaaaatttgattttatcccttcatgctcctcatattagttgaccgcctaatttctataaaaatgaccatttttactctttggataaacataaaaaattatgaattgtattattgagaatgtaaatgtttgttacatgagactattatagttatgagtttgttgtgcgatacattatttttgacaaaatttgtttttagataataaaataaaatatatatatttatttttttagaaaaaagacgtaaaaatgaggagcattcgtataaagatagtactacagatgctcacgatatttttttagtgctcccgataaaaaaatctattgttatattaaatttcaaataaaattttaatttattacatttgttttatttttaaaatctatgtcaaaatctatctgcagagaatgattgatttatcctccctatctgctgcaaaaatctacagtataactgtaagaagaatctatattattgtaaacttaaaaaatagattaatatgatattttagaacaactttcatatagaaagttttcgcacgaaacacaccgtttagcagtttgaaaagcgtgccacaaaaatcttaatcttaatccaactctaattggagaaaagaacggggccattgttgcacacggaccatataatttttttttgaaattgtactgttgaagttattttttcttagaaatatacgagattccaacaaatttatatgaatagaccgtcgtggcggtttggcagtggaaaatcgcgacgaaatggcaagactaacacgcgatattgataatgacatgatgacgcaagcggtgttgcaaggggacagtacgagactgctttgtctcgctggttagcctagcgagaagggggtcccgcttgttcccctagcgacacagccggaatgacgtaattaataatcctaattagagattaattaattactagatatgctaattaaataataattaattgttaatgatgctaattcatgagttaatcgcgcgagttagagcagcctgcgcgtaccacgatcactaattctcgcgcgcgtgtcggcggcgcgcgttttaggcccagaaggcccagcgccactgcgccggcgcacgcctcctccacgctttttttttggtttttttacctttttttttcgttttttccccactttttgctgattatttttaatctttagcatgttttgagtttgaaagttttaaaattttgagttgaaaattttcaaatctgaacttgaaagtttttaaatctcgacttgaaagttttcaaaattttcaaatatggatttgaaagttttcgaatctcaagttgaaagttttcaaaattttcaaatctggacttgaaagttttcgaatctcgattctcgagttgaaagtttttgaatctgagttgaaagttttcaaatctaagttaaaaatttttaaaatttgactttaaaatttaaaacttgaatcaaaagatttcaaatctaacttaaaattttttcaatccgttagtaaaaaaagtccccaaaaaatatccagaatctttcctaattactatcattagtgttaagtatattaactaatataggtagttaagactaaaaggggaagtgcacgctagcggcacgcacgcgctagctaggagcccccgcgcgtacatgccacgcgacgtcgcgcacccactgcgctggtatatttctaccctttaaacgtgtatattcatgtaaaatcgatgaaaaaatatatattttttaaaaaattcactgaccatagatgaacacattcttagtggcaatatctgatgaatgccatgtgatcatgcatatagtttgattaaggacatatcgcacataaaaagtcaagaaaattggcgtggcataattgttggtgaatatttagataattgttaccgtggaatattttggacaaccgtttggaaggttctctaaatatatgatttatgaggaaaatcacatgtaaaaaccagaaaattatattattatagatttggatatatatatagctcttgtctagctccaaaaagtaaatttcatgctggacatttttatgtatgaattactatcaagtatggatttgaaacattgtataatcatgcgcatccatctttttcttatgcttatgatttaaattttaaattttaaaacttaatttttagagttgactttgtgggtttccatcgtttataacattcaaactaagaatgtgtatataaaaaatattaaccataagttaatgtgtttttttatttgctactaatataagtcatacttcctgcgtaaaaaaaaaaactcaatcctaagttgggtattttttacggaaggattagagataagtatatgcacaagctaaatggtggagcttcgctcattaaatgtttgatagtaggacccacatatgttagtagatgttaggggggaaagtaagcgtgtggacatagacaacaagaggcatgcattgcattttgtttgggcggcagtaagtgcgccttatcgagtctacctcccatggtcgtgggtgaagcaccatggtcggcgaccaatatcctctttttcgtttacttggacacccaacgtacacctcagcctctttccttccactccaaaataagaccagtgaataaatgaatcattaactctccattaggtttaggaaatcttgcaaaccactttaattgtgtgtattaaaaattattggtgaaaccgtttgtgtgcctgttaattaatcgaggcaaaaatactatgtaaatgattttcgtatgttccaactcccaaacattgctttttcacatgcgtctcaaaatgtccagccacctttgcctcaatgtcaatggacaacctgtggaaatatagaaaaccatatgcagtaatggtttcaaacttttaaaattcatggaaaaaatcactttaagtttgattgaggtgaataaaatagctctgtgatctttacaacaattaattcacaaaatattttattcaccatagccggactaaaaatgttttttttcataaattctaaatggtccaacatcatatactctctgtttccgaatataagtatttttatgatgtagattgtgtactccctctatcataaataaagtacttttgaaacattgataagtcaaactttttgactttgattgtcaatagcaaaagaaaatcatagagattacgtatgcaagaataattttactagatttatggtgaaacagactatcataatgtttaactctatctatttagaataaagttatctttgtagcatatccaaacatgcttatatttatatttatagacgaatggagtatataatataagcatttccaaggcactgattccaattaattcacgggaatccaatcatttcggttaatcatgtgcttaggtgggaaatccaagcaatttaaaattcaaattttgatcaataaggagactagaacatagggcctgttcactttgatgccattttcaaccttaccaaattttggtaaagttacaacaaaaagtggctatatttagtttgctgctaaattttggtaactatataagaaatcctgccaaaatttggtaagttctttttagcatcaaagtgaacagacccataatcttttcccttgggcttaatctctactaattaaacaacctaaaaatgcttatatctgaaactgatggagtatttaaaatagacgtaaattcatcctgaaatttttacaatttggtcctttttgaaaacttattttacaaatagacccctgggaaaacttaaaccggaaatagtcctttttggggcgccagagtggctg

SEQ ID NO: 23425 - DNA, 4770 bp, Oryza sativa
tggcgccgtgcccgtgccaccgtggcactagggctgtcgtggaggtgctgactgggcagaaagggggcgccagccacactggcgccgcccctcgtaccacggcgccagcatagctggcgcgcccctcctctgtgccttaaaccccgtgggccccaccacctttctcctccccactcccattttcgccattcccagcccgagcagcgagctgctgttcttctccctctctctccccctcacctctccacctcaaatccactcaatttgaagccgtatttcgcgggatttgttgtggaaatcgaagagaaaggtagactccttcattcccccttcttttttttcatttttattggttgaatttgtagatcggtgggtaaccctagaaccccttttttacccaaatttgtgatttttagcatttgttcttaggattggcttgttgtagtgctacatgtttgcaatgtactcattggtgtcatgatttttttaaccatatatgtggtaatgttaatttttggatggtttggttggatggatggatgaaaaattatggttgaggcatgacggaggtttgggttgtatgatagagtatttgtaatattatgatgagttgttggataaagataagtggtctcgtgcatacgatagaaatggccgccggtggggttacatgacaaccaacatggccgaacagttcaatagcgtgctagttggtgttcgtaagcttccagtgacggccatcatatcatttacgttcatgaagtgcaatgactactttgtgaacagacatgatgaagctttgaagcgagtccagttagggcagcgttggtccaccaaggttgacagtaagatgaaggtgcaagaaagtaaggcgaacaaacacactgcaaggtgtttcgataagcagaaaaagacatacgaggtcacagagaggggtggtataacgcgtggtggtgttagattcggcgcaagagccttcaaagttgaaggtgaggggaactcatgttcttgccaaaggccattgctctaccatatgccttgctcatatcttatacacgtttatctgattcatgcaattgataaggaatctcccaaccgaatgccgtatcagttctcttcaagagccgttgtgaaaacatgggcaagtcgctttgagccatacctcgaccccacacagtggccatcgtacaatggtgaagaatttgttgctgacccaaatttgaagattaaaacaagagggaagaggagatcgaaacgattcaagaacgaaatggactcgggtctgggtggttctggaaggaaaccaccttcatgcgttcaacttgatgctgcgccggtgcaaaatagatgctcgttgtgtcaccaggagggtcacaagaaaactaagtgtcctaagcgtccaaaaaagaagaagtccaaaaaaaatttaagtgttagggaggtaaatattttgttttcctactcatgttctcgcattcattttcttttaatatatgtcacattggtaactaacggtgaatttattactttttcatgtaggatggccgaggagggacaaccgccgacttactacgaggcccgtcatcgcggggctgcgatcgaggcggggagggtatgaatcggcattgattcacttgtgcataagtatcggtagcgtgtatttgacattatattaactaattgatttacaattgctaatgcaggtacttcaaccgctccgagtcagagctcatgcccccccagtgttcgacgataggtacatcccgtacctaagggctgccgggttgctcggggtggccttggtcgtgagcagaggaatgccagtgttcaacgctcctacgttgacagcacttgtggacagatggaggcctgagacacacagcttccacctccccagtggtgagatgaccatcactctacaggatgtggctatgatcttggccctcccattacgggggcatgccgtgacgggcaggacagagactcctggatggcatgcacaagtgcagcagctgtttggcattccactgaacattgagcaggggcaaggggggaagaagaagtagaatggaatacccctgtcttggctgagtcagaacttctcacatcttgacgacgatgctgagccatggcgtgttgagtgttatgcccgtgcatacatcttgcacttgttgggaggggttctgtttcctgatgctgggggtgacattgcttcggcgatatggattcctttggtcgccaaccttggtgatctgggccgtttcagttgggggtcagcagtgttagcgtggacatatagacagctctatgaggcctgttgtcgtcaggcaccatcatccaacatgagtggttgtgtgctattgattcagatgtggatgtggttaagactaccggttggaaggcctaagtggaggcatagcttcactccttggccctacaatgagccagacatggagaagacagtggcctacctttttgagagtactgccactgcacatgctcgggatgtggcatacaagcattatgtcaatgagatggactgcttgcagcctcaacatgtaagtacttccaatatcacttctagttagacatttacttctttaattgagatactaaccaacgacatctcttcaacttttgcagattgagtggttaccataccacacaaatgaggcttcaagcctgaccctgaactcgatgtgcaatcgagactctgactatttcatgtaccagtgcccattgatttgtttctgggcagttgagtaccaccttccgcaccgtgtcatgtgacagttcgggaagaaacaagattggccggttgaggacatctcaactggagttgaattacacaagtaaatatttcttatctttgtttgctttcattgtcaatgttcaattttgtaccatttaacccttgtcgatgctcactactgtttcatcaccttctacttgtctaggtatgacagggtgagaacaaagaaggtgaaagactggaggctagagcataatagatacattgatgaatggagaacagccggaaggaccgataggtacatcgagactatacaccaaaatcatcttttctcagagtaccttcgttggctgcataggacatataaactgttcctccgccctacttggacggaagccgacatagaggatgaccgcgactccgatgaggggcggaatccctatgatgtccggactagagttggatatcaaatggagcacgccccacttagagacagagtcgtaagttttcttgcatttgtcaaagttacttccatttgcaccctagaccctaacatatatcttttcacgctttcagtcgagagagctcctcaggagtgtgaatgaaatggggcatgccctctaagctccgaggggtggtgaggacacggagaacacgctccgcaatgttttagaggtaaaatttatttagcactttgcatttacttgagttatgcctaacaaacttcttttttttttgaaatgcagaaagttcgtcaaaggtgccgaaaacttgcagcaagattaggttgcaggtcggttggattggacgacgtgtaccaaccggggagactaccaccaccactacctcaatccgcgcgtccaagtactgctcgacactccatcaggatagaagagcgtgaaggagttggtggctcgtcgtcgtcacgcattaagcaagggaggggaaaggggaaggcgccggctccacctagcgacgacgatgacgatgaggacgaggaggatgaggactatgtcgcaccagacgccgaggagatagacatgtcacagcttcccgacgcgcctcaggggacgcaacccacgcaatacaacttgcgatccactcggacagcgaaaaagaggtaaaatgagcttaccattctcaaatgttatttgatttcccttattttgtttttaaaatgttttaaacattggattttcaaatgtaggtacactccgggctcgcaagcaattcggcgccaacggaagaagtaatttgtatgaagttaatctattggttggtagtatgacatatgtggtgcactatgtgatataaaatgtgatggactatgtgaggactatgtgatggacttttgacattgtttcatgtgtggaatataggatggactttttgcattgtttgatgtgtgggatatgtgatggacttttggcattgtttgatgtgtggaatatgtgatggactatgtgaggactatgtgatggacttttggcattgtgatttgtgcaattggaacctgttttagtctgtacgaatttgtgaattgtgatttgaattgcaaactgtgaattggtacatttgtgcaatatggatcttcaatttgcagagaggcagagggcggcgccaaccaccctggcgccgaggttgggaagggcggcgccagccagtgccgcgaggcagaagggtttcgggctgggggagggcggcgccagctaccctggcgccgtggtccatgagggcggcgccagccgaggcccggaggcagaagggcttcgatggggggaggaggggggcgccagccaccctggcgccgcggtcgggggggggcgccagccgttgcctggaggcagaacagacttggcgaaaattttggggggggggagaaagttggtggggcccgcataggaagggcgcgccagccatgctgacgccgtgatatgaggggcggcgccactttggctggcgcccccttcggcctagtcagcacctccacgatagccctattgccaccgtggcacggg

SEQ ID NO: 23426 - DNA, 13246 bp, Oryza sativa
aaaatttcagtaaattcatctcctacaggcacttttttttttctgtggttgtattaattctctattacttagatgcagtcggatgctcgtaagcatggacgtttacaaacaaaacctatatcagtcaatagtttccggatttgctaactcgcgcgtactcgctgcgggcgagcactccggcccaccccggcccacgtgtacacgcggtccatgtcgctcacagaggagtagtgcgattagcgcgagggaaacctgattagcatcaggattagcatgctgatttttttacgagtagttaggccgagtagttagaccgtaattattatttcggttaaagtttgaaaactttctactcaaatttaaaaacgtttaacttatatttaaaactttcaatttaaattttaaaactttgaaattaaaatttaaaatttttaagtcattttaaaaagtttcaacccagatttgaaaactttcagcttaaaatttgaaaactttcaactcaaatttgaaaactttcagcacaaaatttaaaaactttcaactcaaaatttgaattttttgaagtcaaatttttaaaactttctacctagatttgaaaactttcaactcaaaatttgaaaacttcaactcaaatttgaaaactttcaacacaaaatttgaaaactttcaagtcaaaatttaaaactttcaactctatatttgtaaagaggtgtgtgaaagattgaaaaaaaatcggaaagaaacaaaaaaaaagaaaaaagaaaaacgcgttggaggagaaaaaaaatacgaaaaaagaaaaaaaaagcgcaaggacagcccagctgacatgctgctggcgcgtacgcgcgcgctaggaagccccaatagtttcacatgagtaaggaaaatgatcatgagaggcctataaaaggaccatcatatacccatatatacatctcatcttaggaataagtccacttgccgtccctcatctttccgctgagtttaattgttatccttgaattgcaatactagaaatcttcgcccattatcttcgcaaaaccatacaaattaaatcagatcccatagtagtatgcacggtcgttttaactgacgtggcatcatagttagtaaaaaaagagcccccaattgtaagtggcctctaaatcccctattttctctttcctgtttccccttgttgaagcggaggtgccgcggcaccaggggccgaccaaaggaggttgcacttcttgccagtggcggcgccatcatgaagcatcaaggggcgggccatcgccagcacgaggagccggtggagatccattgcattcatgcagtggtcatgaagcttgaaaaagagcgcgttggtggaggagccgtccttcggggtggcggcgacggcggcggccgcgagtaactagcgtatgcatttggatggagaggtcggcaaagcgggggcaacggaggtggcggtagatgtggaaggcccttctagtgcaccaggttcaccgttgtggagaccaccttggcctcagtctcgtgctcatgctcggcgctgatggttggggccacttttttgctgcggagtggagagggaagtactagagtgggctaacaaggggtgaggaggagaggcagagctcgccgggggccatcgactagagggtagacgaagctcgctggtgggaatctacactgccgccatgccgtctccccccacggatgcgccgcccagtgacctcatctcgaagctcgatgcagcggtggccagtgaacacacttgtgtaccgctgcccgcggcacatccttcacccacccccgccgaccgatgacgagtgtgctccgattagttcccttttgacgctgaggtgctgatggtggaaatggtgaggaccagtgcggtggccaatggcatggaggtcgagctccctcgtcctcttgctccgtagcagcctcgcaagctcctgccacggcctcagatgaggtgaagaccggaagagaagatgagagagggggagtagaggaagaagatgagtgcctacttacatgtgggccccacatgtttatttttatttttcgctaacttggctgctacttcagctaaaacaccaatccatactgctttgggatctattttgaacggttttgcaaagataaggggtgaagatttgtggtattgcggtttagagatatcaattaaactcggcgcaaacatgaggtacgataaatgaacttattcctctcagattacatggtctgagagtactccaatttgggccggtcctggaagtttcttgtgggccggaaggctccatgtcaggagagaatatcactttgcaattggagcatagagagcataattagcatgattctgccactataaccactatataagcatatgtactgttggtttatattcttccttctacctattgaggggttacactttttctaggcctatggcaccaataggcatataatgtaacgctctaatccgacatgatgatatctcctgagtattcaatgaccacttgattacctttcttctctgactatccaaagtttttgtggaaccttctatttttctccaagagtaggcgttgggcattgtttctataatttagctggtacgaattatctaacttctgttgtttaattaaaccacctactaaaattaagtaggataagtttagacatataaactatacatatggactacttatatggaaaatttgggaaccatctgaaattctcatggaagccactttagcaattatgaagatccatggagaccaatttcaataaagccttatcaaccaaatgtgttcttgtacaaatatttaattgcaaaagttatacagtgaataaacatatacattctagccatgtgtacatcctaagccataggagaatacacactgcacactaccagagaaaacgttctgcagatggccaaaacacatttttaagacgggcaaacactccgcttgtaactaaaggcctgaaaaaaacaatttttacaggggagcattcatccacctgtaaaaattaatttttttaaagataggtaaagctgaccacctacagagacaattttcggcaaaaaaaaaatacatttaaaaatatcaccacgcagctgccttgtccggatcaggcacgggggtgactgcacgagcgtgcagtcagcacacatccaccgtccgagccatcccacggaagcccacgctcacaagcgatagactgatagcggacacacctctggactccgataacatatgcgttcattgtcgctatcgccgtcgccgttcacggcagggactgacccaaagctcttcaccgggatgcgccgccaccatagccaccgggagctgtagcttcctcgttgtccccttgagcgtcgtgcacgtactccactggttcatcttcctgctaggactggatatgcagcaattggaagcaattcaacatgcatgctgcctgtgaaaaaacttggaaaatatggatgcaccaagaccaagtagtagcataacacgattacagttacaatgagcagcaagcaaagcttgcgttctgattcgatcgactatgcagcaagcaacgtattacgttatgtacgcattcaatcagctggttttctacagaaacacaacgagaacaccttgtcacgcttgcctccagctgctgctgcgccgctgccgctacagacttgtcctgaacggaagatgggtcggcggagattgaacacgacgtactctctccatcccaaaatgtaagcatttttagcgcgtgtctagatccatagctaaaaattactatattttgggacggaagtagtacatccgaggagacagcagtgaagcccgggtctcgtagcggtcaatggtggcgtatgccggtggaaaagcttcaggtcactcggctgacggcagcgcataccggcgtttgagctccgggccactccccggcgcaggcgggcacttcatcgctgctacttgctgggttttcgtgggcttcacgatggctggttctgtcagctatggcgtgctgcctcctgaggcatcggatggtttggacggtggatgagtgctgaaggcacgcgcgtgcagtcaccccgtgaaggcagacaatcttgatccgccttgtcccatttacacagaagaagcacaatgcaaatcaaatcaatgtcatcacacaaatgagaatagcaagatttacatattccacagaaaaaagaggaaataagggaggaattatagatctgaatgtgatgtgagaatggaaaaaaatatacagacgttttctgcacatatccaaaaatatttttttctcaatcctagaaggtacgtgaatagttagataagcaatgactcacttaactcacattaatgatttgatatctatatacctaataattaaaaaatacgcaaggtttccggtagtaaatttcgtccgtcccccggtttatccacgcgagcgatccatttttgaccgtgcgtttaacgagtccgatctgttatggcggatgttgcctcactaagaatatttattattattaaattttagcaacaccctatgacacaagcatcataattcctagttggttacccaacgaagcttctaaatggtaggtttggagttcgactcccaccaccccttagttttctgctgcttaccctctcctatttttcctttttctctcctaagctgattatatatttttaaaaagtacatccatatatctgaaattcatattaaaccaacaatatatgcaattttttattgtgcttttctacactttatcgcctcctcttattaatttttttttgaaaagtatgtcctatttttttctctcttctaagcttgattatatattttttttaaaagtacatccatatgtttaaaattaatattaaaccagcaatatttttaatttcccattgtgtttttttatcacctcctcttattaattcattttgaaaagtacgtccatgtgattgcaattaatattaaaccagtaatatatgtaatttcctactgtgtttttttacattttatcaccaactttgtatttttttttaattgataacataaggaatatctttcaaatgtcatggtgaaattcatgttaaaccggcatatatataattttctactatatttttctatacattatcatcttttttattaaaaaaaacctagcattttatcatcgatcttttaaatgtcatggtgtaaatcttgaatacccataattaaaatcttgtgtcggccattgggttggttgtgtggcctcgtgcgcacatgtcttccaggatcgttatcgatcaagtttatattatctattttctccgaactagaatttccataaacattgcaaatatgttgtgctactgtgggacccacaccatcaaggttcccaacaccccttggatcggaactaccacatgcgaactcaagtgtgtggttagacggactcgagccgtcgagcgcatgagtagctgcctgctaatgatgagacgcaattaatcctatttaatactacatctatcttaaaatgcaagtatttttacctatgtccagattcatagttaaaaatgcttatattttaggttagaggtagtaattcttacttccaattaaacaataatctccaaactagaatatattttaaagtatttatcaaatttctaatcatgtaaaatatcaacaaggtgaaatccatagtcattatcttttttagctatctatgtgtaaattggtaaagctgaattaaattaggctaaatttccatttgattatattgttcctttgtagaggtcgaccaagttgaaggaatctattcttccaatttgatgaaaattctaatgcatttttttaaaggtatacatataatagcatacattactttttaaatatgtatgatcaaattagatttatgattggctacaatgcaatcctgatcgaattggaatacagatctggtggcttgtatttctcaatgcctaggtgggtccttggttatcttcatattagtgctatcattaacaaatttgaattgttatcatgtttctcctcacgtgataaatcatattcagcttcagtaacacaccgtttattagttcgaagagatatttgcaattaagtgaagcaagcgctaggagatagattgccatgtgggtcaacatcatgatccatgatataaaaatactacgcatgtaagacgtcatgaaactaaacaattagttttttttcgatgcaacacacgggcattttttctagtatattttaaaaatagaatgacctacgtgacaccaacaagttaaatgatccttgttgcattttagtcaaatataaaatgtgcgggtgtgcagcacatccaaacgtgtctatatcttcgtataaaactatggctctcaacaaacatatctgcaacatatctctttcatttcgaacggtcaacaaacatctcttctttttttatattaacaaacaaacatctctttgaattaacatggagatggcacacgtcaaacaaaaaaacaaaaaaaaactgggaaacggaatcaaattccagcaacagcataaataaataaataataaataaataaacagcataaataaataaataaataaataaataggtctgctacaaaacgggatcctgttgtaacgggatagacatattaactatttcttgcacgagtatcacaggtattaggtcctaggtatcgcaggtaccgggtaacaggtatcacaggtatcgggtaacatgcagctggtaccacaacagatatcagatatcagtactgtctcttcttataaggataccgttgtctaggttttctgataaataaacccccaaacaagcggaaggagccaaccaatcaccaatcaccgaaaacaccgtgcagcagcgaaacagcagaaacccgcgagcgcagaacggaaaaccgaagtctcctcgatggactcctccgcggcgtcggcggcggctgcggcggcggcgccggtggtgctggtgacgaacgacgacggcatcgacgcgccgggactccgcttcctcgtcggccagctcgtcgccgcccgccgctaccgcgtcctcgtctgcgcgcccgacacgtgagtgttgctccgcttccccatctctccacccccttccccctcgtgatcgatagagcgagtgagcaaaccctcgcgtctgcctctgagattgatttccgtagtagggggggggggggagcgcggcggtgctgtttgtgaatggtgatcgattggttgggaattgggagttggagttgaattggtaggattaggaactaggaaggagcatgtgggagagaaggcgaggatttcggatgaggaatgctcgttttgcttccctctttggctttctcagctacaaagaaaaatatgaatgaggagagtttttttttaataaaaaaattttacccctctgtaaatttcttgctacctacagaagtacagattatatagtttacttcgtttatgttctccgtgttgatcgctggtcttcgaaatggagaaactaattcagaatcaggaggattttgataatgaaaagtagtagtggtgattagatttttgttattcggggatgtttttctgtggttttggtatgctgtagtttgctaaaagaagcagattttagggaacatggaacctataacagtgtaactgaacttctcttttcacatgatggatcatcacaaaagcaaggaaacaaagcatagatttaatcatagtatacgggtatcaagttttgcaagatgctgtgttcagaacatggaatctgttccgttgaagaatattcttacctgatttttagctccaattacatcattcggttgccaagttgtggtaaattaaaatgcctttgtgggggcaagtgttttccgaatctatgatattggtgtactaaatcaagtaaaggatggttcattcactgagttatttcctttgcaaaatagtggtattcttgagaagaaaactaacacactatgggagcttttaatgcctcgacatgaaaaaaaaaacagagggcttccagtagcatttattcgcggcatgtgatcgtgttcctctaatggcattattcttgtgcttcaaatatgcagagacaggtcaggtgttagccactccatcacatggcgccctgcactccgctgtaaacgagttgatatagatggtgctacagcatttgcagcctcaggtcttgtatttttgactgatatcatctacatatgaacttccttatagactattcaatgtcaaggacagtgcatgtcaaatgcctaacactacacttaaataacaatagggactcctgctgactgtgcttctttaggcatatctgggaagctctttgatggtttggttcctgatctggcaagttttggaatttcttcatagataaattgatgtccttttatggttttatgtcatcttcaactacgaaaaggtttaccagtaacgcttggttttcattttactttatttcatccataatgcaggtagtcagtggaatcaatgttggcaacaattgtggatgccatgtgtaagtgtatcaatccatgcatattcattatctcaaacatattgtcatattgcttctcccgcatccgcttatttgaatacctgttggtactttacatgtgcaattattgttataatttccatgtggaattgcattctgatattttcaataacaattactgccatgatatagttttgctgttttttaccagcggtatagtgttaaaattaactgtctggattgtacagatcataaaaataaaaataaaaatcaacaaatattttctgacttctgactgaagccattgtttgaggtgtcctctaaactatcaaggaattagtactgtaattgcactggatcatgagaactttatgcttttattatgcagtatctattctggaacagttggcggtgctagggaggcattcttgtacgggattccttcattagccatgtcatatgattggtatgcaaagatttttttttctttgctattattcgctgtatttgctcctctgttgttcaaataacacatttacatattcagcatctactagttatctgactagaactaggttttactgtcatatgagttgtctgtttcatgtagaatgtatatatagattggcttctacagtttatctgttggtcaagctttcagaactatggacttgtttttatagttagttatatccattcttcagtacatcctgcgtactgtcattgcataactaattccaagagaaaataccattgaaagtggactgcaatgtggaagatgatggattggagtactgttatctacagagtagctgatagtttataatattctttgaggtttttctttccaacggatgtttagcaaacggtatgatttaatagatactagtctaatatgggttcaagttctttggcctccaccccaagtatacgaatttgccaatgactctcattcatgaagcaagatttatttcttgtaacattccctgttcgcacattggaaaattttaagtaactgcactaattagtagaacctttaatctgtattctacatgttgggctctccccctgaaggtcagtgagatcccattagcccgttgggttctttacaaatctaccaactttcagctgttaaacattaagttaatttgatgtatgtatgatttaatgtttgcaagttcacctttttattttgacttttcatgtgctcaagtctatgaacgctactagttagtgaaaactgaaaactagagtatccagtttgacatcccaattgcaactctcagggtcgcaagtcagagcagtgttaacgacctcaaagtagctgcagaggttgttatgcctctgataaataatgtgatggctgagataaagaatgggacatatcctcaaggatcattcttgaatatagatataccaactgatgctgcacaccacaaggtaaatctctagctgtaattttttagtaaattactccattctcaaacagatgttgttagtaaattacttttatgctgcctatctgtagggatacaaaattacaaagcaaggaaggtatatggccagaattggttgggagcaaacagtttataagaagcctgcggtagaaagttaccagacagcaaacatggatgttgacagtgaaaaggacagtgaagtagatacttcatcagagaatgacctattgtttaaaagagtggtaacttcacattgctccaagaaacattttattcttattctttcaagcacatttgaactgcatctgataggtagccttctagcaaaataaaatttactgtaagatctgtagcataaactgtttataaaagaattttggaattgactctcattcttctaaagtcgtaattattcttcatttcttccatataatatcaatggtaatagcaaaccgtttataaaaagagcttaaatgagaagtcctgtaggtacaaggtaattcacattccacactcataaatggggagcactcttacatgaatgataaccgttacccatggtatatttatgctagctagctattgattattgttggaaaacattagagtaaatataagtttgttcttttttgtgagaaattttgttaactagctctgattaaattctgaacagcttgtgaggcgaagttatgatgaagaggaaggggatgatatcgaccacaagtgccttgtagatggatatgtaagaatgacctaaatattctcttcataaaaaagaactgactactatacactttccattttctgatagaattcatcctcagataagtatatattgtttgttccagattactgttacccctttgggagctctatcccgcgcagaagctgatgtcataccatactacaaagcttgcttgtcacgtctgtatgatctttcttcttcctccttatagtggctatttattgcacttctttatttgaggttattttcaattgtggttatttattgcacttctttatgaggtcattttcaaatgtcaattctattttttcttgccattggttacttttgatctttcatcttctagattaaagaggtttgagtccgagggttcacctcggacctacatccttttcaagaaaatgccacagatttgtgctactctttttttttccgttttttacaccaaaaaaaacacactacacccagagacataggtcttttcaaacattacgatatactccctccgccccaaatataaggggttctaggttttcttactataatgtccctcattatgtggtgaatgggaatgttattgggtgtaaggttggaagaaaaattgaactatggatgattaattggactagcattactccacatcgtccgagggttcacctcggacctatatccttttcaagtaaatgccacagatttgtgctagtttttttttcattttttacaccaaaaaaacacactacacgcagaggcataggtcttttcaaacattaggatatattcccttcgccccaaatataaggggttctagtttttcttactataatgtccctcattgtgtggtgaatgggaatgttattgggtgtaaggtgtagttttgtgatttttcctctagaagcttcactccatttcctttctcatctactatacatatacattggtggaatgggccctattgggctgaaatacacacgcctacactcaacactccccctcaagatgggcgataaatatctatcatgcccatcttgctacacgaagaagtgcactctctagcacctaatgccttcgttaaactatcagctacttgttcaccagagtttacaaagcctaagtttaaggttccctcatccattctctctttaataaagaagcgatctatttccacatgcttcgttcgatcatgctggactggattgttagcaatatttatggctgatttgttgtcacaccacaacttcatggaagtgcttgtcgacagcttcaattcagccaaaagatttttcaaccataacaattcactcaagctcattgacattgacctgtattccgcctcagcagtcgagcgagacacaactgattgtttcttgctcctccaagataccagattgccaccaataaatacacagtagcctgatgttgacctcctatcatcaagacaactgccccaatctgcatcacaatatccctccacatctaggtgtccattcttcttgaaccatatgcctttacctgggcttgccttcaaatatctcaaaattctatacacaacatccatgtgaccacttctaggatcatgcatgtatcggctcaccacactcacagcataagttatatcaggtcttgtgtgacaaatatatcaaccttcccacaagtctttgatatctctctttattaactggatctccagattcagcacataacttatgattttgttcaattggtgtagaagctggccgacatccaagcatacctgtatcactgagcagatccaatacatactttcgctgtgaaagaactattcctctaggagatcttgcaatttcaatacccaaaaaatattttaattggcccagatccttgacctcaaactccttgcttagattttgtttcaacctagatatctccaagcaatcatctccagtgataatcatgtcatcaacatacacaacaagaatagttttaagacctctattatggcgatagaaaactgtgtggtctccattgcactgtttataacccataccacacattgcacgtctaaagcgatcaaaccatgctcttggtgattgtttaaggccatataaagattttttcagtctcaacactttaccttcagtttgtgaggtagcaaatccaggtggaatttccatatacacctccttttgaagatctccatgtaagaatgcattcttgacatctaactgatgcaatggccaatcaaaattagctgcacaagagataagagttcttaccgtgctcatctttgctactggtgcaaaagtttcatcataatcaattccatatgtttgactatatcccttagccacaagccttgccttgtatctttccacatttccatcaggattttgctttactgtataaacccatttacagttaaccactttcttccctttagggaatggtacaaggtcccatgttttgttcttttcaagagcctctagctcctctagcatagcttgatgccaccttgggtcttgctttgcttcc

SEQ ID NO: 23427 - DNA, 6232 bp, Oryza sativa
  unsure (1)..(6232): unsure at all n locations
tgcgcctccaaagaccttgttttcctcctagtataaacttgtagattttcttcttcacgtggccttctccaatttttctcatgaatgggttcactaacaggatatgggattgagccaaccacaaatttcatgcttcttgattgtgtgtcttcttcagtacctgatgagccattctccccctcttgtccatcctcatcaataattggattgtcaagattaacaaacaaggaactcaaatctgttctttctccatagaacggaacagactctctaaaagtaacatccatactaacaaaagttcgccgctcagatggactccaacatttatatcccttttgcccagaagagtaacctataaaaatacacttgacggctcgaggatccaattttccaacggatggtctatgatctctgacaaaacaagtacacccaaacacttttggaggaacaatgaattcatttttcccaaacaccatttcatatggagtcttcatcccaagtattcgtgatggcatgcgattgatgagatatgttgctgtcatgactgcctcactccatagaaactttggtacattcatcgtatacatgagtgaacgagttacctccagaatatgtcgatttttcctctcagctactccgttctgtggaggtgtgtcagcacaagaagtttgatgtactattccttctgctgagagaaaactcctaaattcatcattcacatattctcccccattatcgctcctaataactttaacacaagtgtttaattgattcctaacccaagcatagaaattcttgaaacatttcaatacttcactcttgtgtctcatgagatatatccaagtcattcgtgagtggcaatcaataaaggtgacaaagtactttgctccacttaccgaagcaataggagaagtccatacatcagagtgaaccaacacaaatggcaaaatgcttcgaagtcctctgcttatgtatgtggttcgtgtatgttttccatactcgcatgcatcacacattaatttgcttttgtccaccttactcatctcatcaggaaataccttagacatagtatcaaaggacatatgtcccaattgacaatgttttagaatcaatttagcctcctcttcacttgtgctagctaacaaagcactacatagtgctttgtccgtccctcttctatccagataccacaacccattatgcctaacgccggttccaagctttcttccagttcttctctcctcaattagacaattctctcggtcaatagtaattcgacaatccatatgatcaaccaacgagcttacggatactaggttaacaggaaaagagggagcatataaaattgacgacaatgtaattgatggagtacatttgactgttcccactcccctcacatgtcgtaaagttccgtcggcagtttgaattgtttctttaaatgatgactgaaatggagtatatgatgtaaactcactcgacattcctgtaacatgtctagatgctccggggtctaatatccaagttgagttaggtacctgcataggatgtgcgagattaacaaagttgccaagcactgttgttttctccttcactttctgaattcttccccttatttcttcaacttcttcagccaatttctcaagtatttgctcaattccttgaatttcccccatggcagatcaaccaaatcttctaggatactagccaaatcaattaataggagtaacaacactactcctcagtttctcaccaaaaacagaacagcagcagtagcactacttcctcccagcagcactacttttcagtttcccccaaatcagcacaacagcagcagcaagccaagctctcgtactcagtttcttccccaaatcagaacaacagcaacagcaaaccaagcttccgcttcacctccaaatcctcaccttctcaagtagcagcagcaccagcaacagcaccaccaaagtcaccaccactggaacggacaacaatagccaatagcaccaaatccttctctgttgatcctacagccaatagctgcgcgtctctcagccgctgtgctccctacagcttgtgctgcaccaaatccttgcgcagctcaaccagcgagcgtgcgccctgctcctccttcacgctgctcgcgtcgagaacctctgcagcagccgtcgccgcctccgccgtcgacactgccgctccacctccgctgtccgacgtcgccgctccgcctcagccgtcgacgtcgccgcagaacccctctggtcacagcgccgccgccgactagggttcgcgtcggcgaggtcgccggtgacccagctctgataccatgtagttttgtgatttttcctctagaagcttcacttcattttctttctcatctactatacatatacattggtggaatgggccctattgggctgaaatacacacgcctacactcaacataaggtgggaagaaaaattgaactatggatgattaattggacaagcattactccaaatccgttatattcggggataaaatttgaatgattctatcccttatatttggggatggagggagtagcattgttccccacaggcaaagtgatttttcccacttccacgctatatcatttttgtaattggcctggcatattctcatacattgacctatatatattgtccgttaattcttgccatgttaattgttagttctcatacattcctgtttgtgtaatcatcacgatggaaaaaaaaagcattttaccttgtttcctagcatcgcaactttgcttttcttgttcgtcacaattaccatgttttgtagctggtggtgtggtaaagttcatatataaattcggaaacaaaagatgacatgttacttcagtatgcaactgacttttctttcatgtgatatttttcaggtgatcaggatacttttgtggcccactaaactgaaaaagttggtgtcatggttgcaagttgcaaataaagttgcatgaatttcagttattctagatgattgttactgatgtattgccatattatgtacttccgtgattattcagagcatatgtatcacatagctcttactatttataactacagttccacaataattctttggtattatatttttctgagacttgttgcatatagagctatatcaattacgttttcaaacttctcccaacttattgaatcttgttgaaatccacttgaaagacatcaatggaacttatacaatatgatgaaatcttcaggaaaccggtctggaaaacaccaagaacagataatctgaaaaaatcatgtactcttttaccgtttcagaactgaagcaaaatccatagaatgtcaaaattggaatttgaagcatcattgaaaaatttgaaactagtctcaaaacgtctatgaaatgtgccagaaacctactcaaacgtatgaagtatctagaccacaaatcccatctcattgcaataaatattctgctcaacaaaataccaaatctttgctcaccaactccacataaaaaaaaccaatataccgaatacttgtcttcttggtgatcacaacacctcatgctattgtcggcatgccatatttcactgaagatattttgataatttctttttacaaatacagttcgtattgtcatgtactccacagccatttctagaatctttccaagatcaagaaatttaatttggatcccatcattccatgctcactaaatcgttaattaatatacctaaaacacacatcatcacagtggtcctgtactcatatacaatttcatgaggatgaccacttggcaggcacgcttgcaggagaaaacgagagcaagggacacatcaagcaacaagaaattgacaggctattaaattattatataaccaaaagcagagacagatacactctaccaacctatctccaataccacaatcaagggtaaggcatttgagcaagtattcaagtatgtatgtatgtacaaatgagctcagcctcacactctttatcaacctcaacacatgacactcacaggtaacaacatttcacccacactgggtgtttttctttctttttttttcgacgatggaagcgaaactcctagcctccgcaccaactaaggatgcacacgaccgaatttcacattcactaatacaggatgcgaatcggacaccgagaaagaagataaacaaacctcgatatttttttctctcatttcttttttggagtgcatgaatgcaaggacaatggccaatgaggatcatcatcatcaaagccaaaaaccacaccctagaatgacttctcaggaaaacccttcccttagtctctacacaaagtagttctgaagttttgctgctcatgccatggcctcaaacttcagagcttcagcttcatgagagccggatgacggtgcgagtcgatgaggatcgaccacaggacatgaacatcctcatcctggcaggactgaacatccttgtacaagatatacattcccctacctatcaagaaatgcacatatatgttcatagagaaaacaggcagcatctccacaataacatgttcgaaatgaagaaagaaaccgtcatgaagaagaatgtcgcatagtttgaaatgcatagaaaaaccatcatgaagaagaatgttgcatagatttgcaggttcatgggcagagaaacttacggttcctgcgctccgaatgcgcgcaaacccagagcctcctgagaggggagaagagggagtggagccaccccattgaggaatggtgaggaagagatagtgtgcaaatggaaggaaatagagggggttggggggtagtagggttagagaggaggtaaccatcagctctgttgcttttggtgatgaggtgaagtctattgcactttaccatattgttgtgcttccttgcaacccaatcaggggtgtcatgagcaatttattctggtatattgtccctttccactccttggtcttccttctacctcattttttctcccattggaacggctatttctcacactttaacctaacctccaagagaataacaatgcaaggtagtacaaaaccggaatgattagtttgcaaaaatgattttatttatgtgcatcttctgcaggctacaaatatcataattcaacaccaaatttgtggggttctttggtccatccttcaatttgtctccattcttatgtttggtgctatatcttggtaaaaaaaattaaaaaaaagagataagaagtgactaaacaattatttttgaatttggaacctattggatttggatcaaatattttaaatactagctaggtgtaggcttggtttttagtttgtactagtaccacagataaataaaccaatcatgtatttcaagtaaccaaataagctttcgaatttatattctactcgactgttagcatatacattttttctaatcatgtctactcttctgccggtgtgctgctcttatcaatgcgtgtatatattttgcccttgacaaagacagaatgaccttctttgagatgcaaaagaagaaagcacatgatagtgctataaacgttcactagtgaattgaaatacaacaaattgattttcttaaattgatcatattttttttagaaaaacggcatgcatgttaatacgactaaaaggaccattattcatgttaccatggatttcatgtacttagaagaagatactagcagaaaataaaactgaagagagtataaagtgctatattcgtcctaaaatataagaagttctaagcttatacacaggtattaaaaacgttagaaattatattttagaatagaatttcaatgttaaaagttgttatattttaggaccgagaagtagcaaatccctcaacagcaacccccccccccccacccnnntnnnncccaaaaaaaacagacacaaaaagggnnnctgnnngncgacgtatgtttgttcttctaaaaatggtcatgtgttatgaatcttcgagaacttattctagtatatgcaccaacgttaaattgtaaatgcaaccgtaatcgcatatgttttacttacggattttgccttctagaacacagttaacgtattggtcaagtgcgtgctgttcatactaaaatcctgaaagttattaactggttagtggtctgctagctcagcaagcgtcctaaccttccaggctggtggggtgtttgttttatatttttctaattactagcaataatgcccgtgcgtttcaactggtgatgggtaattttaa

SEQ ID NO: 23428 - DNA, 25778 bp, Oryza sativa
aaataaaaaaagttcaacgatctaaagtgaacatattccatacggaggtgtgtgcagttcatgaggcggcccaatagtgtgggcggcctgggaacagaatcggggacaacttaagggatctaaagtgaacttatttcgtgtgggcggcctgggaatggtgtttggcccgacgcgagagaagttgtagctgtacgatctgatggacggtcctgattgatcccgatctatataaaagttcaacagcccaaccctaaccctaaaaacatttcctttcccccctttctctctctcaacggtggcggcggcgcctctccccctccgccactcctcttccaaccccaccgcgcagcgcctctcccctctgccgctcctcctctcccaaccccaccgacggtgctgctctatctcgccctcttcccttccggcgggagatgaaggcagcaggtaggggcggcgccctctcctccgccggatctagcaggaggggaggcggcggcatcccggcgtccctgcgaggcctctcaccttccgcgcgcggcggcgcctgtaggatcgagatgtcgactagaggggggtgaatagccgatttaaaattaaatgacacctaatcaaaactaacctaagttgctaggcttggtgagggacaagactaactaagcaactaagttatgttttgcaatcctagggtgaaagtggctcaagtatatcactaggaaagtaaatcacatttcctaagtctagtttaggaatcctatggtgaaatgatctctagtatgtctctagaaatgtaaatgcaccaagtaaatgagacaaggagacaagagatttttcaccgaggttcagaaactcgccggtttcctacttcccgttgaggcgagcccaactccaacgctcaaccacgaagccaccacacgcccccttcgttaaggggtgggcaaggcgggagccggcccatggagaggactagggtagttcttccttcactccgaaggtggtgaactccaaaccattcacaaccggcgccgggcctcctccacaatcttctcggagaggtcaccaggcaacttctccacaagccgtctaggaggcggcaacctccaagagtaacaagcaatgacccggcgtggagatgatcaatcaagtgccacactagctctacaaatggaagcaatgcacttgactcttggctaattaaccctctaacacactagatggatgaacacaaagctcaagtgggtgtgagagaggtgcaaggggtgtatgcaattgaattgggtgccaagagagtccccttgctgctggaggtggagtatttatactcccaccaaccaaaactagccgttgggggcgaaatcccccaactcagtgctctgccggtttgaccggaggtatgtggctggtcagaccgtgctactctacaacggctagttttctagccgttgtagggctgtcattgggccccactgcctaagccggtcagaccgacatggggtggccggtcagaccggcctcggctcagtcagaccgccatcagctcggtctgaccgaatatggctttggcggctcgggatcggcacacccagagcatgccatcccggccatatggctggccggtcagactggcatgtacccgccggtcagaccgccactgcctggccagtcagaccgctactctctggccggtcagaccggccagggccgttggtcagaccgtcactatgtggccggtctgaccgcccctggtcaggccacagtgaggggcaaagtgtttatgtgtgtgttgggagaatgtgagcacaagtgaaaatgtaatgatctaatgtggcaattaaaatcatctcattgctaggccattaccccccttgatagtacgacgaaactataaataaactagcacaattttgatcgcccaacgcctcgatcaattcaaaatgaaaacactagtttaccgtcttctcttccttttgctttgctccgtcaattttaatccatcgataatcatccatgcgcacacatgatgtgaacctaacttaaagatatagctcaaaagaacggttagtccacaattagcgcttgtcattaattaccaaaattaacatcgggggcctagatgcttcagcgcccctccgccctcacctcctcttcctcgccatagggccgcggtagggctcgacggtggcgggcaacgctctcccctccaccggatctaggaggggaggcggtggcggcccagcgtctcggcggccccctccaccggatccagtgggaggggagcagccggtggtccggcatccctgcgacggcggtggcgattcagcggcgacggtggcaccctccctttccggcatcggtgttttcttgtgttcttgaatttatgcggactcgttttttaccatcggagaaggattgaagcaggatcgatcgcacgtgcggtgtaaaaatttattttttgacaatatacgtatatagatagatagattgaatcagactttcttttttacatgttttttgcgcccttttctcgttattatgggtgacagaaacatttttaattttttaagtagtagggataggctgtgttcggcactacctgttcccattctctcctcctcattttccacgcacacgcttttcaaactgttaaacggtgtgttttttgcaaaaagttgcttaaaaaatcatattgatctatttttgaaaaaaataggtaatacttaattaatcacgtgctaacggatcactttattttccgtgtggaggaaatgggttcccagttcgggagaacgaaggcagccatagtctttcaggattatggtcttataattgtttatgctttattcaataaaacttcacaccgtctaagtatcggttaaaaaaaaagcatcctaggcaattactgtttttctttttcaaagtagggatgtttttctttttgggtggacaagaaaaggagcaaacttacacttgtgggagcttctgctatatgttgggatctgtggttgagtaggaatgatatggttttgacaaatcaccatctatttcatatatacaggtcattttcaggcaacatattggctccggttttaggcacaactataaaggtgtgatgaagatggagagtttttagaagttgcatgtcataagtttgagatgatggttatgcaactttttaccaattatggatggagattcacaaataaactttaataaatgtgtactccatatcttacattggttatttcttatttttggttggtgttttcaatttttatttgaactacatgctttttagagtgctagattataataattggctgtacctcttctgagcaaaggccgggatgttccattccattatctaaagaaaaatagggatgttgagtagtggtgaaaacgggacgggtatttcctgagcacccacccaacccaacattcgcggaaagaatatgggaaagaaaatgatatccgttactatccgacttcgaatctgaaacctaaaagaatatgggttaggataagaaggagttatatcatctgtttatgccccatattatgaaacccaccaacaaacatggtaaaagataggttaatcactattttacgagctcacgtgtaatattgtataagtttttcattgatgtgtctctttgaacactttaattgtctccttatatttaatatctacgaattagagatacaaataaatatttattcttaatctgatttaggagaaataatatgagataaaataccagatgagtgatatgttatccgacactacccgtacacaatttcgaaattgaagaaaagtataggttatataggaatggtgtgatccgatcgaacccatccgttttcacccctttgttgtggtctgagcatatgcgtccccatcgttgttgatgaggaaattttaaagcttaaatgggtgtttggcattagctggtgattaattaggggatgggactcgaaaaggtagcttaagcttgatgttgatcaatgatcataaaacgtgcaaaagagaattgaatgtttggtttgcatcgatgtgaggtaagattgcaacctcctatcaaccttcttaaatgctcagttgagacttgagaactcatgtgctgacttttttttatataaaaaaaagcaaaaatagtattctttttctaaaagaaaagaaacctcacatgttcggatacttgtggagtcttaatgcaatttgtataaataatgggatttgctccaagcaataagtatctcggggtactggtacctcaaagaactaaattgtttcccatcgttgaaactagctgggtaggatggacattattagatccaataatcggaaataatttggtaccggtactacctcgagatactttttattggactaaagtaaatctcataaataatacaaaattcaacctgcctagaggtgcaatttgcttataaaaaagtcctgtttagttcccaaaataaaaattttcacgctgtcacatcgaatgtttggacacattcatagagtattaaatgcagaaaaaaccaattacgcagattgcgtgtaaattgtgagacgaatcttttaagcctaattgcgtcatgatttgacaatgtggtgctacagtaaacatttgctaataatagattaattaggcttaataaattcgtctcacagttttctagcagaatctgtaatttgttttgttattagactatgtttaatactttaaatgtgtgtctatatatccgatgtgataaccaaactcaaaaacttcccctaactaaacaaggccaaaatatatggaatcggagaaatcaaacatcattttacagaaaaatcaagtttccttttttcctatgttagtgacgtcataaaaatatatatgaccctagtccccactgctaggacaagatgtcatccatcccgagaaagccctggatgaaatgctcgaatgcatcgtctttctatttgtttcattaacaagaatctgatgtcccagtacatgttctgatgtacacaatcatactagctagtatactgctctccatagtcaattcaactggaaattattttttagccaataaaaagatatacatacaatttctgcctttgcaactatggatttaataaaagaaacccccaaaaaaagatttaataaaagaaactgaaatatagatagcatcttggttcatggaagtcattagagggtcactaacaggaatcaatgaatcaagattatctttgttagcactttattagagcttaaaaaaaaccaatctgatgcatgccttctgctcctatctccccacgaagaagaaagtggacataaatatgaaaataaataaataaattatgcatagaacttttatctttgtactattctcggtctaaaaccaatgctaaaaaatagactactaccagaaaaaacccacaattaactataaaattaaatttaatattcaaatttggctgtaacggataagccaacaaaaacgatcttacactgacatgtccttttgatttctcagcataaaaaaattaagttaaaatgttttttcattatctggagttctggacatgttaacttggtcataatttattgactttcctctaaagcaaggggttactggccacattccaagcgttattctagccctttaattttttttcattgaatatctatacttctttaaaaaacactagtggtggtggcaaatcactctttttacagttttaattaacccctgatattttctgatattatggaatggttcaatatttgtttcaaacaagtgaatatacttacatactcttttaaaaaaaatactattggtggtgctagtggatttgcaactgccattcactgccattaccacccccaccactgtttttctgcagtttttataaattggctcttgattttttatattatggaatagcccagtatttgtttcaaacaaatcaatatacttacattgtgttcgcgaggtggagtttggaactcggagaaaagaacttagccatatatactcatagcagaaaatggagtggataattagcgcgtgattaattaagtattagcttttttaaaaaaatagataaacatgatcatataaaattattttgtataaaccgcactgtttagcaatttgtaaagcgtgtgcgggaaaaacgagatgagtgagttgagaactcaaagaaaagaacttagctatatatatactcatagcaaagcatgggtatctcctgctccctccgtactcgtaaataaagttgtttaggacaatgtttaagtcaaaccttgggaatataaatcatgaataactcttaagttgttgagtttgaaaatgtaaaaattatatgaatagatttgtcttgaaaaatacttttataaaagtatacacatatcacttttcaataaatatttttatagaaataagaagtcaaagttgtgttttggagaccgtgttgctgtccaaaacgacttcctttacaagtacggagggagtagtttccaaaaatggaataatcaactatttaccacttttacgagtagtgataaaggatttgccactgaacccacatattatagacacataagggtccacgtgttatagatacatgagaacccacatgtcatagacagtgagtggcaatccttaattgccacatcttcgaagtgataaaatagttaaatgtccctaaaaaaatagagacagcatgaatcaacgggtgagtaacacacagagccaaccaagccagatctgttttaccaaaacttttgtaactgactccagcatgtaaaagttcttttctcggaaatcagcatgtataagttcagcttgattcaaaaataaaacaaaacaaaaaggtatgcagaatggactccacggagatacctaatacttaggatacagcttcaagctttaataaagttgatcgaatttatgcttctcctacagctaaatcccctaaccgagaatatttagatagaaaaaagataccaaagtgaactaagggtgtgttcgctacagccggctcccaacgtgtacagtacacatgaaaaacggagcggttcattagcacgtgattaattaagtatttattatttttttaaaaaaaaatagatcaatatgattttttaagtaacttccgtagaaactttttgcaaaaaaaacacaccgtttaacgatttgaaaagcgtgcgcgcgaaaaataaggatagagagttggtaaccagctcttgcaaaccgagcctatgtcggcaatatgggtgcctcccttccggcagcagaagaatatatatatcccctcatggacatgcccacaggattttcgataaacaattgaaaagactgcaacaggaaatcgtcatcgatatatatgggcaatcccaatcctccacctagaatgatgtctatgacattaactacattgccatgtatgacttttaacttatgtggcactatattaattaagagagagagtgaagagaagaagaaactgggtctcatacaagacacagcttcaacatgaaaacctatgcactagacactatcaagttttgcattgtgagagaatattgtcttcataatagatgaagaataaatatgattggtagagaagagagatgatgtatttattaatggcccactttaaaaaaccataggttgtaaagtatagtttctattgtgatgtcttattgacatggcaccatagacattgcttatggacattatgggttgggactgccctaagcccctctatatttagtttataagccgctgtgaaatttaaaatttaattttgaagttgatttggtgttttcatcatattttattttccataatttgctcttacatatcgaagaacccatataaaaattttacccataaattattttttatcgctttataagtcataacaagctttattattaggcgaaacgatgtggatgaaactttttgtttattgtttatcatcaagataaatggctatacatggtgggccaaattataggaaatttgtcatatatgtataacggaatcgggttctatgcattaaagaacaaaatgtagagaatctacagtacatgcattcggatatgttcttttacttatgctgtttgatccacattcaatgggaaaggataaagatacagtatctccaaactttacgaaaaataaagcaaattctctagtggtgttcgtttctattaaagataaaattaggacacgaaaaaaattagaaaaccattagcgtataactaattgagcttgaaaaatgaatgtatatgatattttaaagcaacttctacataaaaaatttccgtacaaaatacaccgtttaacagtttgaaaaacatgctgatgaaaaccgatataaaatatgtatcttaatcaggcctttgtacaagtagcattgttgctatacactgttcaatcaatgattctctgcattgcaatttgcaatagaggatatatttccatgcatagtgggagtaccagtcactcgtccactcctatagttctatttgggccatatggcctagattatctgaggctcaacccagccccaagcaagagaacagtgtaacattagtggaactggacaaagagagctagacaaacacaagaggaccacatgttcaatcctaaggaactagaatattttttttgtctgaaatctgagtgagaagataactattgctggatctgtaagagacatggcaatcctactttcctactatgagagcaaagtcatgatcattgataatgtcttttttttccaataaacaacacgagttcttcctagtttgacttatatccacaataatagttttccttttttttgagaaacaattatgattttcaattggttaatgaatataatgatttataagctctaactcctctcaaagagatgaggcttatgatctcatcttaccgaccgtgaccccaggcagccgtccggactccttttaatgtttttgataaatttgagatgaaattttaaaagcaaacacttgatataataaagatttgcataggatctgaaacttttctgtatccaataagtcaacaggacctttcctgacaacccttgcccccctcctcttgccaaccgtctctgtcccctatattgaaactgcagatatgaatttgcaatttgtttcacaaacaactttcagtcatctaaaatgtgccagaattcggtaaattccatcacgaaaacgactagcaagtctatcaaatgcaccgtacacgcaaccgtatgtcctagaaaaaagacaaatatcaattaacacatgcaacaaatgttttccttttctttctgttttctattgatgtcagcctcatcaacaatacaattatacaaacggtttgagacttgtcaccctggacaattccagcccatacattttcacctcacaagaaacttgaaacttgtcagagttggctttgttctgattgacagtagatttgtttgctattgagatatttctttaccttgatttttcttggaaatcaattgtattgcagtgagaagactaagcgcattttcagtggttaattacttaattcgtgatggcaatgtgttcctgtgctagttgacagcagggagttctttcagattcagtgcatagttaggcatggtacgaaaacttgagtaaacccaaatattttttctagggtgaaagttcattttcgcaaactgaagcgcagataacatgaaaaacaccaacttgttcagttattgttaccagttcaccaatcaaaaacaactcatcttcagtaaagtagcttctccatcattaatgaacctattttgacttcaggcacaagtcaaacaattgttattttccttaactatcatcttaataaatctataattccatcctcatcatctatatgtgctaaggtctaagaacccaattatttacatctagtgtacacgtagtaaacacatagctaaggtgattgcagcatatatgaaggccactagggagtagggtgccatatcaaattaagttgctacttgctacaatggcaactttaattgtacttgaccatacacattgtaataattaattggttgatcaaaagccctcatagtagccaccaaacgatatgtttgccctagttgagccaccccctcccatcacagatgacattgcctggttcagccttgatgtctgctgcacaacctgctgcattctctgcagatcaacaaatcaaaccatgattcaggcaaagttctcatggataagattgagtagctaattttgttcagttgtacattgaatgaaaaaacatggtgtcagtaaccaattttcttttactagaacgtaaacgatatgatggttttagattctgtatttgtatcagcccataataacatcgtgccaaaatcattaagatttcttcttgtgcttctagtagaaacttcatattagaaaggctcaagctgcatctgaattaattaattaatttaggtatacatatgcacaacagcacaagtaagctactagcaagattcaccaaaccaatccagagccaaaaaccaagaaatcaatgttttttcttggttttgacgaaaattgtttgaaaaccattgactaccgataaaattttatcaaaaattaaaattatagtttgaatattttctaacttgaccaacaagctaaacggtttgtattcttgagctggtccgagaagatcggttttcatcggttttgtaaaatctggctactaatcgcatagttatagaaggattaggatgtttaggatgttctaccttcaaagtcacgtcacatatcagtgacaaagtcacggtgacttcgaaagtaaggatgagtgatcgccattttggatgattctactaaattatatgagaaaaaaaagtaatcttccatagacaaaagaaaatgattgatgatggatttggtagaaagtagaaacataggactggaaatgagtcaccaaattaaccttgtcatcgccatagagctgaagctggatcttgtgctgctgctgctgccggtggtggtgctgcagcctgccgccgacgaggaagacgcagacggtggcggcggcggcgacgccgaacgagcacagcgccccgatcccgttcacccgcagcttccccaccctgaacaccacgcactccgcccccgccttcttcccctcctcctcctcctcctcctcctcctcgccgccgccgtcgtcgtcgccgtcgaccaccttggcatcggagccctggaacgcctcctcctcctcctcctctgttaccttggccgccatggtctcttcttggctcgtcttggtctcggccggcacggccacgtcgacgccgatgtccttgcactcgtcgtcgacggccatgtcggcggcggcggcgtcaagattcgattcctcggtttcttgagctgtcatccaatcgatcaccgcaacaagaatgagacgcaatctttcgtgacaaatcccaagagctgatgctgatcttaccaccaagaactctgcggccatggccgccgccgccatgggaggatgagctcagctggtcaggcaggacctcccagtcccacatgtccatgctcgccgccgcatccatggaaaccgaagcacctcccttctccatcttggcaaataacaaccaaaagatcgatcttttatataacaaacagcagtgatcaatgaaaaagattcttgctttggggcctctccaatggatgctccccaagcatcaattttggttgctgcttttcaaggctccaagtgatcttttttttcctcaatttttttctcctttcttattatttgcagggaagcaaagggagaaagaaagcaatatatgaaggggaagagaagaggtgtagagactagagagatatcagtgtcaccacaaagccttgaagccagtcctttgcaaagagctttgtgtgtgggcttgtcctaccttgctaggtgacaaagtggggtgaaaatggtgattggggcctaccaccacttgggacttcttcctcctcactcatcaatcactagttggcacttgggatgtctctgaacaattgtagcaaacatgccaaggattattcagagcaacccataataggaaaaaggagcaagccatgcaaggtgtgaagaaacaaaactagtggagaatatctaaggcttgttgatcaatccatctcttttttgttggttcttaataaatatttttagttatcctgcataaatggtactacaatccagtgccttcactgagtatatattcaattcagatcaaagttaacttgagaatttatcccttggtagctccgaagaattatattgttcacttaacatgccatatgtcctaaagagcttctaagtctatccatttcagttgtgatagaaaaattgagaacattcctgaaatgttgatcactatcagatgccgacctctttgaatattgaatatatgtaattttattaaacaagttgtggtttgcaggacggtttatagacaggttcaacgttacgatactgtacatcatcagcaaaggagttgtaacaaggaataaaatgtacaaaattcaggaactttaatggaagaagagtacacaacagggtgccaggatagggggccatgataatgagagacaagataagaaccttctgtagaaaaccacatcaaaagttaagatgtaacacacaagatagtgatggtctgatggataatcatgcaggagttgaaccataaactaaacaatttcaaatggggagatggtgatttgaaacaaacttatattcagagtaaactgttaaagttcagctcacaggccaaagaaagggtattcaatttcaacattaatttattttttgcattgttgttccatccattctagatagtagcctaggcttctttgttttacattgtagttccatcaaggttcttgggtcaagttgtactttattgttgtggactaattcaggttagtgtcaagaaacttttgcctaaggcctagtgttttcttcttcaacgaatggaaaagctcctacttttcttttttaaaaaaaaagaaaaggaaaggaaaactatcatgaatcatgtcacctatggttagaagtagttgtgcagctatcagcaccgtagactttactagaaaaacgaaaagaaagagaagagattggatctcagtaaactaagcatataatgggtacatgaagtgttttttttatttctacatggtgaaatttatgtaaatttttttgtttaaaaggaaacctaatctgttgagtggaatttaatatttaaaattttctgggcttagctgcagattataatccaaagtagttgtgaattttaaagtttgattttctataatacttttaggtagatttgtattgcctatgtatataaatatatgatattattaattttattcggtctttatgtgtaacttcgaccactattttttattataatgcaatgataatatagaaacaaacatatattattaaaaatacttataaaaaatattcccatataaatctttatattttcaaaataaatatgttgaaagctagtcaaagttttaaaagtttggttgaataaagtcaataatgtcatatatttaaatacatcttcttcttagagatcataaaaagcccttaaaagcattaatcctaaaatgaagtgacattctaaaatttaaatcagcttcgaattataactcaaagctccgccaagtagattctcgaaccttacgagtgtgtttgagaggagaaagaaaagaaaaagattgagaagatacacaaaatgaggtgagccattagtgtatgattaattaagttttaattatttcaaatttagaaaatgggttgatatgattcttttaaaagcaactttcttgaagaatttttctttaaaaaaatacaccgtttagcagtttaagaagtgtacgtatggaaacgagggctttctctctttctacggttcaaatgaatgcttcgcagtataatatttgaatcctataaaattcctaaaaaaaatccttccattcaaatggcgcaagagttgtgcaagaagttggtttgagatgaaatttagcgccagacgcggcccatttgggcaccaccgcttctcggcccggcccagcagcggttgatttgggccgagaccaacccaccaccacccgcggagtaggcgacggcggcgaagcccacggcggaagcttctggaaggttccccgccccctcacgcatctctcccctcccttccgacgccgcattctagggtttagctgggttttctccgctgtggcgctgtggctgggcaggcgatgggggctctcgaatcgtattctttttgaattgattgatcccctagttactatcctagttccgtttagattggaggagttgagatcaagatctggattagccctagagttggtaacgaagctcaccatgattgttcaggtttatcggggttagtattgtattattagtttctgtcgtcaagatggagttctttggctgccatctatttgttgatgcatgtgttcttgttaatcattatcttaaaaaacaaatgtattcttgttgatgattgacaggttagtatgtccacagggacattgacaatggatagaggaggggcagcaaaacgagaggcgtcatgcggaacaatctagaagtggtaaactacctccacaacatcttgtagtgctcctgcatttgatcttagagtaaaaaacatcttgttcgcattctgttattaatggggattagaacaggggcagaacaagaaaataggccaagcctagggatgtggaaatgtgtctttagctaaccattttttatgccttcaaagttttcatagtatttttgatggaatctcaaagggttatagtcttacagagatcaacctatggctcaaatcctccacgcactgagtcaggaataggataactatgaaagtgagcacagtaataacttgttgactgctaattttgatggcattggttttcttctagctttagtttgctaactacaattacttgtttccatcatatattaacaattattcccaatactaaattatacggatcttaaactacacatagtaatgatattgtagaggattgcaaattagatccacagcctgctttggaatttatcttttcagtttttgagaaagaactaaagcttgtctccaagttattcacttgttagtatctgaaatttccgatgacaaacagaaactttcgatattttcagtttttccgtggtcacataaatactttgtcatgtgctttgcatcagtcaacacaaatattaaccttccaaactacaatatcatgaaaaattgtgtgctactggtgcagtaggaagctacactacaaggttgtcacggtatgaagatttctcataaataatttgaaatctctgaaaagaatccaccacaagattttactgtattgaattttgcatacatagggaactagggatgtttccgttcaaaaaaaaaaaaactagggatgataaacctctatggcacattggcacctatactgctttgcatctgccatacgtgttaaaaaatgctaaatatgtagcctgacagatcaaaatcaaaaggaaaaaaaaaacttaaaacacatgaaaagcccttcatctaatcagaagatacatccgtcacattactctgcttgctggccatcgttcctcatacgttttgtatggaattggctcatagagcagaagatggactcaaaaaggaggaatcttggtatggggatgtctagttttgtttgtctaatacattaatacttgcaggacagttgacaaatagggggcagatcccacaaggagtcgcacagatcattacccatatcaaaggtttcctgctcctggatgccattcataccatgggagccttgcttctctgccttcatcttatcctggtctgaggccactgggcaagcattgctgcctgacatgtcgcatccatccccaatcggtagtaggctggtgttgagtgcccatgactgatcatattgttgttgtgaagaagccagctgcaattcttcacctccactcatagcaaaattagagaggtttgtagcaaaattaaggcttgagctgttgcttctgctggggctgacaccactggtgcttgtgctggttgcagcagcagggacagtgctacgagcatggtgatatactgcggtgctgaaggtgatggtaggctggggcatgctcttcttgagcttcttgtgggtgaggatggtgcggatcctcgacgcgagcggcgagtctggtgcagcctgcgttgcgaagttggtgcgcgtgtttgagccccggaggaggcatgcggcctcgtcgtaggcccgcgcagcctcctcggcggtctcgaacgtgccgagccacatccgtatcttctgggtggtgtccttgatctctgccacccacctccctgagggcctctgcctgacgcccacgaacttactgctgctgcacttggttttcgctttgttcttggccactgtcacggttggcacttggtaatggcattgctgctgctgggattgcccttgtgttggcttctggaactggagctccatggagaagagagggaagctaagagagtgcaatgtctgtttgccagtttgtgtgttttccagctgtggtctgaactttgagggaggtgctggagtctgaatttaaggggggggggggggggaagaaagggaggttgagatgttgggttagtgggagacttgtcatgttgtgcctgtctctactgttgaaaatccttgtggtgagttcaagaggtgactgagttttctatgaggcataggagcataatgctgcattctgtagtttgtttcaatgttttctgatgtggtcttagtggctggcatgtttgttctttaccctgcaggttgacaaaagccacctttgtttcaggctgtgcgataagatcgacatatctgatgcttctgtttaggttttactgaaccatgggctgcaatccctcccttattgttgatattacagttaactccaaactgttggccttgaaaagcttggaatccttaacagttcactaagcatagaagtttatcttcaatattattaaaacatcttttgttgctatgttttcagttcctactcccatcataaaaccgccttatgatgtttgaaaatttttaagagttctctaagcaaataattcaatggattgctttaggctaaaatgctgtgcagtcctttagattagtttagattcacctactaaatgtttgcaaggctatataatgatatggaaattgcttttgcaggcgtctgacacttgctgcttccaaggaattggtatgagaggatccacatggttctgacattgtataggtagcaattgccatccaagtacatttcatattttcctaagtagtggtcttcaattgaaaattgcaaacgattctctctctccggcacagcattgttttaaacatttgccgtgtgttctattcaaatgacgaaattctagtttatttgttttgtccataactgcccaactgcctgtttaatttgcagatattttacatggcacaccatcactcctaccaaagggaactaagcaagtcgtgaggacacgattttttttgccatttggcagcacctgtgggtttaattgcttcatggcttcatgttaggtgacaagattagagaagatgttggcattctacgagaggagattaaagaatgaagctgtgtgattagcatataatctaatgccatggccgggtgcagaatgttttattttatcaatcagatgtgccaagatcaggtagtgcattatttacctgatgaaatatttcgagtttatttcgctacgtttgactcaggttgttcaagtttcaagatatatactatctttgcttggttaaaattattgatatatttttctgtaaagtggtaaccaaagtttggatggattttgaactattattttagttgtttacttcgttggcggtttggcactgaatatggttcttcccttcaaaagaaaagaaaaataaagaatatgtactatggttctgatactgtaaaatcacagaaattccacgagtactccaattttgtttcatttcaccacattttaatttcatgatcagagactttggttggcaagtcaactgtagatgtggcagcaggttgcttgtgcctcgaatgcaaagattatccttagctccttgaactaacaaattgcgtagaaaatagaatgaaatacctgcgttgagaaatgcagaggtcaaagttaatggaagagcatcacctcacaatagaaaaggaaaaaaaaagatgaaccgtaagaagagtatataagtataaaatgaagagaaaatctcacatgataatacagaatcatcatatgaataattaaatacacatcacggcctggaaaattaaatgtcttgagaaacatgtcggacttcttttgtgtgaagtggagatcatggtttaggtgtacttctcagatgttcaactttatttttttatcaatacaataaatgttttttttggtcaatgcccacgtatttttgtcgagtgattgtgtccttgcacaccaaatgtcaagttgtgacattggtcatagaaaggcctaatgtggtactatgtattatatgctctattgcaaatactttcttccagagtcttgtctaaaatataggccaagtttctccttcacctcatctaaacatattttctataccaagaaacctgagagaaagttgaccatgataacttcagaacttcagcttattttaggcatttttggccaaccagaatgtagggccggcttgcaatttgtgctatgtgagggtccagtaccaccatactgatggtgttgatggcaacaaaatgtgcaaatatcaattaaccatattatgatattacaaaaacgacacaattgacctctcgttttgcgatgaaccactgagaatagcttgttttcaaacaataaaaaaaaaaagctttaaccaacaaataacgcagtagaagcaacaaaccgtatatgcacaagcgccatataatgatttacatggaaaaatctgttggaaatatagtcataatttgacatattttaatccagaaatataacataataaacatgacatatacaatagagagtgatcctagcatgatggtaaacatgaatatgctaacataaacaatagcatctaaaaacatgtttaacaccgagatgagaagaaaatacctggagaatgctccggatgataagttattggtgttgttgttgcctctgttgccgttgtcattctctcttccgttaccgttgttcctgtctcatcctccctagattggattgctgctctccttcctcgttactctagtaacagacagtgacaagcccatctgagaggattgctgctctccttcctcgtctctatcttcttcttcgcgcacgggtactcggcctttctgttcatcctccccagactggattgctgctctcctttctcgttactctagtgacagacggtgacaagcccttacgagaggattgttgctctccttcctcgttactctagtaacagacggtgacagaacttcgtccatccttctgttcatcctccctgaactctctgtcttcttcctcacgcctgggtaggcgagcgatcaagtttttgggaccacattctatcgcgctattgctctcagcctctccttcctcattactctagtaacagatggtgacaagcccttttgagaggattgttgctctccttcattattctagtaacagatggtgacagaacttcgtccatccttctgttcatcctccccgaactctctgtcttcttcctcgcacacaggtaggcgggcggtcaagtttttgggagcacattctattgcgctattgctctcggcaactctcgggactgcttcatccatgtcgctctgcttcctctacggcaatgtcaaccagtcccgggaacggtgacaacagaggagacaggaacgactggagagaacaacaaagacaacggaagcaacaacaacaccaataccttatcattcggagcattctccccccgaactctctatcttcttccttgcgcacgggtactcgggacgagcatgcctccggaacttcgtccatccttctattcatcctccccaaattctttgtcttcttcctcgcgcatgggtaggcgggtgttcaagtttttgggagtgcattctatcgcgcgattgctctcggcaactctaggcactgctttgctgctctccttcctcattactctagtaacatgctgctctccttcctcgttactctagtaacagacggtgacagaacttcgtccattgttctgttcatcctccccgaactctatgttttcttcctcgcgcacgggtaggtgtgcgatcaagtttttgggagcacattctatcgcactattgctctcggcaactctcggcactgcttcatccatgtcactctgcttcctctacgacaatgtcaaccagtcccgggaacggtgacaacagaggagaccggaacgactggagagaacgacaaagacaacggaggcaacaacaacaccaataccttatcattcggagcatactccccccgaactctctattttcttcctcgcgcacgggtactcgggatgagcatgcctccgaaacttcgtccatccttctattcatcctccccaaattctttgtcttcttcctcgcgcatgggtaggcgggcgttcaagttttagggagtgcattctatcgcgcgattgctctcgacaactctaggcactgcttcatccacgtcaagctttgcttcctttacggcaatatcaaccagtaccgggaatgacaacaacggaagagacggcaatgtcaacctgtaacactagagtaacgaggaaggagagcagcaatctaatctagggaaaatgaacaaaaagggcgagtacccgtgcgcgaacaagaagatagagacgaggaaggagagcagcaatcctctcaagtcctctcagaagggcttgtcattgtctgttactagagtaacgaggaaggagagcagcaatccagtctggggaggatgaacaaggatgaacagaaaggccgaatacccatgcgcgaagaagatatagacgaggaaggtgagcgaagtagaagatagagacgaggaagagcagtgctcgtcccgagtaccgtgcacgaagaagaagatagagttcggggatagaagatagagaactctgttactagagtaatgaggaagagtagcaatccagtcgcttgtcaccgtctgttactagagtaacgaggaagagcaatccagactggggcgtctgatactagagtaacgaggaagagcacctctcagaagggcttgtcaccgtctattactagagtaacgaggaagagcagtgctcatcccgagtacccgtgcacgaagaagaagatagagttcggggatagaagatagagtactctgttactagagtaacgaggaagagcagcaatgaggaaggagagcagcaatccagtctggggaggatgaacaaggatgaacagaaaggccgaatacccatgcgcgaagaagatatagacaaggaaggtgagcgaagtagaagatagagacgaggaagagcagtgctcgtcccgagtaccgtgcacgaagaagaagatagagttcgactagaataatgaggaagagcagcaatccagtcgcttgtcaccgtctggggaggatgaacaaggatgaacagaaaggccgaatacccatgcgcgaagaagatatagacaaggaaggtgagcgaagtagaagatagagacgaggaagagcagtgctcgtcccgagtaccgtgcacgaagaagaagatagagttcggctagaataatgaggaagagcagcaatccagtcgcttgtcatcgtctgttactagagtaacgaggaagagcaatccagcaatccagtcgcttgtcttttactagagtaacgaggaagagcaatccagtcgatagagttcggggagcgcgtacccgtgcacgaaaatttagagtaatgaggaattaaccgctcaacaggtgctctcgattagcagcctatttaaatcgaggtccctctacgttggattccaaggtggtattaatcacttaacattaattatgggctcataaaatttactaagatttgattgggcctagcccatttagttttagcaaaaactccttgatgagaggagtaagaaacacggaaccaactagtatgctccaagcctccaagcttccacgtaccatttacaaacaatggttgcaccacaactgcagcaacaccattaagatataatcttggtatcgtcaatatcaataacaaataaaaacaagaagcttaccaccaggcaaacaatgcaatttatacccccttagtatctcacaaaccattgtttggaacatgaaacatggcaaaaatgtggatttacaagttcaaatacccgtttgacacttcagactaactttttactaaaattgttatcatccaaaccgacaaaactcttctcaagtttagtgctatactaaaccgatcctcaaacaaacctttttcttttttggcaattttcttggtaccatcacaaaaataatggagttgggaaataccatcatacatatcaatgacatgcaggtcccgggccacacatgtcattttcaaatgtgatggtattttgcaactcgtgtatctccacaatggtattttacaatgttttctcttttttaaagatagtgatcctcaaaccaaataaccaaatcaaaataatctaaatataaaatgagcttgccgaatttagtacacatcgaaattttaacctataaacattggcctgatgaagacaatgttagaaccacttatttggacaaagtaacgaactactcctatttcttctattttctagtcatttttcactcaaaggttgctctttttttctctcaggaatacttaggtcttttccctgcaaaacagcaaaagggtaaagctagtcagtctttggaacacaagaatatttacaggatttttacatgagttagtctaattcccacaaaaattctttgaaattcctccattccaatttccaaatgatttaggacatgggactagctaaacttgcttcgttcatggttgttcgggccaagggatcttcctgaacaggtgcaagaagatcctctagttcggctaatatatctgagaaagcaggtcggttggatggaatgccatcccaacatctccgcatcaagtctaatacttcctccgtttcatattataagactttctagcattgcccacattcatatactcccttcatcccataatataagttttagagttggacacggttattaagaaagtagatagaagtaaatggtggagggttgtgattgaatgagtagtggaggtaggtgggaaaataaatggtggagggttgtgattgggtgggaagagaatgttggtggataagttgttatatttgggacaaatcctgagggctaaaagttgttatattttaggacggagggagtatatgttaatgaatctagacatatatgtgtgcctagattcattaacatctatatgaatgtgggcaatactagaaagtcttataacctgaaacggaggtaatagctgggaatgtgcattttctgggagccctgggcgcaatcccttgtatacctgtaaaatgtcatgcttagtgcatttcacaatgtgcgtattatggtacaactgtaacaagtaataactgacagcatattatttgaatagaagaaacctgcatatactacacacttacagctgcttggagaggggtcatggtattataagggatctgaaaataccagaaacgaaaatttgacaagccttagcaaacactaataaatgcacaatgtagataattgtgagcctatagtcacagaaaatagtgtaccttggacgttatgagctcccaaagcacaatagcaaaactgaacacatcagctttgttatcgtagggttgatgatttatgacctagcaacaccgcatcaaatatatatttaccaggaatataatattcttgtacctttactagacaataaaaactaggtaactatagaatgtccatgcaaactatagaacattcagatcattgaaataaagaaaaagtattgtctagcaccttgaaccttaagacaaagcatctaaaaccctgagctttacaatacgttcatataacctcctaaagtggtttttgtctaagtggaacacattggatgggtttgcccatgtcgcgtaaatgctgtaacatacagatcaaaatctccacttaccatctcctattggacaaaaccgtttgttcaagtttccgtataggcaaaaccaccatacaaaacaactttaggggagggggcagttgtttaaagatggtattgcaaagtttgggggttacatactaacctttaaaattcaagggctagttggacttccattaaaagcttaaggggggaaagggattggaggaggaggaggggggggggtatgcctatagggaaatttccttgaaacaacaaacaaatctgaactattcactttagcggtagaatatattattgtgataaccgtcaatcaagttttcttttcgagacttcaaaaacagtaacaatattaggcacatttgaaacagaatcactttgctccagcaacagagttgtatctctggtgccatccatctgtatgttccagtttcagctgtcatgttacctccttgatcctgaaaatgagctacaccaaaatctgccactttcacaacctagaaaaataataatgaagttatttattagttcatagatattttctcttaagtgcaaagcagatggctcctgcacatacaaaaacacaaatgaagcatgattgtattccaacaggtaccatttgcccacttgcatacactatactttcttgtctttttttccccctcatatgttcatcaataaaatgttgaagattataggctacgtacatgatctttgtccattagaaggtttgcactctttaaatctctatggataatacccatctgatgcaagtaacacatccctctgcatagatcaactgcaaacttcagcagagttggaaggtccaagacattatgctgcttgtgcaaaaagtcatataggcttcctccagacatgtattctgaaatatataaaagtagatgatgagcattagtaggaatcttccagtccccaagatataaattaagaacccgctctttgtctcataacaagcataattatatggaattaaaaattagcatcttaccaatattatgaaatttagtattgtgtaaaaattattcagcacatgctttcttttaggaacaaactattctttgcaaattccccagtgagaaccagttgatgtcataaatcttaccagcaattatgcaaaattgtggtggttttgtgcacgcaccaatgaatcgcacaacattagtatgctgaatcaaggcaaggcataaatatttagttattggtacttgcatgaacatggcaatttcagacattcttattctaagaacagtaatgcgctaatggctaagaattggatatgcttaaacaatttatttgcgatggtaaatgctaaaaaagaattacttcctccgtttcatattataagacgttctagcattgtctacattcatatatatgttacatacatatatatgaa

SEQ ID NO: 23429 - DNA, 15968 bp, Oryza sativa
gtcttataatatgaaacggagggagtatataacagaacaccttattttaatgttaaataccttagaatatatacttcctgtgtgaactcattccaaacattcttattcaaatgctcagatcttagaactttaacagcaacatcctcaccgagataagtcccatgataccttgacataaggataacacaccataaaacaaagtgcaataaatacagtgataaaacaactcagcagtatacaagatccagaagctcatccctcccatcttcagcagtcgtttgtcaatgtaggctccggttatatgacgataagtaatcttgcttctagtagaactcatcgttataacaccagaattatccaatctggtgctgctttactcactaatgataaacacaatgaggctcatactgaagtggaaggaagtttaactgtttgaacctccaaaattttatgttcaggtagtcaaatctatcactaactttggcatacctttttttacacatatttctagcttgcttcgttcagtaagcatcgccctcagagcttcagtctataattcagttctaggtagcaaccaagacagtggcatgcatcttgtaagcacaggctgcttattaactatgttgcatctggtcctcgatacgactccaggatggctccttcactattcctttacctgacatggcctccctgatctcagcagcattaccccaacggccatcaccagcaaaggcatttgataactgaacatgaacagatgagtcatgaggatttagctcaattaggcgcttggacacccggattacaatctcaaggttcccatgaatctggcaggcactgagcagagctctgtatactgaagcaccaggttttataggcatgccattaatcaagtattcagcttcattgagatagcctgctcgaccaagaagatcaaccatacaagcatagtgctctgtccttgctcccacaagataccctttatctttcatcaagttgaaatactcgagccctttatctaccaagccaacatggctgcaagctgtaaggaccgacaagaaggttatgtggtctggctgaacatgtagcctcctcatttgttcaaacatctcaactacctcctttccatggccatgttgagcacatcctgacattagtgaattccaagaaaccaaattaggtgcttccattgaaatgaagacgccattggattcccctattgcaccatgtctggcatacatggaaatcaggctgttctggacatccacaacagaatcatatccaatcttcagaataagagtatgaacctgccttccctctagcaatgaggatgagctacctatagccttcaatacgctggcaaaggtgaacacatccatatcagtgccgtgccttctcatttccaagaagtgttgaaacgcctctttacctcttcccagacaggagagcccagagatcacggaattgaatgatacctgatcttgacatgaaacagacatctgcaccttgacaaaattttccaaaatgccgcacttggagtacatggtcacaagagcagacagaacaaactgatcgtgctccaagcccttcttaagcaccgcgcaatgaacttgcttcccatgatctatgtcctccgggctcgcgaatgagctgagaaggctgctgtatgtcatcaagtttggtgccacaccagagcgttccatctccctgaccaacagcatggcgtcatgaggccttctgcttagaacgaaccctgccacgagcgccgtgaaagtggccacgttcttttcttccatctcccgaaacacctgctgcgcggcgcccagatgatggcatttggcgtacatgtccaccaaggcagtgccgacgacgacagaagcacagaagccatgcatgaggccaacggagtgcagcgttgctccagcagcagcatcctccagcctgacgcaggcgaccaggacgctggacacggacgacgcggtgggggagacgccggcgcgcgccatgcgcgcgaaggccgccacggcgaggccgggcgcggccgaccgcgcgtggccgtggatgagcgtgttccaggtgacggcggtccttgcgggcatttggtcgaacaggtgctgtgcctcggggaggcggcgggatcggcagtagaaggcgaggagcgcggtggtggcgaagaggttggaggcgaggaagccgagcttggttgcggccgcgtggcactggtcggcggcggcggcggaggggcgcggcggctgggcggcgaggagctggacgaaggcccgcggggttcgcgcgtcggcgtggcggaggaagtcgcgcatctcatcgttcaaacctgatgtcgtcttgggatggatggaggtagcgactgctgtgtagtagtgtaggggaagatcggaggaggcaatggcaaatctagcggcggttgtcgtgggagaaggggtggcgctagtcataatgaacgacactatcctccaatcagccgttgtctaaagaatcttactttactatagtactaattgatcaagcaattagaacaaatattcctatcatctatacttcaaataaaattttcttttaaattactcatccgatttacaatccgattacaccgttgtgttcgtaacaattaaatctttacaacaagatctcacatgattatattttgataaaaaatcacaaattacttttataatatatctaaattactttagatctcactaagttacttcttaaatatataaaagtaaattcaataaaattttaaagtaattaacatataatataattatagaagttactttctttttccttttttttataagttacttctataatatatgtaaattacttttatgttatattgaattacttttatatgtttaaaaagtaacttagtgaaatctaaaagtaatttagatatattacaaaaataatttatattttttcatcaaaatataatcatgtgagatcttgttctaaagatttaattgttacgaacacaacggtgtaatcggattgtagatcggatgagtagtttaagagaaaattgtatttgaagtgtaggtggatagtgtttatcatagatagagtggtagctggtttgtcggtttagacaaaccagctagcactagctgtgtagccatgtccatgaaggaggaaaatgaaaaacggaataatcctagggacgtggaaggaccttgttgcaaaacaagtttcttcaagggtggacaagacattttattttacagtatataagccttgtttagtttttaaaaacaccacctcgaatctttgaacatatacataaagcattaaatataggtaaaagaaaaactaattgcatagtttgtatggaaatcgtgagacgtatcttttgagctaattagtctatgattagacataagtgatacagtaacccacacgtactaatgacggattaatcaagcttaataaattcgtctcgtggtttccaagcgagttatgaaattagttttttcattcgtgtctgaaaccccttctgacatccgcttaaacatccaatgtgacaccagaaattttcttttcgcgaactaaacagggcctacatataagagccagtttaaaagtatagtcaactattagcttcaaatcatctatagtcaatgtaatagccaattcatataattagctacctataaacatatactactacacaattaatatctggtcctacctgtcatacatatattacgtcttgtagtctatgcttaagctggctacaagtctatagccgctgctcttatctctcatcatttatcttctcgatatatatttatagctagcttatagtctgctaccgtacctgctctagatctagttctatttctcaactccaattttctcaatttccgttagcaagtttttcaaactgttaaatgatattttttttaaatattgtatataaaagttatttaaaaaatctcaaataaatttattttttaaatttataattattaatacttaattagtcatgtgctactcgttctgcgtgagtcgaaaatctctctcgaaacagacagatcgaacgcagccgtctcagccccggcgccgtcatcttccgtcttagcctcaccgctccgttccgttccgttccatttccgccttgctcgagccagcaaccaaactgcaaaaccgaccaaccgcacccacccaccccacctctccccacccccaacctcccaaaccctaactctctctctccctcgtcgccggcgaagcttccagaggcgggggcagcgcgagcgcatggagtcccccaccgccggcgggggcgggggagggggcgaggccggcgccgcgtcgtcgtcgtcctcctcctcgggcccctccacatcgtccgccgccgccgccgccaccgcatcggcatccgcgtcctcatcagccgtcgccacccgctacctcgccaagcgcgtgctccgcgggagcgccgtgctccacgtcgcccagggctgcttccgctcccccgactgcgtcgacgtcgttctctgcaaggtcgggaaacacccccccgcttcccgcactcccattcccctgatcggcgaatcgtgtagggcttccgatcgccgtgcgtagaggatggacccccaagggtggctgggttttttttttttttttttaattttatggtcggctcggagcgtcggggatgatgctccttatgccatagatcatgcggttgttattcggtttggaggtccggtctggggtaaccatggttgctctgcttttagtggtgtaaggacatggaggacatgttgccccagtgattggaattgctaaacccaaatattgctgtcatgctaccgattgggttgttgaagctagcgtcggatcagttccattaggagaataataaatgaataattcaaaacatttgctacaccgtcatctatgcctggatgtccctttgttttaccatatttgaataaatttgtgtgccatgctggtagaagaaacagaatgcgggacgatgggaaaagataaatgaaaagctatagacttgtatcactgcgtatattgagtgagctgcttaaattcttacactctgcttgtttgatctatggttgataagccgtgggaaaatgaaataagcaaccaaaaataatttgtgggctaaacttttatatctgtgttcttcgcggtttaaaagtcaatgctggtaattaaactacgatgaaaaaaaccctcaaaatcaactctaaaattcaaatttggctgcggctgataagacaacaagcagacgacgagaggaacatgaatacatatcaattaacatgtgaactcactgtatgatctctgttacaaggctgctgggttagttctgcagaatcctggtacttatttttctttcatccttttattgaaaatattggttattgctgcaggaaaattcactggaattggttgttattggtgaagatggtgttttacaatcaatctgtgaacaaaccacatttggtattataaaagatgttggtgtcttaaactggcgctgtacacactttggtttaatgccgaaggtgcagttctttctcatagcaaagcataatactttgcaatacttttcctgtgcatatggctgtctctacttttcttctgatgacagatgggaagataattatttgccatattcttttcagatagaagggaaagaaattctggttatactttcagattctggaaagctatctcttctttacttttgttctgagatgcataggtcagtgctgctcctttcttatttgtggcatttttttctatcttcacagatcaagctgcttgtataaactcaagacccaaaaatataattaataatgatccaaagtattaagtactgtaatagcctaatgattacatgcaaccagaggaaacagtgagaaatttaaaaaaatggaaaggatgccattttttttatgcctatcacatcacacttgtataggatgtgtatcacttttaacatccaactcgtgtgattgtgtcgaaattgccactagaaagttattaaaatctggaaacacatgcatattagactaccgagaattgaagtgaattgcactgctttttatcactaataactaagctcagttgtacacattttattttttttaatatactgtgtttttcacagtgagaacaaagagcaggataatatttttttgtaaggttcattattcacggaagaatattgtttgcaggtttatcttgtgcgtggcattttcattctgcagttgttatcctgttttgtttgagatttacaagatttgctttgatatattgccccaaaaataactgttgacacagcattttgtatcaatttattgtaggttctttgcaattgcaaatattgaactatcgaaaccaggaaatttgaggcatcggctcgggagaattttagctatagaccgagagtgagtgaaagttcctctctcttgaagtgtttgtttacataaagcttcatttgttacatgatagaatagtctccattatttttatcattagttggtgatacattaattgttgtactacatggcaaccaaaattgatatattaattgctggactgtgttcttgtaaatgggtgcaatttcagtgtcttatagggagaaatatgaaaaatggcatggtatttcagcaaacggcatgaacaatggatgtccaatagtaatgtttcccttgattatgtggcattaagaaagttaaatctttcctgttggtgactgtactctctgctcatgtctgatgtctgatggttgacagttgatgcttatgttcgctttgaacaaaatggagctgtcaccgtttctctattcctgatttcaagtttgcaacacccaggttattagtttatgggaatgtctttcatcaaagtgctattagatctaatccatggacacaactaaactgtagaacttagtgtttgaatactctgggaggcctgtctagtttgaatgattatgaacttgtggtcttgattgacaattatttgttactatctctgtcacaaaataaccacaattctaggagtagtagttacaatttttcttttgttgcgtaatgcttttaggtgtatatgataatatgatatcgtaaactgcattatagttgtccaacgcaatactctaatacaaccttttacattataattgcttgatgtgtaaataacctttttgaggacttaaagttaaatggtttatgaagtttcttaactttggttgtctcttgtcagatctaggtttgttgctgtcagtgcatatgaggatgagtttgcatttgtacgtgtttcagtggatcacaaacttcatgctcctaatggaggtaaaatttctgaggtgactcttgaacgtaaacaatgccttttgtgactctcattgcttatgcttagtataatacttacagtacattgttccagactttgaagatttcccatgtcataatttcagaaatatttttatccaccagaaattgaagaggatgctaaaatcatcagtactgcatataataccagcagtatccatggtacagtttggagtatgtgcttcatatcaacatgcctggatgaagaatattatcctgtagttgcaatgatagttaacaggtttgctccaaaatcatattcaatagagctgctacttaagtttgtggcgattacctggcattctaatttatattctgaaatatctttgtttcaacaggggctctgatgtaaatgacttggcactctatgggctagattcccataaacgtactattgaccgcatatctacttatttagaagctggacctttggcacttgaaatctcagaaattccccaactgtatggctttgcacttatgtttcgtgctggtgatgttctgttgatggatctgaggaacccaaaggacatcagttgtatccatagaataagcttgtcaactagtctaattggagatcatgtctccgttgaagattcctgtaggggattagatgtcgatgatgatgtggcggcttgtgctttgctggaactgagagactctggaaataacatgatgagggatgacagttacatggacattgacggtactgataacaaagctgtagtgaaatcaaggattgtttgctcatggaactgggagccaaatgccatgcaaggacatccaaggctgatcttttgcttggatgatggagaatttcatcttctagagtttagtttggatatggaaggagtgaaggtattgcctgagtgtgtccatagaggtttgccttgcaaacctcttttgtggatggacaaaggaatggtagttggatttgtagagatgggagatgggatgatcctccaacttgaaaataatagattggtgcataaaagtgcaattcagaatgtagcgccaatattggatctagcaattgctgaccaccatggtgagaagcacgatcagatgtttgcatgttgtggaatgtgccctgaggggtccttgcgagtaatacgtaatggtgtcaatgtggagaaacttctgaagacagatcctatttatcatggtgttactggtttgtggactttgagaatgaaaagaactgaggcttatcactctcttcttgaattgtcattcgttgaggaaaaccagaatactatcagtaggactcagttttaatgacatctgtgatgctgtaggatttcagactgatgtttgcactctggcatgtggtttagtagctgatggtttgcttgtgcaaattcacagcaaatgtgtaaagctttgtttacctacagcatgtgctcaccctgagggaactttgctcccgtctcctgtttgtgctgactggtatcctgatgtcactatcagtgttggtgctgttggacataatgttgttgttgttgctacatcgaatccttgttgcctttacatacttggggtcagatcattatcttcgtttcagtatgagctgtatgagatacaacatgtccagttgcattatgaagtatcttgcatatctattccacaagaggactggagacttgataattcatcttctagttgtgcaacgagtggtgattttcggaaagattttgcagctaatattcgcaagtttgctgtaattggaactcacgaaccttctgtgcatatcatttcgttggaacctggagaagcatttcagcaacttgctgttgggcatatatcagtaaacaacgcgctcggcactcctatcagtggttgtatacctgaaaatgttaggtttgtagcagctgcaaggttctacattcttgcaggactaaggaatggaatgctactgaggtttgagtcacaaacaagcaaagggcattgtttccctggttccttttacaaggagtcctctaccccttgtgatgatacatcccttatgttgattgctgtacggcgtattggaatcactcctgtagttttggtaccgttgcatgacagagccaatgctgacattattgttctcggtgataggccttggctattgcaatctgctagacacagcttggcatattcatccatctcatttctgcctgcttcccatgtgacaccagtgtcttctactgattgccccagtggtctgctgtttgtttcggagaactgtttgcatttggtaagtttctaggactcgtgaaagtgaaatccacaagcaaaacatgcacatattcttttttagggatcaagaataattacattattgcttgcatttcatgctctgaattattaggactcataaaccatgagattgctaaaatctgggatcgaatcccattataatgagttctccaaatagatagtcaggaacatagaaatcatggctgttgattgttatcttataattttctttatgcactcggtgaaaccgtattctctcttctggcatcaaaatttcacacttctcttttttgctgctatttctttagtatccgtttctcttttgccactatcgttggtcaacatccgttgaccatcacatttgccaataaaaaactgttgtacccttgcgaaactaacaaaatataagaaattcaaactatctaggaaaatacaatttacctttttagtttttaaaggttgtacaaataattatggtaggaaaattttcagttagtttaaaaggttcccacgtgtatcttaaaaatggaatttttaaaggaaatatttttgcatatccacatacaaatcaaacagcatagctaccaatattcatgtaaacaaccatgcacataattccttagtatagattattctgtgaaacatttgagaaccaaatcattcccatgctacatttttaaagattaatattagtgataatataattcccaattttatgtttttctaaaaaagtgtattaagtggccataatttagttttcttgataactttatggtataggttaaaatgtcaagtgctgcattattttggaacatgtacaggggtataatggccttttaggggctaacttaacagtcaatggatgttgactagacggtaatgatgaaacaaaaatttgctctgacagaatagtggcaaaagagagaagtgcagattttcgatggcggaagagagaacacagttgcaatgagtgacaaaaagaaaaaaaatcccttgttttattatacatagaactaatttgattcgtgacatcgaaatggtactcacagattttccatccatggtttctctcatatcattgtatttgagattttctttttgctagcatataatttttgaaaactactccctctgtcccataataagttcatttttggtttcttctattttccccaaaacaagttcatttttgaagaatcattgcagagtttgtggaagtaaggaatgattatttgggagaagataaagtgaggaatagttgcattgcgatatgataaagtagggatattctagttgtatatgtgtgggatgggtgaaaaatgaacttatttagggacggaaggagtaactaggtaatgtcatgtaccttgtagttttctctaatggggcattttaccagaggggtggcaatgtagcagagagtgtgtcaccatgtcaagtaaaaaaccctcccattctgtattctattttccccatggccaaagggactttagtccttttcttgttcgtctgaaacatgaaatctcttaatcgtagtcatcctgttttagcctttccctgttaagtttatgtgcttatatttcaagtagatttcttttgttccagtcccttctgttgatctgccataagtatggtgcaattactaggataatttattctaaaataccaagatgataataaaatcatgaccttgtgggtattgttgaaacttgaaagcaatgcttatattattctctcactattggtatgcatgtatgtgttctcacatagtcacatgtttatctcctaaaagtggcttgcatgtgcatttcattgtactgtcagtttaaatcaagtttatcttttcaggttgaaatggttcatggcaaaagactaaatgcacagaagttttcgattggagggactccaaggaaagtgttataccacagtgatagtagaacactgttggtgctgagaactgggttaaccagtgtatcctgttcttcagatattgttcaaatagatccaagtaatggggcattgctttccagattcaagtgcgaacctggtgaaacagcaaaatgcatgcaaattgcaaagatagggaatgatcaagtattaatcgttggaactagtaagtccaatggccgaccaatgatgccaaacggtgaagcagaaaggtaaggacgacaactcatgttttgtttctgctgaaccttgttttgtcaagtttgaagtgtccatggtcccttagaatttttgcactactaatgtttaacttgcaatcctagtgttttttttttgcttggtttgagtataattattaatattaatgatctgttgttttggtctccacttttttgttttctgtctgcccgttgtctggtattctgcaaaagtgacatgggtatgaatttgcaaagcttgcaaccatgaggcacattttttggtttctcactgattgtgacggtgttgccattgcgctattgatcattcaatgcatatttgcagttggatcatcaatatttttttcttgttttttctgcacttaatttagtttttccatttccatatctttgaattgtgtgtatagttaaaagctgcctttatattgttattataactattctctttggatgaaacagtatcaagggtcgtctaattcttttaagcttggagactattgaaagtcctcgtgagagcggttcgtttactgcagcttctaatttgaattcatctcatgctggttctccattcccggaatttgttggatatgcagcagaggagctgtctagtaacagcatgtgcagcagtcctgatgaagtttgctgcaatcaaattcaacctgaactcatggcaggccatttgagatcactagtccaacatacattcaatggcgctgttcttgctgtacatccatatctagatagatatgtgttggcagcagctggaaatgtggtatgattagaagtcaatttttatcatatatgatagtatatctattaaagagtagcttagctcggtaatggatctagataaataaatttgcaaagaagcttgaatgcttgattggcaagttccggactcttgacatcagaatcagttaatcaacatttatcctggcaaataacactatttatgtggatcgtatggtgttggcttctttcacttctatagattgctagaacaacagaacgaaggtgcattagcactttagcatatgagccacattaatagcagaggatttttttttgtaataactactggagagatagactagtgacgattggagttgaggagatggagattggaagggttatttgccattataaaaaaaatcctgaaagaatatcccaacaagagtgttattattttccaaaacaaacagttatcatgacgtcactaaattttctatcattctgttactatctggtgctaatatgttgatgctgacagatccagtttgaataccacaatatttgaaaatcatgatctgagattttctctgccttatcttgacagctttttgtatttggatttttaaatgaaagtccccatcggataaaaaagtatactacgagtaggacacgatttacaataacctgtttgaagacgtatgcatcacggattgcagtgggtgattgccgcgatggtgttctcttctattcttatcatgaggtacaagttgattcaattgaaacaatacatttttatgatgtttatttttatggagcttctttgtcgttacctctaatcctcgtattgatttatgccagaatcttaggaagttggaactgatctattctgatcctgcccaacggctagtgggtgatgttgcccttttgagctgtgaaactgctgttgtatcagatcgacgagggagcatatctgtactgtcttgcccaagattagaaggtatgccttggtatagatgtctatgttatccctttctttttagtttgtacctgttcttttctctggattctttttaatggtagtgcctcctctatactcttctgcatcttggtcatactttgtaattttgtagccttcatgtttagtttctcaatctaattcctttattgacatactaaatatgcagtataaacatcacaatatagctggcataaaatttgccagtgtagtaaggccacatagttgaatattgtgcctagaagctttatgaatttcgtaatagaattcaaaattttgcattacgtttgtgtacttctcatcatatatgcattactttgtaatatctacctaaattaatttaaattttacattacgtcaagatttattttgactttttttaacatatcttgcagtatccgaaagtccagagaagaacctagcggtgcattgttcattttacatgggtgaaacagctatgagcatccagaaggtaagcttctgttggcatcttagggctaaccagtgtgaattccattaacgaaaacataccaaagagagggttttgaacatgggtattgggtagctgctttggatttaaaggatgaatcatgtgtttgtaacttgatgaactaatgggctgtttggtttgaggaatcaaatcatcctaggatgagttttttccagcatgacccatcatgagtaggggtgaaacagtgcggaaacggacggaaacaacctttatcgttttcgttttcatattttttttggaatcggaaaccccgaaaacgaatattttcgaaactgaaaacagagcgaaaacgaaccggtgcggatacggtaatgaaaatttatcggaatacaaaaacccctcaaactgagcttcaaacttttgtcaagtctaattctcaagtctcaacagtcaacaattcgtcataaaacacaattatatcaagtctaattgttaagtctcaacacaagtacacaataacacttaacacggagtgacggaggtggaggttgaggaataacacctgctggctgctgccactgggctgctggctgctgcgaggcgaggcgttgtcggcggtgaggaagagtcgccagtggggcttgaggtgtcgtagacttgtcggtgtggctatggcggcgtcgtcagtggtggtggcggcggcgaaacggcgagacggcggcgcgaaacggcgggacggcgccgcgagatggtggcggtacgagacggcggtatgggacaacgaagagcgactgcgagagaggaagggtgggcacggtcgcgaggacggcaggggcgaggtcacgaggagccgaggacggcagaccagcggtggcgcgggcggtgggcgctggggagcacgatgccgtgatctggattctggatgcgctgctccgccgccggctcgcggtcgcgcgatgccgtgctcccgtgcagcgatcagtgtgtctctcctctctagggttagccgctatttgggtagatgctgcgatttggattgggctgggaacttggggacgacttatagactattgattctatgggcctttttaacttcagaaattccggcaaattttttggaatttttccgaccgattccgagttccgacggaaactgctattatcatattcgatttcgtttccgagaaaatatttccgttttcgattccgtttctgagaaattctgaaaaaattctgaccagctgattccatttccgaaaacaggcccggaatccggaaagtttccgtaccgttttcacccctaatcttgaggtcatcccatgattttgatgggatgatccaatgatcccattcatctttttttttccaactaagcatgtcgctttgaggaatgaggtagaaatttagtagtccattctgctcttgtttggttcggaagttggacctgctggtgcattgagtatccaattacttagatgaaacagcccataattgatctaggagatttgccttgttatctctcatgatcccgttattttccctgaacatttggttttcattcatcatgacccgacccttttctttctatatgagccccatggagaagtgtgaccgaactagtttcatgttttatattgttgctttgctttcctatggttaattcggtcttgtaatttgctgtaggttgcatttaagcattggcttccaattgatgatttgacagaaccagtgttggagtcggtatacaactgtgtcgtcgcaagcactctgctggggagtatctttgttatgattccactcacaaggtgtagttttgaagattccaactctagaatctaaattcatgctattagctatttatctgtgacagctcagtcagggccactgctagcctgtcggtaacatctaaaccaatttgggagattgaatttgctttaagttaatcagggttgtgaactatgatagttttggct

SEQ ID NO: 23430 - DNA, 1666 bp, Oryza sativa
atcagctatctgagggcccgatcaagtccaatattgatcggctcgaagctcgcaagattgagctcttggcacaacttcaagaatgcaatgccgagctggatctggaacacaaaaagctatctgatctcccacaagctgtcgaagaacaaaaggcaaggctggaatcggctatcaagaatgtcgctgatctgaccaagtcattaaaagttatcctagaaccgatgctcaagatgcccaagccattgaagaagtagaacaaattaggcacagagctatatcggctatccagcgttacctgtctcagtgacattctgtaataggacttagtaaatttttgtaatcggctaagatactctaatacttatttaactagtcttaataaactttgtgccgattaatataattctcaaaaattttgcaacttttacatatatgtgcccttcgtctgcgatataacaatatcggccattgtacatcgacaaaacacaaccgattacaatataaaaacaactaagggcgatataacaatatcggccattgtacttcggcaaaacacaaccgattacaatttaaaacaactaagggcgatataacaatatcggccatctcaaggcgatgtgaatacatcggctatcatgcatcggcaacactagccgatcatgcattaatccaaacacttgggtaatatttcttcaagtatttgccatttagcgctcgtccataaacttcgtcatcaagtccttgcaacatgtaagctcctttagacacaactttatagatttgaaacagtcattcccaattcagcgaccacttgccaaatttgctctcctgagttccattcggcaaaatcaacttccatacaagttctccctcagaaaaagacttaggcactactttcttgttataatgtcgagcaacccgttccttatacttggtaacctttgcaagggctcttaatcttgattgaaccaagtcttccctttcatcggccatgagattatagtactcatcggctgtcaaatcgtcttgcaactccgatcttcttgagccgattctaacttcccatggtaaaacagcctcatgtccataaacaagtttataaggagggacttggatggaaccatgacaagccatccgataggaccacaatgctttggctaatcgaatgtgccactgcctaggataattagaaatctttctcttaatcaatttggtcaaactcttgttagacgcctcggcttgcccgttagcttgtgcataataaggtgaagaattcaacaatttgatacccatgctatcggcaacctgaacaaactcatcggacacaaagatcgagccttgatcggttgtaatggtttgaggaataccaaatcgatcattagattatatgctcttgaacaaattgtatagcatccccagaatcaattttcttcaaaggaatcgcttctacccacttggtaaaataatcggttgccaccaatataaacttatgccctttgctcgatggtggattaatcatgccgatcatatcaatcccccaacctctaaatggccatggcttgatgataggattcatagccgatgccggtgcttattgaattgctccaaacttctgacaatcttgacatcccttgtaatatttgaaacaatcctcggggtgcaggaa

SEQ ID NO: 23431 - DNA, 1462 bp, Oryza sativa
ggtgtcctagtgcaatcgacttgtttgaatgggttgtgatgactttcggcttaaaaagtgctggagctacatatcaacgggccatgaattatatataccatgatctgatcggctggttggttgaggtctacattgctgatgtggttgttatgtctaaagagatagaggaccacatagccgatttgaggaaggtttttgagaggactaggaaatatggcctgaagatgaatccaacaaagtgtgctttcggtgtatcggctagccagtttttgagatttcttgttcatgagaaggggattgagataactcaaagaagtgtcaatgcgatcaagaaaattcaccctccagagaacaagacagaattgcaggagatgatcggcaagataaattttgttagaaggtttatttctaatttgtctggaagattagagccttttgcacaattgttaagattgaaagccgatcaaaagtttacttggggggcagagcagcagaaagctttcgatagtattaaggaatatcttagctctcctctagttttgattcctccacagaagggaataccttttaggttatatttatcagccggtgagaagtcgatcggctcggttttaattcaggagcttgaaggaaaagagagggttgtgttctatttaagtcgtcggctcttggatgcggaaacaagatattctcctatgtagaagttgtgtttgtgtttgtatttttcctgtacaaggttaaggcattatctactgtccaatgaatgcactgtgatatgcaaagctgatgtagttaagtacatgttatcggctccaattttgaaaggaagagttggaaagtggatattttccttgaccgaatttgatcttcgatacgagtcaccgaagggaatcaaggggcaagctatagctgattttattgttgatcatcgtgattattcaatcggctcggttgaggttgtgccctggattttgttgtttgatggatcagtaggcactcatggttgtggtatcggcttggttataatttctcctcggggggcgagttttcatatcaccatgggcgatataacaattaggctgagtatgaagcagttctcaaagggttgcaattactcaaggaagttgaagccaatgctattgagattatgggggattctttactggtgatcagtcaattggcaggagagtatgagtgcaaacatgataaattaatagtttacaatgagaaatgccgagagttgatgaaggaatttcggttggtatctttgaagcatgtatctcgagaacataatattgaagctaatgatttggcccaaggggcgtcgggatataagccgatgatcaaagatgtcaaagtagaggttgccgcattaacagccgatgattggagatatgatgtacatcattatttgcagaatccatctcaatcggtttctcggaaactgcactataaagctttg

SEQ ID NO: 23432 - DNA, 1155 bp, Oryza sativa
ccttaacaggttcgagtatatcggctttgcatctcctcagaggttgttggtgcggtctaacccctagtttgataggtagccgatgttcaacaatcgatcggctgagtcctgggatctcataatactcccaagcaaagcaatctctgaattcttttaaaaactctatcaacttggttctaaattctggagataagttcttactgataaatgtcggcctcggtcgatcacttggacctatgtaaatttcttccaaatcatcggccgacacgaaaccatgtccttacttgtcatcgagatcatctactgtgtccttggtgtagacgtttgaaccctccacgacgcgctcaaaataataacttgggctctccatcttcaatcggctatatatcacaatcggacacctttagaaaatctccttcccaaacctttccagacaagcaatcaaggccatccatcacccaaagagctaaatcagcactggcaacgttaactaacctgtcggctggtatattttcaatcttgtcgtcttgccattaaatcaagcattgctgcatggttgatggaatataataattagcatgaatccaatcccttccaagcaacaagctatatgaacccttcccatcgatgacaaaaattgttgtagggatactcttgttaccaactgtcagctccacatttaaaactcctttggtttctgatggattgccaccaaagtctttgagcaccatatttgtcttgatgagatcctcagcattcctgcctagcttcctaaatgtggcataaggcatcaaattcactacggccccaccatcgaccatcatcttagacatcggcttcccattgacataaccgtttacatacaatggcttaagatgctgattctctgctccttctggcttctcaaagactgcttgttctggtgataaaaccaacctagccgatgctacctcaacttcatcaacatcggcttgcttggccccaaattctgcaggtagtgtgaaaaccatgttaaccgatacaatcacaacacttttccctttagccaatctttttgcttcatcggctgtggcttcatcggctgtaggaacttgattcttaacgcgccactcctgcgtcggcttcgttttcttcagccgatggttgatttcttgc

SEQ ID NO: 23433 - DNA, 8409 bp, Oryza sativa
tacatttcctactacttatcatatttcctctgatacttggtgataatcttagccgagttcactagaaaaccctgagttttccctccatcggctattcgaccagctgtatgtaccatattgtcaggaaaaggattgccatcaaccttcatcggcttcttggaatcatcaaacttgattttgcctccctcaatagccgcctggatctgctgtctgaagactttacaataattggtagaatgagacccagaattatgccacttgcaatacctcctcttgcctagctcttcatccgatggaattgtatgaccagcaggaagttgaatctgtttttcccgaagtaacaaaccaaagattttatcagccttggtgatgtcgaagtcatacctctcttcttttccagaactttttacccattggcatggtataaccttcttgctcctaacccactcagctgctgctacctcggaatcatcatcatcatcatcatgatcagatccatatatgtagagacagacatgattgacctttttaaagttcttcctggcttctgcaaacctctgttcatgcaaggttaccttctatgcaagatgtgacaaactatcaaagtcctgggacgagaatttctccctgatcggagctatcataccctgaaaagccaaatccgctaaatgggcatccgtcaagctcaagctgtagcacttattcctcatctctctaaacctctgaatgtagtcctgcacaggctcatcatgcctttgcctaatcgctgttaaatcagacaatttcatctcgtgaaccccactataaaagtaactatggaattgcttctccaattcggcccagctgttgatttatccatatggcaaagaagaaaaccaagtaaaagccgatccagacaaagacaaaggaaacaacctaaccctcaaggcgtcaacagccgatgcttcaccacactgagctaagaatcagctaatgtgctcataggtcgaaacactgtcttgctctgagaattttgagaaatccggaactttgaaccggttaggcaatggaaccctctcaaaccactcagggtatggatgccgatacaagtttccagtgtcctttggcttgagcccaaattgctctctcatcacctctgcaatcatatcggcccatggtccctgttgaggcaccacctacgcttgctgtggcacaggctcgaactggttgtactgaggagcaaactgaggctgagccgatcctccttgttgattctgaacttgtggcaatggaggctaatacttgtaattaaaattgcccccttgataattcttaaagtttggttgtatgttgtgcaccagatgctcgggaataacttgaggtatcaccgattgatctagttgcacattatgaaccaaatgctctgggacaacttgatttgcagcatgctgcctcgagtgattatcaggcgttctgaacccagccgatgcatttagcaaaccttgctgctgaatcggttgagcaacttgctgccttggtggcgtctgctgaatcggatgagttggtaagaacatagctgcaacttgctcttgagttagttgattcacattttgtccactatgttgtggctgctctctcaccaacaaccgaggattgattaattgccctggtgccgatgatggtgcagcaggtgcaggagccgatactggtgctgtcggttgaactaatggcgcattgggagcaattgactgagcagtctgttgattattagtgatcaagggccgataatttgggaaaacacctcctgataaataaaccggtcctatagcctgatactcagctattgtgccatcaaccatcgacttcaccatgtttgacaaagtattgactaacaccctagattgattaatcaaagcatgttgcacggcaaagtcaatcagatcttggaatttgttaaactgtagttgtgccgtgttaccatctgggctgagatcctcaccttgcactccctgagaagcatcacctttatcacctaagccatctgcagcacctttatcacctgattgagatgtaccatctgagacctgttgtacttctccatccttggaaaaacttgtcccagtgtcacatcctgattttcgttttaggatttataaattatctaataaattattattagaatttatattaaatgttcattaacttacaagtgaagttaaatgtgggaaataaaatttcctaaatttaaagcatggatggatttaatttttattaaattctccatgattaattgcactctctgaaattttctcggatttttcagagctcaattcctaaatgatacaaagaacagtttagtaattatttgatcaataatgatctaattataattgttaagagtttttccttgtttaaaaaaatccttaaattataaattgttgtttaaaaggaattattagaaatgatcttaaaagcctaaaagagaagatctaattttaatttgttaaatctgcttaattctataattcctagatttttctgggatttatttgagctaaggaagtatttttaataaatggaattacatttcatgaataatttaaattgaaaaaggtttttaaaagtctcttttggctttgggccgaaagtcggcccaaaaccttctctctctctctccccagcccaagtcggcccagtccgccgcagccgcgcgcgcgccctcgctcgctgacaggtggggcccgcctgtcaggtcgttgtcttcctccggccgccgccgcccgaaaccctagcgccgagccgccgccgtctccttctaaattcggccgatcctttccgtttccggtgaaatcaattgaggggaaatgatctttgggatcttctctaccttttctcttttggaatcatcctctaaatcgctttggaagttcgtggattcgaggtcgaatcggatcggtctctttcctctgaaccccgaggtttccttcgcgtcgccggtcgccgtgggccttcgccgccgcctccttgcccctataaaaggatccccggtgtctcctctacccgccgccaccctcgccttcgtctctcgccgtcggaagcgccctagcaccgtgtaaccttgtgccgttgtcgtcgccgtcgctccagccgtgcttcgccgtcgctccagccgtcgtcggtcgccgtcaccaccatcgggttcgcgaggtcgtcgccgtccccgtccaccgcttcgctgccgccgaagaccgccggagcaccgccgtcgtcgtcgacccgaagactgccgccgcttcttcctcgtcgccgccgccgtccgttgctcttccaccgtggttttggtcaccggtgagttcgccgcgtcgccctctacccgttggtgccctccgtacgcgtcctcgcgccgtcgttcgccggcgagcatgcgttgccgagccgccgccggtgctgacgtcatcgctgacatcgtcgctgacgtcatcgtcgctgtccccgtagacccgtcgtgaaccgatcgatctcggccgtccgttttggatggatcgatctcggccgttctttcccgtgaaccgctgccgtgcgcctggtccaccgcaaaccctagccgctgacgcaataattcccttttccttttcaaaaataattcattattgcgtcataattcaattaaaatcaatataagtgttttaatccgatttaatcttcaaaaattcataactaattcatcttagctcggatttagttggttcaagtctctaaatttttctaaaattgagatctacatgttaaaaatatccacatgtactgttcatgcttgtctatgtgctgttttggtgattttgctcttttctgtttagattccgacgtttccggagagtccgttttcgcaggagaagactttgaagagttccaaggccagcaaggcaagtcacacagatcccaaacaaccctttgagcatgttgatcccatttaaagctattgtttctattcaactattgcatttattttcgaatgtcattgggtggaattaacctattgtttgttatagcccttttgttcttgattactttattccttgataccatgggttattataattcgactagttggatttatatattggttcaactagatgtattagatataattgcttagccatgcttagaaacattagcacacaattgggataactaatgtttcactactacttaatgatggacttgataatggtagctcacgatggtcaatcgtgattggatagttaattaatgtgccaactaaaacttgataatggtgggttgtgagcacctggttttgatggtcgtactcatgacaattaaggaccggttcacgagtttcggttgtgaaacattaaccgtgccaaccacaagccagcgtgggcaacggctttaccttttgtatagcatggttcattgcggggcaagtggaggagataagcccacgggggtcgctggggagtccatgccttgtttataagggggtgattatgatccaggaaaggtgcgctgtagtggattgtgttgtgcgaggggtattgtcacagctcctttccgaggtaccgtggtggtattgaggcacatggtgacatgatgtggggctgtgtcttgtgggtacagtggtacacctctgatcagagtaaaactattcgaatagccgtgcccgcggttatgggcgggtctaacaatgtttttcgtgattagtctcacacttctcatcataatagaagatgctatatctggtaataatttgattagctcctggtttggaatggtatattcctggtttggagatagatctgtacagccgggtatggttgttcagaatggttgggcctatgcaacagggtatgttgtatagcgttgattaatattgtttaattattacttaactgttttattaaattctcaaatgtttgctaaatgctgctttcgcaaatgaaaccctactatgccatcctttggtatccttgtgcacttgcatatttgctgcgtggcttgctgagtatgtcatatactcaccttgcaatcattcatcagaggaagagttctacaatgatgctgatggtgtggaggattaggtgtagccctggtcaagctgcctgtggagtggagccgtctgcgccgtttatcttattttccgctgcttagatctttattgattgagaggaactatctacctctgtaatgacattttattcgcttattaattagagtaataattgtactctattatcaatttgttattgtgtgcctcggctgattcctggacgagggttcccacacatgtaagcgtttggaattttggatagaaattccgggcgtgacacccaggaacatcaacagctaatttcatcttgtacctctgaacaattgttcctccacgggtctccatgaatgagttcaagaactggttctgtgtttgctgcatcatcacctcgagatccttcttttgttcaggtgtcaatttgtctatagtgatgagcacgatgttgctctcatgaacttcagacacaccaagcttagggatcctagatttgggaggaccctctttgccagccgaagacggcgttgctggtggtttctcaaccatgagagaacgctattgcggttctgacttctagtcggtcccaacgggcgtgccaaaagcgtgttgatgtaaaaacacgaggcctgggagatctgcttaactccattgcaggtccaaaacttgcctttgggtgtgtgagcgtgccagttgatttgatcctgcaagcaacaagaaactaagacaaagaaaccacggttaaatccataaacgatagccgatcggctagtcgccgatgacatatcatttatctttgagccgatgtcatatatgcatcgatcggcagtcattaataagtaagaaagaactaaatctactcaatcggctgtagatattaacaatatataatccttatatcgatatatacttaaatcaagtgattggaatagatcggtcgcatgccaagacagtataaatcacttagatcaaaatatatactaataataagactatatatgttcatagcatagccgatcagatagatgtagcatgtatcagctaatactccaataccactctatattaagagagtaaagcaagtagaatataccaaacgaaagcctaatatacttaaatgcgacaagatctcaacataaagggcaaatttaacatgtcaatcgagcatataagataaatgtagttagatcaggtaagatcggctgaaaccctgatgctaccctaatcagcaaccaaaagcaggctagagattgagattctaatcacgacttataaggtcaaactcaactggtagatatcctatataatctaagtcaacatcggtatttcacctaatcggctaccttctattgacagatgttagccgattgtaagttagatggcgatattgccggagattatataagataaatgataattcgacgaattacataaacaagattagagtataatgaagatgaaagcactaatcccgataacaaaagccgccataacaagttttacctcttgttgaagatcgaaaccgatgcaactcaacctgaaagcaagaactcgtcgaaacaaaacgaaagtaaaagggtggcgatgcgctgagattgtattaaacgtgtgttttttattacatggggctctgggtctatttatacccaatattacaaaatatgtccatatcaaactcgactcttatctctacaaactctaaaataccataagtctttgcggaagactttttcccaaacatatctctaaggaaattacataaaatatcctaattaatagatacaattgccttctcaggactctatccatgcatggcaatcatcatgaagtaaatcaacctaacccgacaacgtatgccgtgtcatattgtcggattcggctcaatcggctaaccctgtccaactcggactctgtcgatcctggtcacagccgattcggactccagccgatccttactctgtttccgggaagatctccatctcgaagtccatctcgatttcttcttcatctccgatccttggattaccaaatttggtcgttaacacctgggcatcgttgtttccttctccaggaaattctgcatgaatttcaccaggctgtccgttttgggtggctccacttcgaccacttgaatattctgcggttttggcccgtactttatcttgaccacggagcattgttccgtcctcggttgaaactcaaacttttcttccttcccgttgatgtggaaactgatactccccgttcctacgtcaatgtaggctcctgcggtgctaaggaacgggcgccccgggatgagcggcgtctcttttcccatgtccatgtccagcactacgaaatcaaccaggatgaagaaatcccatatcttgactagcacatcctctgctatccctgccgggtaacgaactgacgagtcagccatttgaagttgatcttgtcgaagacgtcttttggcatgacgctgacactggctccaaggtcgcacaaggcttggtcgaactgttgtgccccgatcgagcaggtgatcgtaggacaccccggatccttcttctttttcgggagcttgtggagtattacgttgctgcattgatccgtcagcttgaccacctccgttgttgggagcggtctcttgttgttgagtatgtccttgagataacgggcgtatgttggcacttgcatagcgtccaacaacggcacgttgatgtggatcttctggattacttcaacaaaacgagcgaattgctcgtccactaacggtttcctactccgttggggaaacggcagcaaccgtgtgttgcagtactcctatggcactgtcttttctagctgaacttccttgtcagccgagtcactagatggtgcttccttggttatcccattggttcctgcagggttaggatacagcggatcacgagtggacttacctcccctcgtcgtgattgccataacattttcaatggaggagtcgggttgccccggaatcctcctagtttcatttgcagggactaaggatgccaactgagctagctgtgattctatcattttattaaagctcagctgattttgaaaagcagaagcaaagccatctaacttgacattaatgttctttaggatattgtcattggcagcaagctttttgcttagcgcatcagtagttttagcttgcgcaaaaacgagatccttcaaggagggctggttagaaaagttaccgttgttgttacctccttgataatatgggcgtggttggttccaccccttacctccttgtggacggtacccattgttgcccatgtacatcgcctcctcacgggtttttcggcagtcattcccagaatgacccgtgccgccgcagacctcacacgtgacgt

SEQ ID NO: 23434 - DNA, 7925 bp, Oryza sativa
gtgcatcaatatagccactggaatcataaaccgtgtcttcaggatgagcatcgtcgtcaccactcaccacttcctcattggaaggtgtctccaacgcggcaacccgatcagttagtgtggatatccgcttgtccaacctctccatgtggttcaggaagccgattttagtgaaggcatctggacagactttgcaacggcttccgtgatgtccttttgagtattttcttggagagttcgtagttgctcttgactgacacagtcagcaaaatcctggggactcttctcaccttcgttacctgccattgaaacaccaaaacggcaacaaacggtgaagattgtcgcgaccgggaaaattgccttttcccgaacgctagtgtattaatccccgtcccaggaaaagccggggtacaccacacaaacatgatataaaagacacatctttattatatcgatagtatttacattattacagaggcgcttcaggcctggcaatcaaaaataaacagcagcggactagcaggcctacggctccatcttcacaggcgctcaactggggtataagccaggactccacctaagacttcttctccaaagcttctcttactgaagggggggaaagattgagcaagaatgagtacaaccacagtactcagcaagtcacaccggcagatgcatgattaatgcaagggggtacaaggagataataataggggttaagttttgcggtaaacaacatttaaaagtcacttagttgcccaaagccattttataaagacgatcctagagttacacagtgttattaatcaaggccgtgaaccctcacgaacctgccttaacccaaggcctacgatgattcagaccgaactggcaacccgaccctgggtcccagctcgtcccaagccaacccaggccaaccattccacattttagttgttgagcaaattttaagaattaaaacactaacttgggtacattgctcggcttgcccataaccgagggcgcggctattcgaataggttttactctgatcagaggtgtacatctttacccacaagacacatcttcctcacgtgtaaccacgtgccacataccaccacggcatatggacggaagacatgacatagtttccaacccatcctagccatagacaagagtaccgacccaaccccacctacggccggaacctccgggacaggtaggcaggattgagcccctagcagcaggacaccagccctgtgccatgacatctcgactaccgggccgcagctcgtgtagccttcatttgtcctagagatgtccatcgacccccgacttcgtccatctccatccgtgtacttttgtttataaccagactgagccacaaactaagccttacccactagacatgtggaagtacggtagtgctttgcaacagaggcccgaagaccggtccttatatggccgaggtgctactatcaaaaccatgcaccccgagcccagcctaaaaccattttggggattttgaatagagggggcagtgtgaatccaattccacaataaaccaacaattccaaagtgtccaggtgatatgaatatcccaaagtctagagttgtaaaaccacctaatgttacctaattaatcagcgaagcatctacctaaaattatactagtggtactatgagtagagtgtccactagttggggttttgtttaatctagggtgaacaaggtaataataacaataacaataataataaggccataacaaaggtagataggcatggttaaataaaacagtgataacgcgggaatttaaataaagcgataatgcaataatttaaagcaacataattttataaactgggattcaatatgttcaaggatgatgtgacttgccttgctcagagagaacggccttccgaaccttcggcgacgaccacgaaccacgcttcgggaacctccggaacgacagaagctacgcgaagcacacaagcaaagctacaagcctataaagaagcaataacaatacataaaaagaaaacacagggttctttaggttataacaaacattaagagacttgaacgggtcgattcggagctcgtatgaccaagatatgatcatccgaagtttaatgctgttatatggagatttgcggattattataattaagctttgcaactataaaacaggtgtaagcgctagcctggaaaagacaggaaggctgcgccgttgacatgcggaccccacatgtcaacaaaaaggaccgcggtagtccgagtacacagagacggtccacgggtcgatggaagcggatcccgtgtgtcaaccgaggcgagtggccgacaaacggactccactagacaccacacgggttacacacgtggaaaccacgtggctaccgagcgggcacactaacacggtcaccacacgcacacatggacgactaccgacaccggtgcacgggtaccggggccgacaaccgcacaacgagcacgggcgacactgaaaggacgaggacggggcagcgagaggacggatccttaccaccacgcgacgaggcgtgggaacgacaacgacgaacgggcgcggcggagacagacgggcacaacggagacgaacggcgaggggacggcttcggcggcgatccttggacgaaggcgagacgcggccggcacgaggcttgacgacgcggagccgaggacgaagacgaggacggggctgcagcggctcgcttgacgaacgcggacgacggacgagaacggctcgacggagggacgaacgccacgacgaccgggaacgacgagaggatgacgacggcgacgaccggggccggcgaggaggcgacgagggcagccggcagcggctgcacggagacgaggacggcgtggaacacgccgctgcgatgttggtgaaggtggtggtgcagcggggcgacgagccgacgaggaggaatgggtggttggcgcggcggcggcgttccggcgaacttcgggcgacgccgcagccgggccggagaagaggatggcgctacagcaccgacagaggtggcagcgacgtcggccggcgctcaggcgaggcggcagggatggctggagacggtggagtggtggcgacaccactagtcgtcggcgaggacgcttctctggtgatttccccgcgaaacggaggcgaagccggggaagaggaggcagctgcgacgccgggagaggtgacggcgcagccggacggcgctcgggcgaggagggagaggcggctggaggcagccggcgcgaaggaaagagaagggcgacggcgggaacgtagctccgggggtctccgcgggaaacggagggcaagccggggaaggggaagccactgcgacgccgggagaggcgacggcacggccggacggtgcacgggcgaggtggcacaggcggctggaggcggccggcggcgtgggagagagatgagggcggcggggagaggtggtgaggccacgggagaacgcgggagggggctaaaactggagaacagatcgagggggttccattttataggagaggagagggagccggccacggggaaggtcggaacggcggcggaaaaggcggccggcggccatggaagttggccggagttggcgcgggcgttcccggcgattgggggcacgattcaagggggaaattggggggaattgaagaggattcaatggggattaattccccccaatcaatttggaaagaagggcattgattcgcgtggatttaggggaggaacggcgctaggtttccggggagagagagagaggaggccggctgggggaggaagacgaccgcacgtgctgcgcgcgtgcggggagcagctcggcgtgggccaggtggctgggtggcgcagcttgggccgggcgggaaggagggaggggaggggcggcccagaaggaggaggagaggagggagtgggccgggagagagaggggaggggagggagctgggccgggaggggaggaggcccaagaggaggagggagagaaggagagggagagaaagagagggaggagagggagactttgggctgggcttggcccaaaggaggaagaggatttatttttaggtttttctttttaataaactctaataattgtttttgttgcttaataattatttccggtgctctgaaaattcaagtaaaatttgagggctccttttagaccaaggagaatttaacaaaaattcttcgggccacattcgaatttttcttgtacgtattttagtgtttgccaatttcttttcgaattttaattaattctattattccttttagcgaatgatttttaattcgggatgaatttatcaggacgtgacaaatccaccccccttacaagaatctcgtccccgagattcgaggaggctagcatgaagataggttgggtggtcttctcttcttgtttgacttcttctgctccgtcttcacaaactttcagcaaaacttcaccactcggaactgcttggcttgacctcctgttgcggatggaatgttctcttcacctgacttgaaccagggtgcaccttttagctgactcagactaggttgcggtagtttaatgatgcttccgttccagaacttctcatgattcatatcttcggagtcaacctcatacaagttaccacttcatgtcatgcgtcaacactagcttgtcattactaggataccatgtttgtcatcataagaatatcatgcttgtcatttacttctaacttgccaccaactgcctcatattagctttcctggtctccgggtgatagctacttctgctatttgatgcaagggtcgataactttgcctttgaattatgcttcccaagagaaccaacttatcccacttgacatactttgacgtcttcccaaatggctttactgctggatttgttattgtctaatcattatcctgccaaatctgaggcttcgttgttagatgtgattttaatctgacctctgtagattatcttcgaacatatcacttgattcataactgggaatagctctcacgaacaagcaactcggattcactttctttatgttcagtttactttccactattctcttcatgttgtcatcatttagcattcaacgtattcctttgcaccttcagccttgatgtgttctttctcgatggatcgattgctaggaaagtgcgttgaacgatactagtgcaagtgcttttattctagtagcatctgatacaaagcccaaggttgaaccgagctttagattccactgttcaggttttacttcttgacttcttggtcatgtcacaaaagttttcatccttgtccccatagaagtacttctacctgtggtcatctctcttactcgtgaattcaccttctttaatgacagggcaactgttgtagggttgattgctatcgggagtcttcctcgagtgacacaaatcatggttctcgttatcctttatcaatcacctttcgacctacttcttttcccagtaaccaaacatcttttccgatctcttccattaatcacctttcgacctttctcaaccaggtactcttcgctccgggtgttgaggatgcttctggggcaatgaggtccttgggcgtgctgtctttcagagaaaccttgaagtagttcgtcaaaagctagactgacgattgttgcctttgatccgaagaagacacatctgaaactcttagtccaaacaaatgtctctttggttgatcacttgattttcttcgccatcaatcgctaggttatttgattcataacagattatgggtttacggaaatgagaccctaggtctccctaatcaacaacaaaatgtacacaactcacagcacttgcaatcttaacatggatccttcataaacttatcaaactcattcattatctcatgtttctctgttattacatgattgacggggaacaactataaaacaaaagtatttgaacactgatataagagtattatggttgcttctgactagcgctaggcttaacaggtaccgcatttgctccagtgaccacttggcgattggcatgtctgcttccttaacaggtactacagttgtaacagacaataactttcttacgctcgggttcttcatcttgtacttgatttcttggctgctgtgctggaacatccaaaggtacaatgccgatactggcctctgtcttgtcaactgatggctagggctgaaattgagcattgacaccttgtggtaatgcactcgctggagttggagctgttgcaacgcgggctataggattgcttcgggatgcatggatgacaattcgctgaggagcaagcttctgattgcagggagttgcgtggactgacgtgctggcagctatgtttctcggttttgggcacttgtcggcgaaatgacccattccttgacaattgaagcaacagatatcttcccggactcggcattttcttttctcattttgattcctctgtcctggcactggagttaggctgaaactgaaatcttggcgaggatttgtgttgccttgatgcttctctccattggaactggcgggttggttggccatcttcttcgtcagcagaaaactgaattgacaatcttttggtacatgatcagttccttcacaaaagaaacaagtgatcctgctcgttggacacctgtcgggtggatggtcttcctcacaatgaatgcatgtagtggcacacgagctggcaacatgaccgatttctccacaacgagagcatgccttacgtccatttcatcttcatcatctgaggagacttgatctgaatcttcactatcagacactctacctccattagctaaaagatgctctgtcaactgtggtgcacctcggaaggtatttcttctctgacgttttgtcattcctggtggaggccattctgtgctggtaatgatcatcttacggacttcatcttcggttcgcattgatgtttttcttttctgctgaggacactcccttgcatagtgcccttgctcatcacacataaaacaaatgatacttgcttcttttgagtcaacatgtggcacgtcaccctgggtccttcgggatgctggcggcatgctgacttgtggtgtgagtgcttggactgcctccaactgcacttgaggttgtatttgactcaggttcagaattggcgtctgatgctgctgtagtatctctataagcaatcggttctggttaatcaggtgttggactagtgtcacacaactggtgtctggtgcttcattcactcgggagcttgaggtaccaatgtcctgacttctgaccttattgcctttctcattgtcagccatctgttgcaaaggtttggagagggagagagggaaaacaaaggggagagacagattagaaactaaggataggaccttaacagatctaagtcttttgctgttatgatgtatgttaggcttattctgcaagttgattaagcaaacaacctagcatggttacatcacaccccactgatgcaaaccacgcgctacacacacaagcaaggaaacacacgactaacgactctaccctagagggtggcttaggttctgtgacgggttctcaagatcttcactcctgcttcacagctggcttcactgcttcctccacttcgctagcggatcctgcagtcttccggagcttcggcaaacaactgacgatgtcttcttcttcactgacctgaccatctagtactagttgaaatccgaagaaggaagaagggagtaaaccttttgcaaatagcattaggggaaggagaaaaaaggaactttcgcaaatagttttatttacaaaatatgtccttaggttttatccacttggcttatcctacagtcgagatggctctgataccagcttgtcgcgaccgggaaaattgccttttcccgaacgctagtgtattaatccccgtcccaggaaaagccggggtacaccacacaaacatgat

SEQ ID NO: 23435 - DNA, 30465 bp, Oryza sativa
tgtttgccaatttcttttcgaattttaattaattctattattccttttagcgaatgatttttaattcgggatgaatttatcaggacgtgacaaagattatccctaataatctagtacgcatatgtagtggtgcctctcaacgattctcagcaatatggagtacctaaccaagctcttataaggttcttaccagcaaagcaaaggataccgggaagacgtaatcagcgattgcagggatcaagaacctgtgctatctagaagttatatgtggagctaggaaggccaaatatatgtatatgagtggtacacaatccaatgacagatagtaatgctgaataaaaatcccaagtcacttgcccttagttgctggtctactcgtgtcctagacagtagtggtaacaattatggctcaaggaaaaatgataggacttgcaggcaagcttcggcgagtttcagcaaaaacagaaaaaccgaactggcagataagctcaacggagcgcatcgtaagctcaatgcactagtggaaatcaacttttcttttttttcttttatttttttgatatttttttctttttccagaacacgaaaataggcacacctccaagttacagctcaatcggagttgatatgtggcctatggaattttctgaaaccactataaacaaggtgcgtgaacttgtgagctcgaatagacaattttgcaaaccaaatttcggaattttggattcgccaaacccaccaaaggggggagaaacggatgtaaaatttttttctcttatccgaaaagttaaaatttgcctgattccgagtccgtacgcaaaagttatggctgtttaaagtttcggcttctggctagtttttccagaggggatataacctagtctattttgcggtggaattgggatatggtggcagcggagttgtagcgtgttctagtgatgcgtggtgatctggatgggtgtttatgatggcggaaacggctctcaaaggatgaaccctaacacacggtgaaaggtagcggctagggttacaaaggaaaaacacacgactagactaaaacacgcactagaccagcaacaggaacttaaactaggactcaaactcaacactacggactctgacaaagaatcatgcaaaggctaaacacggtctaggttaaggtaactaacgactaaaattttttttggcttttctgtagactctaggataaatgcgaaaacaaaaactaatctagggcaaagaaactgagcgaacctgacggtgaacctagagctctgataccacttgatgtgcactagggttcccaatcttccgaaaggttctgataaacaacgatttgggcggagtcgcgacacaaatcgatccggctttttgaacgcgcacgctcttgagccccgcaatcgcagcaccacgtctcctctggttatcacccgtgtctaatcacagatgacctcaccgagaaggctaatccctgtttgccaatcgaagaacacaaataagaacgagatagaaaacaaccaaaattgcatatgaatgattaagctcacgagttggggtcttacaaaccgatctagcggcgaaattgttctctacagattaatctaagtaaaaccaaaaaaacctaaagatggcggcggtactgatatatagagtttagggtcgtgcaaccccctctcgacgcaaccctaatgggttccaacacgatacacgggccaaaagcccaaatacggtgacgcagcaccggaacagattctggacgttaaattattcggtcaattcccattgacttggaaagaatatgtatgtggggccaaaaccattggaaagattatcttcttagctttccatccatataaagaacgccccaatccgagcacgtaggcgacctgggcgcccgttttagtgcagactggtactggactccgaattgcacccgatgtcgacttggtttgggcctccaccttgacttggatgtcctcgatgatcctccatggctctaagtccttctccaagtgtctacttgtcccctccattgttcctaatcataatatgatcgttaggtagcaatctattcttgaattcatacaaagaagaacataggaacgagctcacctctaaatttaattgtcgcacacgagctcttgttatcggtccttgaatgaccgttggaggattgttgtgtgtatccgaggtagtgatgtccgcatcagttatggcctcgggtcatgacaatacaccatcagaaagggatgtttaacaggaattgaattcgatctttactaaccgaaaagaataggaagataggacatcttttgttcttcaccagcggaggaacagcctgaggccatggaataccgcgattaatcaagcaatctatcctacaaccaaatttgcaaacatcaaaacatatagagactacagaagaacctgtgtttagaaattacctgacgacttaagtatccccatccctgttaggaataagtctagctgctcattgtagttagttgtttgctttcctattttcatattaagtctagcgcatgatctggtcttccgggttgtgcagattgtgggcttgacgcacgctgcgttcgtgcggagtctgttggagccgtgcgcggtatgctccagttcgtgggatggcgcgaagtggcaaggggtgtgacgcgtgcatttaggaggccactatggccacatttttgttctttcttgtaatctgctatttaagcttgagtcttaatccagaaaagctgctagttaacgcagcgccaaaatactctgtgtttgctctgcttccgctttgccggactagctacagttttcgttttgccgctaacaattggtatcagagcctgcggcgatcgccggggttcctgatgtcgctaccaacgccgcgcgtctcccactcaccgccgtgtcatcgctggcgtttgccgtctccgcgccgtggccgtcatggcggccgcggccaagtcgtggtgcatcgcgtcgtccgtgaggtgaccacgagcagcgtcgtctacccgacactcacccgcacaaattaccaagactgggtgctggtaatgcgggtgaacatgcaggcccaaggtctgtggggagcggtggagccggagggtgatgatcttgttgactaccggcaggaccggcaggcgctcaccgcgatacttcgcgccgtgcccgccgagatgctcgccacgctcgctgtcaaggagacggtgcaggaggcatgggaagcgatcaagactcgccgtatcggtgtgcagcacgtgcgtgaggcgaatgcacaacagctgcgccgagaattcggtgatatcatcttcaaggacggtgaaaccgtcgacgacttctcgatgcggatcggcgtcctcgccaacaaccttcgcaccttaggtgataatatcactgatgctgaggtcgttcagaaattgttgcaggttgtcccagaacatctccagcaaatagccatctcgattgagaccttgctcgacgtcaatgagctgtctctcgaggaagttactgggagtctgcgctccgtcgagcaacgcaagcagcgcaaggctgtggctgcatcgagtcgggtcgatgcatacggctgtctcctcttcaccgaggaagaatggctggcgaaattccgtaaggcagcctctctccaagacgccgctcactcctcctccggcggcaacagcgaccgccagggtcaagggcgtgggaataaggacgatggagcctcgaaggagacccagcccaagccagccaacctgggaggccgtaacccgggaaattgcaagaattgtggcaagaggggacattgggctaaagactgtcgcagcaagcccaaggctcagcaggcttacgtggcccaggaggaggacgacgagcctgctctgctcctggccaaggtggagctggatccaccgcgtcctcgtgtcgtcgcaccggcaaaccccgtctcgccaccgagcgcgccaagaacgccgtcgccgacaagcgagctcgctgtagttaaggcaaaagtcttcacgcagctcgacgatggtggcgagcactatccggcgacgtggatcctggataccggcgcaaccaactatatgaccgggtcccgctccgctttcgccgagctcgacacggcggtctccggcacagtcaagtttggcgacggctcggtggttcacattgagggccacggcaccgtcctgttctcctgcaggtctagggaacaccgcggcatcaccgggatctactacatcccgtggctcacggtgaacattgtcagccttggacagctggatcattctggcagcaacgtactgattcaccacggcgtcctacgcgtgtgggatccctgagggcacctgctcgtccgcgtcggacgctccgacaactgcctctacaccatcaagctggacatcgaccgtccggtctgcctcgcggcaaggagcgccgagccggcgtggcggtggcatgctaggtacggccacctcaactttcctgctctccgcaagctcgtgcaacaggaaatggttcgtgggctgccgctgctgcaacaagtaactcaagtctgcgacggctgtctgctcgggaagcagcggcgagcggcgttcccggcgcagtccaagtactgcaccaacgaacacctcgtgctcgtccacggcgatctctgtaggccgatcgaacctgcaacgccggctggtaatcgctattttttgttgcttgttgatgacatgagccgctatatgtggctaaccttgatcaggagcaaggatgaggccgcgaacgccatcaagcactttcaggcccgtgcagtggtggagaccgggcgcaaactccatgcgctgcgcacggatcgtggcggcgaatttacctcaatcgaattcggggaatactacgccaatcttggagttggccggaagttgacggtgccctactctccgcagcagaacggagtagtggagcgtcgaaaccaaaccatcgtcgccactgcccgcagcatgatgaaggcgaagggtgttcctgggcggttctggggtgaggccatgtccacaacggtctttctcttgaatcgttctccaaagaaaagcttggacaaccagacgccctatgaggcatggtatggccaacggcctgctgtgcatttcctgcgcactttcgggtgcatggggcatgtcaagatcaccaagcctgggctaaagaaactcaacgaccggagtgtgccaatggtgctcctcggctatgaggaaggctcgaaggcctaccggctctatgatccggtgagcgagcgcgtccatgtgtccagggacgtggtgtttgatgaagacgccgcctgggactggggatcagcgacgcccgacggtgcttcctagctcgagccattcaccgtcgaacaggtggtgaccaccaccattgggacggcacccgcttcgttgccgactctgccctcgccaccatcgccggccccgccagaccccacaacgctagcacctctgtcgcctccgtcgccaccgccggaggcggttgagtttgtcacgccgcctacctaggattccatcctggacgccgacacagatgacgacgtcgtgcctcgctaccgcctggtggataacctgctgggggatgcctcgctgcccagacagactccgcaggtgctggaacagctcgagctctatgctgtgagcgccgacgaacctgcctcgctggctgaggcagaggcagatccaaattggcgtggcgccatgcaagacgagcttgacgcaatcgtcgacaatgacacttggtcgctgactgacctaccccatggccaccgtgcaatcgggctaaaatgggtctacaagctgaaacgcgacgaacagggggcgatcgtgcgctacaaggcgcgcctcgccgctaaggggtacgtccagcgacaagggggtggacttcgacgaggtcttcacacctgtcgcccggctggaatcggtgtgcctccttctcgccgtcgccgcgcaccaagattggcaagtccaccacatggacgtcaagtcagcattcctcaatggcaagctgctcgaggaagtttatgtctcacagccgccgggtttcgtcgacgacaaccacaagaacaaggtgtatcgtctgcacaaagctctttacggcttgcgccaggcgcctcgcgcgtggaatgccaaacttgatagctccttgctgtcatttggctttcaccgcagcagctccgagcatggtgtgtacacacgcaccaggggaggaagacgactgaccgtgggcgtctacgtcaacgacctcatcatcaccggcgatcacgacgacgagattcgtagcttcaagggagagatgatgaaactcttcaagatgagtgatttggggcactcagatactacctcggcatcaaggttaccctggacagtgatgggatcacgctggggcaagctgcatatgccggcaagattcttgagagggcaggactcaaggactacaatccctgtcagactcccatggaggtacgtttgaaattgggaaagaattcagattttcctctcgtggatgctacactctatcgcagcttggttggaagtctgtggtatctcgtcaacacacggcccgatctggcattctctgtggggtatgtcagtcgcttcatggagtcacccagggcggatcatctcgctgctgttcggcgcatactgcactatgtggcaggcactcgctgctgggggattcgttttggcccaggtgcacagggcacttcaagaaagctgttgtctattctgacagtgatttggctggtgatctagatgagcaaaagagtacatcaggccagattttcttcgtcaatggcgggccggtcacttggcaatcttccaagcagaaggtggtggcattgtcctcttgtgaggcagagtacatcgccgtagctgccgcgacatgtcaaagcgtatggctcgcgtggctgttagcggaggtgatgggcgacgaggtcgccgcaccgctgctgaaggtggacaatcagtccacaatctcattgatcaaaaacccagtgcatcacgaccggagtaagcatatcgatgtcaaataccattatatccgggagtgtgcagaaaagaagctgattgaggtgatgtccgtgggaactgcggagcagcttggggatatattcaccaaatctctgggcagaaccaggtttcaggagcttcgctcgaagatcggtatgtgttctcttgaatcgggcagtcagacttaagggggtgatttgttaggaataagtctagctgctcattgtagttagttgtttgctttcctattttcatattcagtctagcgcatgatctggtctttcgggttgtgcggattgtgggcttgacgcacgctgcgttcgtgcagagtctgttggagtcgtgcgctgtatgctccagtgtcgcgaccgggaaaatttccttttcccgaacgctagtgtattaatccccgtcccaggaaaagccggggtacaccatacaaacatgatataaaagacacatctttattatatcgataatatttacattattacaaaggcacttaaggcctgacaatcaaaaataaacagcagcggactagcgggcctacggctccatcttcacaggcgctcaactggggtataagccaggactccacctaagacttcttctccaaagcttctcttactgaaggggggagaaagatagagcaagaatgagtacaaccacagtactcagcaagccacaccggcagatgcatgattaatgcagggggggtacaaggggttaataataggggttatgttttgcagtaaacagcatttaaaagtcacttagttgcccaaagccattttagaaagacgatcctagagctacacagtattattaatcaaggccgtgaaccctcacgaacctgccttaacccaaggcctacgatgattcagaccgaactggcaacccgaccctgggtcccagctcgtcccaagccaacccaggccaaccattccacattttagttgttaagcaaattttaagaattaaaacactgacttgggtacattgctcggcttgcccataaccgagggcgcggctattcgaatagattatactctgatcagaggtgtacatctttacccacaagacacatcttcctcacgtgtaaccacgtgccacataccaccacggtatacggacggaagacgtgacatagttcccaacccatcctagccatagacaagagtaccgacccaatcccacctacggccggaacctccgggacaggtaggcaggattgagcccctagcagcaggacaccagccctgtgccatgacatctcgactaccgggccgcagctcgtgtagccttcatttgccctggagaatgtccatcgacccccgacttcatccatctccatccgtgtacttttgtttataactagactgagccacaaactaagccttacccactagacatgtggaagtacggtagtgctttgcaacagaggcccgaagaccggtccttatatggccgaggtgctactatcaaaaccatgcaccccgagcccagcctaaaaccattttaggggattttaaatagagggggcggtgtgaatccaattccacaatactccaacaattccacagtgtccaggtgatatgaatattcccaaagtctagagttgtaaaaccgcctaatgttacctaattaaaagcgaagcatctacctaaaatcatactagtggtaccatgagtagagtgtccactagttggggttttgtttattctagggtgaacaaggaaatagtaacaataacaataataatatggtcataacaaaggtaaataggcatggctaaataaaacagtgataacgcgggaatttaaataaagcgataatgcaataatttaaatcaacataattttacaaactgggattcaatatgttcaaagatgatgtgacttgccttgctcgctttcccaaacgccggcttcaacttccacgaagagcggatcttccgaagctgcagcgtctacacgaccaacggaaaagaaaaggcttttactctactaaactccatatcacaagcagaaacaaagcacaaaaatgggttcttgactttttaaggaaaaattagagacttgaatggtccaatttcgagttcaaatggccaagttatggccatttgaagtttatatgctctttaaatggatatttacgaatttcttgatttaaattttaatttaaaatcggatttattgcgtcagccgaggggaggggcgcgcggaccgggtccacgggagtggggcccacgcggcagcctcacggtccacggtggaccgggcgcacgcggcttgcgctggccggcgccgtgggtcccacgcgtcagccgcaccgagggcgcgggcggctgacggccgggccccacatggcagccgcggggcgcgcccaaaggcggcctcgccggcacggccgacgggaggcggcgcgcccgcgcccctatggtcgccggcggcggccataggcacggcggagcggcggccgagagaggggagggaagggggaaacgaaatggcggtcctcggctcacaccgggtcgacggcgacgacgggaacggcgaccgaagcggagagaggcggcggcgcggctcgggtcgacgaggacggcggtgctccggcggtcggcgggcgaaacggaggagtggacgaggtcgacggggacgcggcgaagccgaaggaggcgatgccgaagcgggaggaggtccggggcgacgacggcggcgaaccgaagctcggcggcgacggcggagagagaggacgacggcgcgagctcgattccgacggggagagagagcgacgagtggcggaaacggaggagggaggcacggggagcgtttaaatagagccggggcgagggagggtggccggggaagggaggaaaccgcggcgcgggaggtcggccgccatcaatggcgccggcgagattaggggagcggtttccaaccgaatccgagggagagagggagggaaaaatggggggaaagagagagggaatcacggggagtgatttccccctctttattgcgcgcggggacggcgggaggcggcgggattcgcggcggcggcggcgctagggcacgggcgaggcggcgggagcggcgggaggatagggatgacaggtgggccccacccgtcagcgagggtggcgggcgggcccgcccgtcagcggcgcgcgcgcggggagaggctgagtgggccgcggggaggaggagagagagggagggagatgggccgagccggcccaagagggggaagggggggggaaaaggacttttagggtttttctttttataaaatcattttaactttgtttatttcttaataattattatttgtgctctgaaaattccactaaaatttgagggctccttttagaccaaggagaatttaacaaaaattctccgggccacatttgaatttttcttgtacgtattttaatgtttgccaaattcttttcgaattgtaattaattctattattccttttagagaatgatttttaattcgggatgaatttatcaggacgtgacatccagttcgtgggatggcacgaagcggcaaggggtgtgacgtgtgcatttaggaggccactatggccatgttttcgttctttcttgtaatctgctatttaagcttgagtcttaatccagaaaagctgccaattaacgcagcgccaaaatactccgtgtttgctccgcttccgctttgccggattagctacagttttcgttttgccgctaacaatccccaagtggctttgctcttcgccagccttgccacagaaaccctgattgcttctatccttccatgatacatcttcctaccatccattatgcttatgacaaggactgtgcaaggaaaggaggtggagaggagagcggagagcactcgtgtctgttgcaaccagtgtccacatccaccgggatggacgcgccgcgatggtgcaccagctgcgggtacaagtcaccgtacctgacgaggtagctcatctttatcacgttgatgcccagcacataatcagcctagcaaaaacaaaactctgattagtgatcacatctaatatttacacataagacaaggcattagagttgagcgcatgacagaagcctgaagcctctaccccgtgtcacgcccgaaaattcactagtaatttccgaacttatttgtgcataaaatcctcgtccaggaatcagccgaggtacacaaactgacaatttaatatacagattcatccaattaactaaaacgataaatacttacttaagaggcacttagtcctcaccatgaagaaaactgcagcggaaaataaaatctagcgaagctccggctccactcccacaggcagctcaactggggtataagccaaacgtcttctccttctggatcctttttcttcaactgaggttgattgattattgcaagaatgagcatatgacatactcaacaagccacacagcaaatatgcaattgcacaaggataccaaaggatggcataatatagtctcatttgcgaaagcagcatttagcaaagagttaagagtagtaaaacaatagagtaattaatcagaaattttaatcaacactgaacagcacacccatgctgcacaggcccaaccatcctgaacaaccatacccggctgtacagatctaactccaaaccaggagctaagcaaattattaccaggtataacatccataaatattgtgagaggtgtgagactaatcacgaaaaacattgctcaacccgcccataaccgcgggcacggctatttgaatagttttactctggccagaggtgtaccactgtacccacaagacacagccccacaacatgtcaccatgtgcctcaataccaccacggtacctcggaaaggagctgtgacaataccccttgcacaacacaatccaccacagcgcacctttcctggatcataatcacccccttataaacaaggcatggactccccagcgacccccgtgggcttatctccgccacttctcagtctggtgctccgcaatgaatcatgctatacaaaaggtaaagccgttgcccacgctggcttatggttggcacggttaatgtttcacaatagtagctcgcgaaccggtccttaattgtcatgagcacgactctcaaaaccatgtgctcacaacccaccattatcaagttttagttggcaagtaattaatttaccaatcacgattgaccatcgtgaactatcattaagccatcattaaataatagtgagtcataagttatcccagtaatgtgctaatgtttctaaacatggctaagcaatcatatctaatatctagctgaaccaatatatatagctcaactagtcaagttataataacccaaggtatcaagggataaagtaatcaatgcaaacaggccataacaaaggaatagattcacaccacctagtgacattcgaaaataaatgcacagttgaaataaatagagaatttaaacataggatcaacatgctcaaaggattgtgtttaggatctgtgtgacttgccttgcaataatcggtcttcaattaatcttcttgaatacttccggcgcactcgcgaacctttgcaacgacggaaacgacaagctaacatgcaaaacgaagaaaaagactaataaaaaccaaataaacaatacataaaaagtaaacaaacatgtagatcataattttagatgaattatgagacttgaacggcctcattctgacttcaaatgaatttattatgaattttactagattaaatctaattaaagcccatttaaaaagaattaaataaatttaattcaatttatggataattttaatatgtagatctttattttatacaacttttgcaacttgaaccacataaaactgagttacaatgaattagttatgaatttttaaagattaaatcggattaaaacacttatatggattttaattgaattatgacgcaataatgaattatttttgaaaatgaaaagggaattattgcgtcagtggctagggtttgcggtggaccgggtgcacggcggcggctcacgggaacgaacggccgagatcgaacctatcccaaacgaacggccgagatcaaccgatccacgaccgggccacgacggacggtcccgatgacgtcagcggtgacgtcaccactggcggcggctcgggcttgcaaactcgccggcgaacgacggcgcggcgacgcgaacggagggcacctgcacgtagagggcgacgcggcgaactcaccggtgaccaaagaagcggcggaggagcaacggacggcgacggcgtcgaggaaaaggcggcggcactcttcggcttgacgacggcgacggtgctccagcggtcttcagcgacggcgaaggggcggacgaggacggcgacgcgatggcgaccacgatggcaaccttcccgagcgacggcgacgactggagcgacggcgaagcacggctggagcgacggcgacgactgcggtacaaggtctcacggtgctagggcgcttccgacgacaagagacgaaggcgagggtggcggcgggtagcggcgacaccgggggtccttttaaaggggctagcgagcggcgacggaggcccacggcaaccggcgacgagaaggaaaggttagggttcggaggaaagagaccgatccgattcgacctcgaatccacgaacttccaaagcgaaaaagacgatgattccaaaagaccgaggacggttttccgtgaagaaggggaggatgatgtgaccatggctaccacagatgcaaccattgctcacatcatggatgaacaagaagatatcaagatcaaatcctccaagtgctggaatccgattcggccacctactacactgctgacttcaaacggctgccgaatctgctacgacctccgttttcggcccgtgagtacttgatggaaagctcttggagtcctctttccaatggatccagcctcattgcgaaattccatcttattgagccgcaattgaagcaacaaggtgctgcgtcacctataatgggcctatgggcttgtaacttcgtctgggaccccggcccaggtggggcccatgtggggtgcgccccagccaggtggagcacgaccctaggcacccctaggtcgtcctcccacccctatttatatagttaggtaccccttcagggtttcttgggttttgatagattaaagtttagccattgctacttgcttgcagcgcgcgtgtcggctagaccgtccgtctgcttgttctttggaaccccaacttatcattcgtatttaactcctatttgcaattcagattgcttttatcttgttcttgcttgtttcttcgatttgcttgcaggaataaggttgatttgcaccggcaagatcaacaacccacggagatgtgtatcgatcgctaaggcgcaacacaacgtctcgtacggttgtagtcggatcgtcaacgtttctcccaaatcgtagttatcacaactcaccgaaagatcgggccaacaacagccttgagtgtcgaaaggaactcagggttcatcaaaactgaccatcattttctgtcacaacccgaccatatgcaaataccattaatataattatcattaaggtacaccactttcttttatactccctctgtcccctaatataagggattttaatattttgcttgcactgtttcatcactcgtcttattaaaaaaatcgtgcaaatataaaaaacgataagttgtgcttaaagtactttggataataaagtaagtcacaaataaaataaataataatttcaaatttttttcaataagacgaatagtcaaagagtgcaagcaaaatgtcaaaatcccttatattaggggacggaggaattacataattaaccaatcaactctagacgggggcagatccagaacaagatttaagggcggaatcatctccttcttccttcttcagtccccctactcttcattttctctgatgaagacataactagctcggatataaccatgactaccttatatattaatcaaccaaaggtgcatatgttctatattagatttacttgttatatatttgaaaaaacgttgctacacaatgagttttatgtgatttcatttgcagaggtacttgcttgggcgaaagaaaagaggccgagcgtaaggaatgcacgcatgattaaataagttgattagggaccaaaccaagaccttctctaagtctacttctaccttaccacgtcacttttggtccatagaagataaatggtcaagtttcacacgttttggattcggattcgggcctcctgatagcatcaacttcaaacagacctagccgctgatctagaaggaatttcggggcccataaatacttgttggaaaggttatggagtctaatttcagatggtttttgtcccacatcaaaattcctaccgagctgccgggaatctgcaaaacaagccacgtatcttatccagtccgaatctggtttgggttttgagccttgtaattgtatcgtgggcttagcccaaaagggtgtgcgcccaagggcaacctaggatgtccctaatcatatttattcagtagccgtcatcgtttagagtcgggttttgcttagattaatctgtcaagaacagtttcgccgctagatcggtttgtagatccccaaatttgagtgcttaatcattcatatgcaattgtatcgcaatctatcttgttcttgcttgtgttcttcgattcatatgcagggattagccttctcgacgaggtcaaccaggtttcggcatggttgataaccaaaggagacgtggtgctgcgattgcggggctcagtagcgtgttcgttcagaacggatcgagttgtgtcgcgactccgtccaaatcgactgtttatcaaaacctatcggaagatcgggacctaacattccttattattctccctatacattcttcccattcatctccccttctatcaatgaggatctagcggagtaggggggactcgagtccccccagcacccacactggatcgttacaatacaatactgggcgcatatgatacttacaagtaaggagattacattgaccatgctaattaaagaaataaataccttcggttaatcccaggacaatcattgtattcccatcccatgaatcaggtgacggtgctcgggatcggtggcttcgtgatgatgatggggattgggtgaaggagtgagggcgatgtagatcttcatggcgtcgaccctcgggattggaggcaatggggaccgggaagacatagagttgggcggcgcgacgggcggagggtaccacaaggaggcatgatggttggctcgagcagcgcgacggcgacgtggcggtggtgaatcggcaacggcgttcgggatcggcagggccacgaggatgccttcccgagcagtgcttgacggagtccttcacgacggaggaacaacggcgactcttgagacggctgggtggcggcccttgtggctgtagtgattagggtttgcccgggggagtgggcggcgcttgtggtggcaggggatggaggaagaggtggcagcggcgattagggtttgcttggggagtgcgtacgacggcgccctaaaggttgggcgaaggagggggcaagcaggcgatggaagggatagcggcaccgcgggctggagccttgggggtggggccaaggaggggtccaattaaaatatttgctacttttactgtaagataccgaaattttaggattaaggaatttccatcaaaactagttaaaaggaaagttcttcaattttgtgaaccataaaatttcatttttaacctaggtgtagtcaacctaacttgaactaaaataaaatttgggaaaaaattaaaacctttacatttctaacctaggacaaaaatgcaaacccgattgaaagaatgcatactcactagggacattgtataacttgagtcatttttgtgcattttattttttgttggcattgcataataggtctcatgaacatgaataaaagctaacttctctaagcaaaacctaaatgaaaataaatacacttggttgtatgtgcattttagtatcttaggtttgtttttggatatttttggtgcatctcatgataggtttcatattcatgtcatgcctaaagaaaattcctaaaaagcaattaagcaacaataaaattcaccgaaattctcataaatactacacaacatcctaagttcatagtaattttagcttgaatttatcacatcaaatgttggctcaaataattccttcaactcagctagaaatctggaaaacagcatatcacttagactactttgcgccttcaccaaaatttaatcataactcatctagctaaaccacttggtcagaatgttaaacctgttgtactctaccatcagttgcaatggcttaattgaattcgaagagaaaccacatggaatatgtactacaagatgtataaacagtattcctgactgcagtcaatagtgtaactagtcaactttactaaattaccatggtaaatcaaaaagtaataaaactttagaacttggaacattgaactatcaaatccttgtacaccttgtagcaaccttatctctccaaaattctaaaattaaatggattagagaaagagagtaatatagtatagtgtaatagtgccaacactatcttacttatgggaccaagtccttgtggagcccactcatcaaacaaccacagccacacatcatctacacctctcttatttaatttttttttcatttttctaaaggtgagagagatggagataaaatacaaatcacacctaagctactactctacctctctcattcacctagaatgtatctacatggacccacttgacattcactcatcagccatacacccttggcgaatcacctctttgatcctaaattctacttaaaaaaaaaaagaaagagagagagagagagttatgtccaaattacacccaaaacttcaccatacctcttcaatcttctggaaacatctacatgaggccactaggcagcctctcttgctaaacatggatggagtacaagttaggacatagcctcattagtttctaactcataaaaatcgtgtccatgccatatcatgccacctatctctcccttgccagcacaacaatcactatttggtcaaccatttcaccagcaaactcaactcttcttcctcatcatgtttcactaagaattagaccaagaactttattgtagagccaagaacatcctcctcaatcctttcaaccgaagatgtttaatccattgcttgatttctctggtgagcttcgctgcatttcaaccatggcaacgtaatctacacaccatacctaatattttcatattcaatattcttcattttccatggatcgaacacctgcgtcgagctcgtcgtcgctcccggtgtccagtgcgcagccgcgggttcgcgtcgccgttcccgtcgacccaggccatctcagactaagccactgcgccatgattgtcaccaagaccctaggagcaagaccaccgaaggaaacgagctgaggcaccgtcgttaaagagatcgagcctttcttcttcaactccggccgccggcgtcaatcttcaattcccgctgctctggtgagcctcgtgtcgattcctcacatatacaccatccttgagacctctctaaccacctgtacaccttctcttagctctccatctaccggaccgtgctgtcaccgtgaagccgacatcatcctccgccttcaagccgttccgcgagctgctgctgccgtccaagcctcgccaacaccgtgcttctgaccggtgagcaccctaaacctcccaaagatcgaatgcatgcattcctttagcccaaaatcaagttccaccgcaacatgcaaagccatctgaaaaccttctccactattctgcaacatacgggcgctatggttgaccatttacagcatattcaccttctctaggattgcattgacgtgggacacactttttatttttattccgacaccatccgagcctccgtttgccgccggcgagcttgagatcgagctcggccatagcttgtcctgcttcagctcgaaccagggacctccttacaagaatttaatttaatgtagggtcctttctgcaaaagcacaggacacacagcactgttgcaggacctactcatatttattgaaaacaggaaggactcttaatgaaaacagctattcaacatgtgctgaattgttcaaatctactttaaacttcaaaattgcatactcctaactaattcatctaaactctttttaggtgaaaccaatttctatagattcacaaaatttagcactataatgttataaaataagaagtgacacataaagtacaaaaatctatctctaaaattcatctaagaaaaatcagacataaaatatgcacaggattataaaatgcatagaaaactcattacaactcattttagagcaaacttagcttcaacagatccaccaacatgttctctaaaatcaaagtaaaataaaacatatacacaatttacatcaaatgcctctaaaactattacttccaagttaagctgaaatttagaaattgatataaaattcatcttaggtcctttttgagtaaacacaagttctgtagaatcaccaaaacatataattccaagttataaaataaaattatatacttactatatgataaaagcctataaaaaattatgtaagtaataaccaacatagagcagcctttaaattctaaaatttgtagaaattcatttttatttcaaatggaatgaaccaagtttctatagaaccagcaaacagtgagcttcatcatagtaaaataaaatatgacaccttctgtacagattatagctctaatctttaaatagataacctaggagttaatcacctagtaatgattaagcaaaatatatgtgtaaaggtatttaaaatgcactctagctatgaataaaccaaaataaaacttgttagaccagagaggtcatagttccagccttaattcccaaagacttagcaaacttaactcatataacaatttctaggttggtatgttaagtaactaacatagaccatccctatttataaaatgtgtagtaaaataatataaactctaaaattatgaactaagattagattagttaactaaaatactcattttatacatcactggctagatgaggcaagttctggacctaaacctctaaagccatgaacctatataacactatacacctataacatgttataacttgtaaaatacataaagaattcatattaactctaaaaattatgaaaccaaatatgttagtcctagaaaacacatatcttcaccccagcaaatataaacttaataagaatcaccttacaatagcatttcataatagtacctaagtaaatcctatattataccacgcaaatttctaaaattcataactcccaaataaaaagagataaaatagaaattctttcacctaaattcatcttagaccaatacctatccactgtgcacaaatcatgcattttaaagcattttggatttttcgcatatttcggtgtttaattgcataacatgtactttgtatagatgattgcttagacggtgaagaagtgatttaggtgctgacattttccagttgcaaggcaagtcccacctccctctctttaatcactttgaacctatgttttggaggttattgaaaatgtttgcaaatcttgcatgtcaattgtacagtaataaattaaaattttgttaaacttgttagacaaactcctattatttgcattatcaccttaaccccacatatatccatatccatcattcctaaacttaggaacaatatgactatactgtcgacgtttgatgtcgcgattccggtatttgatgtcgtgattccggtatttgcatagtatagggatcgttggtactaggatatatgcgaaattgtaataaaagaaatggggatgaggatttttatacagattcaggcccctgaattgttaggtaataaccctactcttgtcggtcgaagccagtcgttgctcttattcaccatgatcacaccagtacaatatttggggtagcctatctaactgttgccgacttgacagccataaaaccatcccgtagtcgataacagagtagtcttcctcctcgaatccgtgcccggcgagatcaaagacagcgctatgtctctcctgacagcatctgtagacaccgtaggggactagccatgcttatctctaaagtcgatatccggcggcatgtcttggcgtatgttggcttgtatgttgatctattgctccgtgtcctctctcctcctagggggccttgtatttatacccataggtgtctccttgtccaagtagaactagggaaactaatatggatacaatccgagtagtccttgtcgtttccatgtagaactctattcatccttccttacgcggaactcttcctatatccgaaggttgtttccatataagacatggtatgtggtgggtcctaccgagatttagtcaactactattaggtatgtggtatccataaccctgacatataccactttatatatacgagttttgatgtcactaggttacaataatgcttagccatgcttagaatggtgttccttgtcattatgggctcattacaaacatgaaaattgtttctgaaataatctagacagaacttgaatacttatgattttgataaataaaatggagcaaaatatggattttaggtttgggcctcaagtggtgcacatatggtgatttgttgtgtaccgataggggtagagtgcgtccaaaccgacctaaggacttcactcaatgtcagttcatttcgtatacagtgcaaccacatccacatgtgctagtacgggatagcccaagcttagaaaattatttatgatttagccttacattctggtaggccggtgtatatgagttcgtataattcagaagagcttcctatttaccccgacgtgatacaacagtattgtgcctcgtggtgggttgccgttgtgtccgccaccacggcgttaagtttaaggcgtgggcccgccacttaacggttctaggtcatataacgtgtatggcttaagatggagtaacacgtatcgtgctggtgtaaggctaaatcatgaattttggaacagctttgttgcgggtaataaatcgggtacttatgtatcgcgtatcgtgctggtgtaaggctaaatcatgaattttggaacagctttgttgcgggtaataaatcgggtacttatgtatcacgtgccatgctcttgcatgattattatttcgcatcttgtggggaaagtgtacaaactctgcagacttatgtttattcttctaaatgctgaaatttaacttcaaaatgtgatgagatttgagaatgatctccttgctgccatggatagcaatgagctgcatacttatacatgattaatgtgcccatatgctaagtactagcttgctgaaatttatttgaaagcaaaatctgatttgaatgtgttttatgcaaataaaacttgctttatgataaaaagagacatattatgccttccttgattatatgtcttgcaaatagggtgttaggcttgtgttggtgcttgccagtacattatttttaataatgtactgactcttgctattaaattaatcttttgcttgcatgttttagatttagttttttagtgatgctggtagtacattatttctaataatgtactgactcttgctgttgaattaaccttttgcttgcatattttagatttagtctttgagtgatgcgggtaatcgactgcttcttctaggacttgaacttaatggggtaaatccctagtcggtgtgcttgaggattgggtagtcaagcttccgctattctatatatttatttggctggtcggcctatgtaactatgaagtagttgtaatttagaatcactttcgtcttaagtgtatttttctatgtatttccatgcttgagatgaaagtgtgaatctagtgtacatcctgggaactagattcacatgagtatgagttaagaatatttgagatgttgtagatctttagccatttttgtcaagtctcctgaatgtgtaacacaactggtcgccgccttcgagtggtttgacgggcacatctcaggctaaagttgactggcaggctataggcccagcaatatctccaatattcctctctcgaggcgtcagatatttcattatgcttgttgttgacttgaattatttatttcatctctcaattataatggaaggtccggagagcctacgacatttacgtttggtaattatccgaatgcccctcttaggttcggagttaattttttgctcttctaaagaggtaggcatggactccccagcgacccccacgaacttctcgctgcttctcagtctggcaccccgcaatgaatcatgctatacaaaaggtaaagccattgtccacgctggcttgtggttggtacggttaatgtttcacaacagtagctcacgaactggtcctttaattgccatgagcacgaccatcaaaatcacatgctcacaacccaccattaatcaggttttatttatcaattaattatcataacacgattaaccatcgtgagctaccattaaccataagtaataatgtaatatgattcatcccataaataagctaatgtttctaagcatggctaagcaattatatatatagcatttaggtgaaccaaaccaatatataaggttcaagctaatcaatttattactcataggaaaataaagtcattgttggccataattaaatgggaaaggctcaccacccgataacattcgaaaataatgcataagttaaaataaaacattagctttaaacgggttcaacatgctcaaagagttgtttgggatctgtgtgacttgccttgagcttcctcaaacgcttctgaaccttcctcaacgtaaacgctctcctccggaacgttagaaactaaagcaaataaacacaatcaataaaacagtacaaaaacaagcataaacagtacatgtggatatttttaacatgtagatctcgattttagatgaatttagaaacttgaaccacttaaatccgagttacgatattttagttatgaatttccgaagttttaatcatatttcatctaatacagaaaaactaataaaaggatttatgacgtcatcgatgacatcatcgccggccatggctctgaaccatgagatcgccggccatggctctgaaccatgatgtcgccggagctagaggacatggccgggtcttccgaggacacccatgcgaagaggacgacgacgcgaactcaccggtgcgaaaaacaacgacggacgacgacgaacgaaggccggcgacgaactccaacggcggcttggctcgggtcaacctcggcgacggcgctccgacggtcttcggcggctgaaaaggggcggccgaggtgctcctccaccgcgcgaacccgacggcgacgacggtaagcggcgacggcgaccacaaccccagcgcgacgcggttggaacgacgacaacgaaggcggcggctagggctacgcggtggcggcgctacgggcaacggtagagctcggaacttgaggcaaacggaagaggacgacttagggatgctttatataggcacgggtgagagagatcgaactcaaaacgagaggattttaaccggaaaatccgagggttagtttggagaggtaaactcaaaaacgagtttgactcggataaaatacaaggaattaggttccgattcttaaggaaaacgagagaggaagataaaggaaatatttcccctcaactaattttcggaatacacgagagataaggccggatttggatgggaaaaacctagcccactcggtctcagttcggctgtccagaggttgaagatgaacagtgcaaaggacgaaaattagacttttcggctgggcttctacttcttggcccgattgaaagagggacacaaagcagacttcgacagagggagggagagggctgcaggctgagaggagattgggccaagaaagagagaggacttttcctgtttcggcccgaaaaggaaaagaggaattttaattacttttccaattaaattaatcactgaaatgatctttgaattgttaaaaatacttccaatgctcaaataatttcaagaaaaatcctgaaaatacttggacactcaaagtacttaacaagattataattagaccatttaatgattaatttaatatgtggataattactgaaatgttgtttgtattattaaaattagaaattgagctccggaaaatctgagaaaattccagagagtataattaaccatggagaatttaataaaaataaatccagccatgctttatatttagaaaattttatttcccacatttagcttcacttgtaaattaatgaacatttaatataaattctaataataatttattaaataatttataaatcctaaaacgaaaattaggatgtgacagtggactcttaattattagccacttttgcttatgtagcatgccaaagtggcaacccagggtgagaaattgcgtagggaccacacgtcagtctctccctccccttcatttcgacagtcccgtcgacgccggcgacgccccctgctacaccgcacgcaaccgtcgacgccggcactgctacgctgctccatcgcgcgcatctcttgcaccacgtcgatgtcggcgctcgtgctcctcgtcgccacccacagtgccgtcgcggtgtacaacctagtgcaacgagctcggtgcgcagcggcagtgttcatgccagcggcgttgcggaggggcagcggcgttgcggaggggcagcggcgcggcagtgctcctccagctcatctttctcgtcgtcctcgactcccactctcctactcacatgcggcggcgttgaggaggggcggcggcgtggcggtgctcctccggctcttcttcctcgccaacctccactcccgccggcggtggcggcgccgagctagctgtggcatgctgtacaccccggcggcgctgtgggtggcgatgaggagcacgagagccgatgtcgatggggtgcaggagatgcgtcgacagggctggagagatgaagaggagggagagactgacgagtggtccccatgccatttttcccctcgggttgccactttggcatatgacacttaggcaaaagtggcaaatagttaggcaaaaatggcaaatagttaagagaccacctctataaaagggcaaaaaaattaactccaaacctaagaagggtatttggataattgccgaatctaaaagtggcaaatagttaaattccccggcaaaggagagtgcgttgggaaggaggagcgatatgagccgttgggttcgatgattttgggtcgttggattggtgaattaagatgatccaatatatatacaattcaaatcaggcttttcaaacaccattttagggtgttggacacggaataagacgaatattcaaaagttggacacggaaacccacaactacacttaaaatgagacggagggagtatatagttttttttccatctgatttagcaagtcaaactcatagctaactccagcaacctctcaatctaccctctttattctgagtatacgacactaagatccgtatgtcaatctctaccatcctcctaactacgctacctttgatcctctatcctccttcctcccgtagcaacaacagtgacaagaaggggagaagtcggcaatggtggcatgcggtaagagggatggatagccgatggcagcggctggtggcaagaggacaagaagatggcggcaacaacaacactagttgtgatggcggtggattcacgtgatgggggaggtggatctgcatcagccaacggtggaaggagcaatgacctcagccacggcagaggtacgctcgcacgacggggaggcggaggcacgatggccgttgatgtcggagctacagagggcgccactaagctatcttgcaggtggcaccctccctccctcgccatgtctcaccctcgcttgccctttttgtcgccggtgttctcgatcctccctcactgcaccgccatctcaccctctcgccctcaccccatcccctccaaccgcgggcagaggccaacgtagtggaggcctagcgcaatggagccccgtcggtgaccgcctatcacctcgtctagagagggaggggggggggatagagttgtgggacccacgattgggaagtgatgttgggtggctaaatttggctaggagtgaagagatttgggcagccagatgccttggccatcctattagagagactattagagcactttttttttaatagagtagccaaattttagtttggagaggatgtcgcagttgctctttaggatgcatgaaataagggatgggtaaaggcatgggagcgcctctgtttctttcggcagacgaggacgaagtgtactatgaatataccttgatggcagcatggttacatcatggtaaccagggaaaattgccaatatctaaatatgtacgtatgtattggaaatctagacattcaatgtagacaaatctcgctatcaagactaaaaatttctcccggattcaaccatgagtaaaaattttactcacatgaaaaattttacttcggtgacgtggattaatcacaagcctccatttttttatacaacagtagttttcagatttttcactgcatatctagtttacagtacatattttctctcgtaaccacgataaattcacatcctaaattttgtccaaatttttaaactccgcacggtaaacgatggtattaacggtgtgctgaagataaaaagaaaaaaatacaaagaacagcaataattctaaaaaatccaaaaaaaaattgaaagtctcaggactacatactacttttttttgcagaacatttcttatgtcttactactccatccaaaaaagagagaaaccctagctacgaacctgagagaaaccctagctacgaacctggatatatgtgtgtccaggttcgtagctaggattggtttttttaagaacagatagggtatacaattaaacaaagtagcaatcaaattccaacctctctctcgttttgtaacatcttttcaatttctatggagctacagaatataaagtaaactctaccattttcacaaactttgttcatacttgtagatatatttttatttttttccaaaattgaattcaaacaaaattcattgaaccctaccgacggtttcacctaccatgtccccacaataaactcaattaccacgcagtaaccgccggtaggcgacacccttatcacaaccagaaacgggtgcatatacaaatggtacaagggtatagggcatttccgaataaggataatgtacatgatctcttagcttattctcaatatacctatcatttaaggtacaaataagcccgattacgattcccattacactgataaccgatcaagcgtgatcaaaaagtgctgaaatgtctacaaggaagactgcaaactatcataatgtaactaaacgatgttcatcaacgtacatgggacttgcataattcacttattagtacctactgaccaacacaaaatcatcgtcgtcaagaacccgtgcctcgttctcacccacaaagttttcccgtccaatagattcaacgattcggacaaactctaccctcttttcaagaggaagaggtacatatggtaatctgaaaacaggccttaccactccaagctgagccagggcagtgttgagagcaattggatttggctggcaaaacaaccatttcatcaggggaaagagcttctcatttagcgtcttattctccccttcatacatgagatcgtgcatgagaccaggaataaggttgctagccacagaaataactccagtggcaccatatttccacctagaatcatggcattcatcatcattaccactccatatggttatacctttgtcagtgtagcacttaaccctctcatgtccaacacattctttcacacctgccaagtttgtgaaacttgaaacagcctcaataactgcaggaggaatatcctggccagtcctagatggaacattgtaaataatggttggacccattgggaggacagcctcaaaatgagatatcaacccttcgatagaggtcttcccatagtaaggattgatatggagagccgcatgcatacctacagcaaatccctgctctgttgcatgaatagcctctcttgttgagttactacctgtgttgcctaccactttaactttagcaccaaagcagttaacagtatgtccaataagcatgatgtgttcatcccagctcataaggtggccctctcctgttgttcctccaactattacaccttcagcaccaccatctatctgcatatttatcagtgaatcatatgcttcaagatcaaatcttccatcaggcagatatggggttttgaccgctgtaattactctgagactagtgatatcagctgttgatgtcctgcggatcagaaaaaggaagatcatatctcagcagcagataggtatcaagcactgaaatacccatgtgcaaaaaagggatcacatgattattaagttacaaatttaccaagcacaaaattgggttaccatttaccaaaagattatacaggattatttcatttcacaaaattggaaatagcaagaacatcttatttctctttaacgcgtgaatgattattcctgataagacctgaacttgatacacatgaagcatgtcctcagtaagtcagtatccaacttataccgttacacatcacccgagtgaacagcacacaagcaaacgtatggctctaagtagcaatttcggattttggtacaaggtatgaagagatttggtgctggcatggtacacattgaattcagcaggggaataaatgatttcggaacatgataaagtaaaattggttacaaaaattcaattagaacgggatgtggacatgtgaagttctgactgaaaagtggcaattgaaagtagtttacgggacatcttaatgttcagctaagcttatggaaacataaataaaacaaggaaccaattctttccttccaaactgagaagattaccgatttttcacttcagtacttcgcattggaagataatcatcaagggtgatggcctgcaatgcaaactttcctctgctaatcctgtatgaaagtacttcttgtgttagtgtgttgcatatgaaagtagaaaatgaatatgggggagttgatgagctaaatatccttcatcactccttaaaatgacagaaaagaagttgcacaaatcgtcagaagtacaaaatcctaaataattgagatggtagcatatatatttggttgg

SEQ ID NO: 23436 - DNA, 26848 bp, Oryza sativa
  unsure (1)..(26848): unsure at all n locations
attcctgcacccctttgggatttggatccaaccgaggcatccgtggtcgggtcccaactgtccctgtacatctgctggtggtgaagaggaagacgcctcctgaggtgcttctctcgccatccgtcatgttaccctgcgtgagacatcacgaggcaactccgcttggagtggaatggttagttctcggcaattatacaaatgaaactccgggttaggtaacagaatctcatttgtatagccgggaaacaaaaatataagataatcatttggaccatgtttgagtatgtggcattgaaccaaataggtctcatcaacataagagcgggtaataggaatacttgcatataaagcagagtcccaactcttcatgctaaacgagtcaccaaagaaatacactaaacaggaccagacaacttcacattttctaaccattgcttgatcatgggttgaacgggtgaaactttgtttttttttaaccatggcatacaagaggactagttcgcactatccggataacagctctatgaaacaacgtgaaaccaagcaacttatgcaacagccttaaggtaggattatggatgtcattagttctaggctttctataggatgagagacccgaaatactttgccaaaacatgcgcttgttaaaatcaagaaatgtgtccctgaaattaactttgcatgttttgtcaaagcctagatgcaagctaaggtctttccaagaaaggtgatattccttgcggaataaccggaaagtaacaccatcgcctacctctagcaaggcacataaaaactgcatggtaagcaaacgggaacccggctcatctacacatgcaaatttatcccatcctaaagcacgccaaatagtatgaaactcagcatccatccctatccttttcagaaggtcgagtcgtatgatcaggtctgagtacacgctcggtctttcagcatatgataggcttgcatttcccggtcgcccacgaggtcgagattgaagttgtcgtactgccttggtggaacgtaagcctcctccatggatgcatccgcggaagaaggtgcactcggcttatcgtgtcggcttgtccgtgagcttgaccgtctcttgaatatgcccgaaagtcgtttcttcatagctacaacaaagagcaagaatacaagattactcggacgggggttaagcaagtacccgccgattaaccttgcaccgaactaaagcaaacttgtatatgcaaagtgtctaaactaaatgcagcgaattgtgtgaatttgaggtaagcctgcaaaactttgaatgaattttggagcaagatttttgagagggagtgaaaatgagttaaaatggtgtgacttccctctcctagccgagctgcatatatagtgcatggataactgctagtaatggcatgtggaccccactagccgctaccctgcagaaatttgcagccagccggtgccaggccggttggttcggccgaacccccggtggacccaattgtccccatattttgctgttggattccaacgactagtgtggtggtggccgtgcaaacttttgccaaaaaatttattttattttgctcacaaaaattcatttgaagaatttgcctcaaattcgaacctcaatgcatgctttgagaattcaaacattctttgatgcaatgggaaataaatatgagatagctaccaatttacctgttggcaagggcgacgtcgttttaggtctgacgagcacgaccgtacctccgatgcatttagctcgatgaggcaccctgttccggaagtacaggaacaggtgtcttctccttaatccgccacaccttctttgccttaggtgcaggcagcggcctcttcataactgggaacgcaggttgaccgacatgtattcccggcttctaggatgccggcttaaggtactgacggttcctcgttttcttcccgctccaagaagttcatcatgaaagttttgaggctatccgtccttcagtgttttactttgacctccttgtgggttcggtccattcctgatctaccccatgaagcaatgctccatccttggtctccttgtggatgatacccgttgttgttgttcgtgagctttgacattctcacaggtttttggacaattcgtcccaaagtggccgtcattgccacagacctcacatgccatgtgagagcccagggccttaatggtaccctgcttggcgtccttctcattgttgtccagtctcttcataaggagatccaactgggcggcaagcatttccgtctcattgacggtgtgcataccgcattgacgggtttatgttgtttctcgctccaacccatatttgagagcctcttctcaatcagatcagtggtatctctgaccatctttgagaagggtgctcctccagcagcagcgtccagttgatcccaggacgagagtgttaatcnnnnnnnnnnnnnnnnnnnnnnnnnnncaggatgagccactcgtccatcccatgatgaggacgggcggtgacgcattcctgcagcctttcccaagcttcaagaatggtttcatccctcgttcgctgcaaaccaaatattcttccatgaagagcgttggtcttgcccatcgggaagaatcatgagaggaatgccgttgagtgcttattccgggttttcaccgttgcacggttgatgtagaaccactattttgctctcccgaggagggagaacgacaacagttggagtctgagtcctttgacggtatacgtgctacaacttaacaggaattgctgcaaataagcatttgcatcctccttaggcttgccacagaacaggcaagcctgcgccatcgttaatttagctggtcttcaaattaaagtcaccatctcccctgctgacttgggttccaactggcatgttaccagcagagggagcagcgaacttgcaaagggtcttctcagccatatcgtgcaattctggtggcgcgaaattggctggtctagttgccgatagagtaaccttgaggatgaacgataggggtcagcttcacttcatcagtgactccagatatgaaattggtcggcagatcagaaccaatcctgtactaccctattttcacataaaagagaaaacaaacaaggtttgcctacaaaggacaatgacttatacagaggtaaatataaaattattagaaagtagtaaactcttaatcatttatcttccccgggcaacggcgccagaaatgcttgttggtatttcttagcgacactactggaaatataattcccagcagtagcactagaaataatcctggtatattatagttacagatgtgatccgcaagcgcacggatatactattatagcatttcaaccggtgttggcggttgttaaatgccgattctataccgccaacggctacataaagatcagataataaaacatccaacatagtgataggtgtttaatctcacgtattccacaagtgtatttgtatgcaggtgataaaccccgaagttgggaggaaatctagactaaagtgaggagaattctgtatccatacaaggatacgttgtgaacttcatcgaggtatcagtaaatcagcccaaaataccaagaattggatagaggaggaccaggggaggacatgggccaaaggccaggccaggagggcccagcccaggttcgcccgaaccctggtaaacgcggttggatccaggttttggcgtggacggtcctgatcatctcctgatggcggttgcggggcatttccgacaattcgcagagtacaaccgtcatacctacctctatataaagacctcacttcactcacgtcaacacacacttccaagcttgagctaaattataagaggctctattgtactatattttatactagaataggaagagagtagagtagaaggagtcggaagaattccggagttgtcggtaatcttctcctatttcttttattttgtttattactctgaattcaatataacattcttcttgagtaatttagatttatcttgtgagaattatctcttggttagttcgtaattagcatacgagattattgttcactataatcaaccaaaatatagtgattgctttggtgagttataaacactaaagtagatattaattgcttagacgtggtgtttaggtaattattatccagtaattgctgcgtatcccacagtacgtttgaggtgggtgtagaggtggtgacagccctcgagatcacttaagtcctccctgtccgggtacataatagagagacatctgggaacagcgggttgccagtgcctgaagtattgcgttaggattaaaattaagctttccctagacactatttctcactagtgaatcctctctatcctagtctatcattagcttcgtgtccttggatgaaccagaagaagatctgaccacacacgttcccttggattcgatacccttagaatactccgtaggggaagtactacatcggtatatccgtgcgcttgcgaattttatctgtaaccgtatcaaataccaacacccgggagtattccaaggtatcgtatttattttatcccaagggaagatatgataagagagtactatgctaacaattcatatattacttatatacgtcaaagtctacgtatgggttagttcagttcaaagggtaggttgacacacaaaagaaagaactaagaactactctcactaaaatatagtctaagctaactggagaaagaataagaaaagtatcattcatgtacttctagtatacatacatctttagtctatacttgctattatactgtcatgtaaccaatactccgtacccagtgtcctcctggtgttttgagaagccaccccttactgccgagttccttacgacagcctgtcatgaccatacaaccggggctaaatacggaggagtaccctccccaggaaattaacttaggactatatacacacgcggaggaatacccgtactgagctgtcaccatcagcggcccacctctcatctgcagcatataaccccaattaatggtatataataatctaagcaccgcgcttacattactaaatactactctacatcctttcaaccgacgtacaacaaccgaataatcggacactaaacccacaccaatacacctatctggaaagctagttacatgactatattgattcaagtataaagtaaagtcggcactcaagtaatatgaatggaataaattaccgaacttgtataaagaagaatattctattaattcagtaagtcttacaaaagaagaaaggaaagctattaaagccataaccgaaatctcctgaagactcgaggacttatgaagactattctatttcctactccactagcactagaactactaaacagtacttgagagagctcttgatcttcttcttgaggtgtgtgagggaatgaatgagaagaggggtatttataggccatgaggtgccttgggagagtggaaatgctccaagcatcctatgagcatctttgctctcatcatgacaagtggcatggtcaagcatcctatgggcatctttgctctcctcatgacaagtggcatggtcaagcatccaaagagcatctttcacccttctcttaacaagtgtccactttcatgacggtttctaccggtagaattgctcccaactgtcataggatacgtgtagataactgccggtggaaaatgggctggattgggccagctaatggttcggccaaaccaccaggggttcgaccgaaccctggctggctcccctggcccatagccttctttaggatgctgacatgtgggccccactttattttacaccatgttttggctcagaatgattgctcatttctgagttcttggcccatccatccataagtctcattctcgacagtgtctatttgattgatcgattgttgtgctgtcgattctcctccgttttgttagcttctcctacatgattagtttccaagcacatagtggaatagaatgttttatttgtgaaataatgcattgcaagcatagctagtcttcatatattgggtagtattgacggtcgaaactggtagataacgaccgtcaacaagcctgtcgcgccacaccgccgcgactggccgagccgccgcgccacccgcaggccgccgcgtcctgccgagcccgccgcgccgcgctgcctgcaggccgcagtgccgcacgaaggccaccgcgtgccgcgagcccatcgccagcagccatacgccatcaacggaaaaaaaaggaaagagaagaaagatggaaagagattggcgattttgcaaaagggcccctggcttttctgaaaattatgcgcatatctctcagcatggagattccttgggcacagacccttgaatttcataaatttccattttcatccctccaccgcatggaaacttagtaaagggccccctgtatttgcacatttcgcatgcatttcttatttaagcattttgtttatgtcttataaattttgaaattgaatttcatgaaacattaattaatgttaattgatattttgaatttttgttttcagtatttatatgaatatatgcaacctttgcacctttttttatgaatatttgtatgcattttaatatgaaatctagtatttctttatgaaaattgcatttactatgaataacattcatttctttgaataattagcaattcctttgcataagaaatattggaaaatcatgaaaaaagttgcattcatatttgcaaccatgttactagtagtaacttatgaatattttgttacttttgcaacagaacgtcagggatcacgtaccaggagtttgccgaactggcccagcatggccagaaccatggccagaactacctgacctaggcatctgacgtccagatcgtccttggagccaagaaactccgccagacgatcgggatgggcaccccgcaggaccgtgcgcctacccctgatgagaacgatcaggcgctgcacttcctgcgacaccacctctacgccacgctcaagaatgagtacatgggattgcggagcccaatcactctctggaccgcactcaagaagcggttcgagaagttgaagtacaccatcctaccccaagcagagcaggactgggctcgcctgaggttcgccgacttcaagagcgtcgccgagtacaactccgcactgcatcagatctgtaccaacctctccctctgtggcaaggttgtcacggacgaggagatgattgagaagacgctctccaccttccaccctagcgccatgcaaagcgctcgtaactacaggcaggcgtcatacaaggagtatgacgagatgatcgatatcatgcaggtgtctgagtctcatgaagaggttctccgcaagaactttgtctcccagccacctggcaagagtgttggccttgaagtcaatgctagcagttacaaggtccgcaagcccgtccagaggaagaggggcaagtgtggtgagaagaaggcaaccgagaagtcagagggaaaagctcctcctacccagggagcacagggaggcaagggcaagaaggaagccaagccacctcgcaatgacaagccatatggccagcaggaccagacatgctacaagtgtggcatttggggccactggagttgtatttgcgaggagcccccgcacgtcgtcgacgcataccaggccagcaggaaggccaaggcatccacagaagcacacatggttgatgctcacactacggccactccccaaccactactccacttgacgcccctgcagctgcagtaggcacagcaaatgaaaaggacgtcacacaggagcagatctttgcagagctcgatactctagttgattccatttaagtatttgatgcccctactttatttcatgaactaagttgctttaggaacaatttgaataatggttttgtaagctctatgagagcataacatttatttcgtgattcgccatgcatggctagactttatttccaatattatgttgcattttgctatatgataaagttttacttcttgccttgaagtagtgatgttttactttattcacatagacaatatgcatagcctaaggtgaagaggaacattctggaacaaaggcaccacaaagtgtaatcttgagagacatgagacaagttcagtctatgcaaagacgtgaactaccttcacaaccgcacgcaatgattgtaaaggatattgtttttctcgtagaaaagcgattacacctcaaatctcttgagaattgcaaactctcgcacaaaagttcccttgtaggaactagaagatgagagaagcatactcatcacctaagcatgtgagatcaatgtcctcactaagaaatgtaggctaaagtagactacttcatagtcaatttttcttagaatttagtatcttgcaaatgaatattgcacaaatagtgtcacatcatctgttgtatcgcaacgatgagacatttgtcacgcgcactgcctgagcgcctcgcaccaaacttgcgccagacattggcgtccatcctacagcatcatgatgcgcactaaggccgctactagcgccgcgctctaaatgccgtactatgcaccaaatagcatcctcgctgtactgggggactggacaaatcatgccgcgctagcacgcgccatgcaactcctaccatgcgccacagttgcaccggctgcatacccagtggtcactctggccgcacataccatcgaacatcggatgcgtgcaaaacgtcgaccaccacatgaatttcgagataccttgaaaggtataccggaatgaattcgcacataccacatgaattcacatgcatatttagccctttaaatggatcatccgatacatactgcgcttatgaaaaagttgcaatttgtgtctaatcgacactacgctcttcccaaaccaaccctgcaagatcatgcatgttggcatcagcatattaagaaaaacactaagtactggacgtccacaagaataggactaaaaatgtccactgcatcattattgaaattcccgccactggaacagacttgtagatccaaaggcagcgaattatcaatatttggactattcgaaatgtgttgtccacttaaaagaatactagtgttgacttgacacacgtacatactccacgaccatcagggctcccttagaaaaaattggaaatttttaacagaggtacgaacgtagcctaaattccttgacgataagaagcattatttcaggggagaaataacccttaaaatgataaatgtcaggaaaaatggtcaaatgaaaggatggatgcacatttaatcaagcattaaccgcactaactacaacactgaatgggcaacggcttgatctgtagtgtagcatgtcccagcaagaggtgccatggtatgtagttgataggtggtaatgtcactaaatccataatggctatgtcaataagtccgtattgggagccaagggaacttggctagaggttcggccacatctactagggacttggcgggtgaccattctgttgagcgtgttatacaaaggggtcttgtcacaattccttttcgaggtactgtggtggtattgaggcacatagtgacatgttgtggggttgtgtcttgtggataatttgtacacctcgggctagagtaaaactattcgaataatcatgcccacggttatgaacgggcctacatattttttccgtgattagtcccacactattcattaatgataataattgatggtgataatttgttagctcttgttatgaagtttagatatgtgaaactgggattggttgttcagagatggttgggcctgtgcagcattgatatgttgttaagtgctgattaattactatactattttactactctcaaatatttgctaaatgttgcttttgcaaatgaaccatatattatgacatactttattatccctgtccacttgcatatttgttatgtggcttgctaagttttccatgtactcatcttgtaataatcatcaacttcatttggagaaaaaaaggatccagaagaagaagacctttggcctagatcctagttaagctgcaagtggaagtggagttgaagtttcgctagattttcttttctgctgcagttttcttcattgtgaggactaagtgcctcttcagtaagtatttatcatattagtttatttagtattttatattcaaattgtcgatttgtgtacctcggttgatttctgaacgaggatttaatgcacaaattagtttgaaaattacttgtgaattttcgggtgtgacattcacgaatccaaactcgatgtcacgatgagggacataaaatgaactttttccttccaaaaaataggaaaaagtacacagaaggtccctcatcttgtcaccaaattacaaaatcgcttctcaaacgaaaaaccagatatatagcatcctcaacttacaaaaccggatcactttaggtccttaggcggttttgttctcggtgttgtccaacgtggtagctgagctagcgtagaacccacgtaagcctcacatgtcagcaacaacttcccctcgctcacctcctctcttcaagtgcatggccggcgtcctccccttcgaggagcacaaccgatgggggaggagtgtgggctaaggttggtggcgtggatgagtgagaaggccccgtcgtcgcactgctgaggcaccgcctcgccaccaatgtgaaggcgagctggatattgtaacgccgcgctttttgcgagacgttaaaaactaattcggcaaaaccctatctgtgaaaatttctttctttgagtgggagtctaagtcgtgccatggatatcaattcaaattccattgttccctctccttgacataaaaaaacaacctcatcaaattccctttccaaatcaagcttccgaaatcaaactccgacgtccaatctatcccttcgaatcctcgctaaacaacttgtctcgattccacaaaaatatccaaatttcccccttttgatctcttccaaatgcccaattcaatttcaaattccaaattccaatccaaatcctctccaaaccaaaccccttcggcaaaagtctaaaaatcctccctcttccctgtgggccaaatctcccccggcccattcctccctctgcccgtctccttcccccacctcgcgtgcctcacacttgcgccgctctgagcaagagaatgagcgctcgctctctctctctctctatctcttcctcctctctactctctcgcttcccggggaaatttaactatttgccactcttatgagtgccaactctccatatgccactattagatttggtataacatatctgccactagagagagattacgccctaattttttgccacttttgttgagttggagcaccacatcagcatgccagcatggaccagcctagtgaaatgacaattttacccctccattcgcaagtggttaatagccaacataatacaattaaattaactacacacatgaataaatgataaaacataataacttgagaacaactttgttctcaacacataacatactgcatcattaacacacatgcacaacaaaaatcaatttttatcctagaataacttcttcatcgttagaaatagtactaccaagttcataaccactatcaagttcagagttactgtgaaggccatacataacaagtttcatgccattacgcaaggccatacatcattacaaaagcacaataatagaaatagcaacatcaggccatacacttaagttcgttaggccatacacttaagatattcacaccacatagcaaaatatgccataccaaagtgcacatatcatcgcacatgacttgcaattagtttttccaaaatatcatgccatagtagaccacaaataaccaatttcactagcaggttgacaaatttcaatccaaaagtctaggtggtgttgcacttttcttcttgcttgcgagcttctttctgggtgtaagcttcttgggtggctccactatagctggagctacttgagagctttggtcaagctccaatgcgaacctcctggtgtttgtgatggtgtaaataataaaagaagtttagttcagtgcataataagtaatgaaagctagagaacaatgaaaagagcataatggtgcttacctccttgtgactggtccagggctgctgcttgtttgtgatggctgcacttgagagctttggtcaagctccaatgccaacctcctggtgtttgtgatggtgtaaataataaaagaagtttagttcagtgcataataagtaatgataagtaatgaaagccggagaaaaatgaaaagagcataatggtgcttacctcctagtgactggtccagggctgcttgtttgtgatggctgcacttgtgtttctgcagctccttctctagctgcaactgctcttgttcttggtgtagttacttgttcatcactaacaccctttgatttcttccttcccacctttgttgttgttttcttgttcctcttcctgccaaaagaaaaacagttagcatataacagcaagaaaatgaataataattgagatgaaaatgcagcacacctctttttgtgccagttagttcacatctagcacttcccttccagtgtccaaagacaccacattctgggcacttaatttgccttgtagccttccccttgcccttctcaagagcagatggcatcctattctttctttgcctacccacttttcttttcttggatgtcacacccggaaattcactagtaatttccgaacttatttgtgcataaaaccctcgtccaggaattagccgaggtacacaaactgataatttaatatacaaatccatcataataacatcattacatacttacaaaagaaaagaaaacagcagcggaattaacggtctagcgatggcttcagctccactcccacaggcagctaaactggagtataagccaaacgtcttatccttctggatcctttttcttcaactgaggttgattgattattgcaaggtgagcatatgacatactcaacaagccacacatcaaatatgcaagtgtacaaggataccaaaggatggcataatataggctcatttgcaaaagcagcatttagcaaatatttaagaatagtaaaacagtatagtaattaatcatcaattttaatcaacactgaacagcccacccatgctgctcaggcccaaccattctgaacaaccatacccggctgtacagatctaactccaaaccaggagctaagcaaattattaccagttatagcatcaataattattgtgagaggtgtgagactaatcacgaaaaacattgctcaacccgcctatgaccgcgggcacggctattcgaatagttttactctggccagagatgtaccactgtacccacaagacacagcctcaacatcatgtctaccatgcgtcgcgatactggaaagtacccgaatagaggctgtgacaataccctctgcacaacacaactcaccacagtgcaccatttctggatcataatcaccccctctaaaaatataactagaggcatggactccccagcgacccccacgaacttctcgccgcttctcagtctggtgccccgcaatgaatcatgctatacaaaaggtaaagccgttgcccacgctggcttgtggttggtacggttaatgtctcacaacagtggctcgcgaactggtccttaattgtcatgagcacgaccttcaaaaccatgtgctcacaacccaccattgtcaaattttaattatcaattaattatcataacacgattaaccatcgtgagctaccattaaacataaccataaataacaatgtagtataattcatcccattaatgagctcatgtttctaagcatggctaagcaattatatatatatagcttttagctaaaccaaaccaatatataaggttcaagctaatcaatttattacctaaggtatcaaggaatagggtattcaatgcaaattggccataacaaaggaataagttcacaccacccggtgacattcgaaaataaatgcacagttgaaataaatagagaatttaaataaaggataacatgctcaaaggattgtgtttgggatctgcgtgacttgccttacaataatcggtctttaattattcttcttgaacacttccgacgcactcacgaacctttgcaatgacgaaaacgacaagctaacacgcaaaacgatgaaaaaaactaataaaaaccaaataaacagtacataaaagtaaacgaacatgtagatcatgattttagatgaatttagagacttgaacggcttcattccgagttcatatcaattagttatgaattttacaagattaaattgattttagccttatacagaaaaggattaacgatgtcacgacgacatcactgccggcgatggagagagatggctagcgcggggagaggcggctagggcacgggaactcgagctaggggatggaaacgaaagaggagggcttggggttctatttatagggaaagctggaggagatcggctcggacccgagaggatttggcggcggattggttaaggttcgccggtttgggataaagtttatccggccgatttgaactcgaatcaaaggataaaatccaattccttaggagaaaaggaagaggaagataggaggaatatttcccctcaactaattggacatggggtcgctcaggtgcgacggatttggcggaaaatggcaccggatcgggaagaacaggggctctggacggctggctcgaggttgaagatgccactgtagcgatagggagatcaaacagacttccggctgggcttcttgatggccggattgaaggaaggatagaaactggacttcgggaaagagagggagatgggctgaggatgacagatagacttttctagtttcagcccgaaaaggaaaaggggaatttcaattacttttccaattaaattaatcactgaaatgatctttgaattggtaaaaatacttccaatgctcaaataatttcacgaaaaatcctgaaaatacttggacactcaaagtacttaacaatattataatcagaccatttaatgattaatttaatatgtggataattactaaaaggttgtttgtattattaaaattaagaattgagctccgaaaaatcaaagaaaattccagagagtataattaactatggcgaatgtcatgcccagaaattcacgaactagaatttctacgataaatgtgcattaaatccctgtccaggaccagccaaggtacacaaacgacaattattaacatacagatctacatcttacaaaaatataaaagattacaaatgcagcggaaagatcgaacgagctagacttggacgcttgacttttacagcggggcgactccacaccacaggcaatccttgacggcagcgacgaaaccaacttcgacaagacacctcccactaggaagatcttcagctctggtgtggggggaaagagagtaagactgagtactacccactgtactcagcaagtcataccggaagaggaggtatgatgcaggatataactaaaggaggctaagggttcatttgcataaagcaggcatttaaaagcagaagtggaaagcagtaaaacagttgtagtaattaatcaatattaaccaatcactgtccaacgctacaccacgttgcaacaggcccaaccaaccacctgaactacaccagttcattaagctaaactaggggtgagactaatcacggtgaatctggttgatcgcccataaccgcgggcacggctattcgaatagttttactctggccagaggtgtacaactgtacccacaagacacgattccacacatgtcgccatgccccgaagtatcaccatgatactgcaaagggggaaatcgtgacaagaccctccgcataaccctcccctaaccatccacaccatgctaaggtttcacccccacccccaacgggcagtgggcggtcccttcttgcaccgcggtgaatccggcagctggacaatcggacaccctggccgacccaactccatcacgcccaccctccccaccggtgcctaggaaagggtcgagctatacttcagatcaagcagttacccactcccgcttgtggtaagcacgataagtctcccagggttttccgtgaaccggtccttaactgccatgggtgtttcagtgtattttaattaactaacaccattgcggtggtacaaatccaaagctatgctaatagtcaaaatctatgtaataatgtgatccccatttgtgtactagttaaactaagtatggctaagcatttcctaaaccaacatctaatcattttgatacccaagttatcaatggcatacggtaaacaatatatggctgagtaaggggacccctcccacatgacattgtaaaagaatgcaacatttaatagaaatacgggatatttgtaaattgggtacaatatgatcaattgtaatgcatgacttgccttgctctcgcactgatgagacctcagcaaacgtcttcgagaaaccgtggatcgacgaaaccgccgaaatctacgcgacaaacaaagcacacaagcaaaacatgctataagactactgaaacaggaaacaaaaccatttttaatggattctagggatttttatgaatttactgacacttgaatggacttaaacggagctcggatgaattagttatgaattttagaagataaactgtgtttttcctaataaagaaacagtccttaattaatttattgcgcaatattgcccagggctgacatcagcgaaagggggaggaggtggcaccggctagtggtggccccactgggcagtggctcaaggggaggggcagacgcccggtcggcttggctcggcttcaaaccggtcggccggtgaggcgatgcggcggcggcaatcggccaccgacggcggcgaccggcgagaagacgacggcggccggtgacgcggcggtgcgacggcgaagcgccgaacggcgacggcggcgcggctcggcgctaggagggagaggaaggggaaaaacagggaagggggtgcctcaccggggttcggccggcgcgggaggaagtgacgacgaacggcgacggcgagcgaccggagagcgacggcgaatggcgaccgagctccgggacaccctaagagaggaaaagagagaggttagagtgagagagggagtccacggcgagcgaaagcatagccgaaggcggcggtaatggtggaacctcacaagagcgcggggagaagtgggctccggtggcggaactcgacggaggggaggtggacgaggtggacctcggccgcgcgaacccgacggcggcggcactagcggctgctagaggcggccggagtagtggaagaggcggcggcggcgggtgggtgtacggtgcgggagcggtggagagctctggagaggccggcgagtgagggaaacgagagaggggttgtggcgaagctttatactggctcgggaggggcggacacgaccgggaaacccccccgatttggccagtgacatggtggagtggggagagagagttggggacgggattcaaatcgaatcccgcccatttttgggcgcgcgcgagagcgggaagtggtgggggaggggcggcgacatgggcgcaggtcgcggagtggggcggagtgggcgcgggagacacggacggcgacgtgggagcggcggttgccggccaggcgcagtcggctggaggaaggggatgaccccgataggtgggccccacctgtcggcgtccccgagaggaggaagggcggcgcggtttgggccacggcctcgggccggcccagcaaggagggcgcgcgggagggaggttgggccgacggcccaacaaagaaaaagaagggaatgaaatggagaaaaaggaaaaagattttcctgggattaaatattgtggttaatgaattttaattggttaaaattacttatagggctctgaaaattccactaaaaatcctattaatcaattgtgacatgtggaacccaagaaaaatcccacaatgccattttcaattattgaatgcatttattaattagggaattagctctaggttaattaaacaatttcttcgggcaatttgtttaaccattttttcaaaagcaagaaaaagagggaaacttcagggcatggcaaacctaccccccttaaacggaatctcgaccccgagattcggaagagctggcgaagaggtgcggatgggcggccttcaattcatcttctctttcccaagtggcctcttcctctgagtggtggctccactgaactttgcagaatctgattaccttgtttctggtccttatctcgttggtttcaaggatacggtcggcttctccacatacgtcagatcttcctgaatttcgatgtgatccggacttgcctgttcctcaggaactctcaaacatttcttcaactgagagacgtggaacacattatgaatgccaagcatgttggaggggagctcaagctggtaagcaacttcacccctgcgttccgaaatccgatatggtcccacaaagcgtggtgccaactttcctttggtttggaagcgatgtactcccttgagcggagtgacacggagatacacataatcccctgcttcgaaaacgagctcccttcggcggttgtctgcatagcttttctgtcgagattgcgcgattctcaatctttccctgacagctctgactttctcttctacctcatttaaaacttaaataccaaacaactagcgttcccctgtctaatcctagaagagcggagtacgacacctccgtccatacagtgcttcaaacggtgccatttgcagactagcctggtatctgttgttgtaagagaactcggcatatggcaagcttttgtcccatgctccaccaaagtcaagcacataggctctcaacatatcctccaatatttgattaacttgctcagtctggccatcagtttgcggatggaaggctatgctgaagttcagacgggttcccaattcttcttgcaatttctgccagaactttgaagtgaattggctccctcattcagacacgatcttcttaggtaccccatgtagacacataattcttgccaaataaagctccactaacttcttccctgagtaggtagtatgcaccggaatgaagtgagccactttggtgagccgatcaacgactacccaaatagaatcgtgccccgatgacgtcctgggcaaacccgtaatgaaatccattccgatttcttcccatttccattctggaatctgaaggggttgtagcaaacctgctggcctttggtgctctgcctttactcgctgacagacatcacagagtgcgacaaattcagctatttcccttctcatactgacccaccagaatttttctttaaggtcttggtacattttagtactgccgggatgaattgaatattgagtttgatgagcctctgtgagtatcaggtcttttaattccttgttttcaggtacacacaatctttctcccatccagattgttccttgttcgtcctcaacaaaacctcaggcttttccaactctcatgttcttttcgagctctgctatttcaggatcacttgtttgagctatgcgaacctgctccaccagtgtgggttgtgcctctagggcagccacgaatccgtgctcaactataccaaggtttagatgttccaaatcacgttgaacctcacagcatagttcctctacccatgcgacgttgcagtaactcttcctgctcaaggcatttacaaccacattagccttgccgggatggtagtgtattcctatatcataatctttgattagctccaaccatcttcgctgtcggagattcagatcaggttgagtgaatatgtactttagacttttgtggtccgtatatacctcacaatgattaccaatgagatagtgccgccagatctttaaagcatgaacaactgcggccaattccagatcatgggtcgggtagttgccttcatgaggatgcaactaacgtgaagcataagcaaccactttgccatcttgcatcaacacacaccccatcccttggcagaatgcatcccaatatacctggaaatctttcgcctgatctggcaaaattaaaactggtgtagataccaaccgtcgcttgagttcttcaaaacttctattgcattcagcagactagacaaacttttcttccttcttcaatagctgtgtcattggcttcgcaattttagagaagttctcaatgaaccggcggtaatagcccgctagccttagaaaactccgaatctgagtgactgtctttggtggggtccacttggtgactgactccacatttgctggatccacagctaccccttgagcattcacgatgtgaccgagaaactgaacttccttaagccagaagtcacacttgctgaacttggcatatagctggtgctcttttaacttttcaagtaccaaccgaagatgctactcatgttcttcctcggacttggagtaaatcagtatatcgtcgatgaaaaccacgacaaacttgtccagaaatttcataaacaccttgttcatcaaattcatgaagaaggcaggtgcactagtgggtccgaaagacataactgtgcattcgaacaacccataacgagtgatgaatgctatctttggaatatcctcttcacggatcctcaactggtgatagcctgatcgcaggtctatcttatagaacacagtagctcctttcaactgatcaaacagatcatcgatccttggcaaagggtacttgttcttaatagtaacctcattgagtgcgcggtagtcgacacacatcctcttggttttgtctttcttttccacaaaaattaccggagcaccccaaggcgacgtgctcgggcgaatgtatcccttcggtagctgttcatcaacttgcttcttgacttctgccaactcgttggctcccattctgtacggcctcttatggatcggtgcagttcccggtgccaagtcaattcggaactcgatatccctttttggtggcattgtggtcagatcctccggaaaaacctctggatactctctgactatgggaatatcctccaacttcttagtggttttctccactgctacctcttgttcttcacctgtggcctggttcagactgatccctggcttctacggtactggagactagaaggttaccacttctcccttcgcactggtcaacttaatggtgcggctagcgcaatcaatcactcctctgtgccttgtcagccaatccattccaagtatgacatctaggtccttggattcgagaagaatgaggttggctggaaaaatcaccacttgaatttcaactgtcgctgatgggcagtagtgagttgtggtcatgccacctccaggagtatgaactcgcattggtatcttaagcttcactaaagataacccatgtgcaccagcaaaacgcttggaaatgaaggaatgagttacaccagaatcaaacaatattactgccggtgtcgagttgacgggaaatgtgcccaatataacctctggtgctcactgcgcctcctctacagatgcatgattgacacgggcctgaatgaacttgagtccggcatgtcttggcttcgggcacgtaccaaccatgtgtccgggctcgttacaattgaagcagagttcgggcctttctccaaactccttgggctgttctggctgggctggcagagctggctgaactgattgagctggaatcattagtggacttggagtcggattgaggctgtgctgctcactgttgctgtgactgccactgttgttgataccgttgaaatttcccaggtggtaaggacgatgctgccggataatcatggtggaaggtccaccctaatgtcccatcatgaagcgaggcttctgactgatcccctgggaagtactgagctgagctgccttcctcttacggttcattttgttgcactgctcctcttgacggatagccttgtccaccagcttctcaaagtcctcataatccttggagatcagctggttggtcaattcatcatcaagaccaaacaaaaacttctcctgcctctcggcatcagtgcgcacgtcctcaggagcgtagcgcgcgaggcggttgaactcatgcagatactctataactgttctggttccttgttgcagagaacggaactctctcttcttttgtgctatgattccctcgggaacctgtgccttattaaaactctgacaaaactctgaccaagtaacttccgtcctagctggacgggtcaccatgtagttgtcccaccaaacagaagcgggaccttgcagctggtgtgtagcaaaagcaaccttctcctgatcgttgcattgcaaaagattcaacttcttctcaatcgcatggagccaatcgttggcctcgattgggttggtggtgcttgagaaagtgggtggcttgatacggagaaactctagcagtttggactgggatggtggaagaccaaaccgcaggttctgctgctgctgctgctgtgcttgttgctgcacctgttgcaacacctgatggtaccgttgctacatctgttgcatcatcattgtcatcatctgagtctgattgtccaacacctgagtgatcgttgggttctcatgcggtggagatgaattgtcgttagatgtatcgctggcacgtgctaaactgatatgctcttcactgccactgacgttggtgaagtcacgagaaccattccttgtcttcaccatctaaagggggataggtagaaatatgagaaatggaggaaaaacagggggcttagaaactaatctttcttataaattaaagtgcaattatctttatcttcattaaaacactgaaaaggaagcaaacaacttctaattgaggcagccataccactgacatatgatatcgaccgccgactaacccataagcaacaaacctaagcacggaaactagcaagcaaacaaaactaagaagacgataaagctaagggcggcgactctgaagctcggagcagtgcttgcgatcgagggataggactgatatctaaagtaggcaagggataggaatcaatgcatgctcaaatccaaattaaacaaagcaacaaaagactcaaaagaataaccaagcatgatgatttttatgcatagaacatttttcatgaacccagatatagacactaatgcaactgactaaacaataaattaatgcataaaatagatgcatagttaaaatgatgcgcataaaattgccccatcaaacatagacacgacttagtgcatatcacccaatagattcccgactgactatcgaataaactccaaataaaatttcactaaaaccctagactgtccctagtcgagaaatccaattaaagtagcgattaaaatatctcccaaaaatcacagaactaacaccaaaggaataagttcacaccacacggtgacattggaaaataaatgcacagttgaaataaatagagaatttaaatatatgatcaatatgctcaaaggattgtgtttgggatctgcgtgacttggcttgcaataatcggtcttcaattaatcttcttgaacacttccgacgcactcacgaaccttcgcaacgacagaaacgacaagctaacacgcaaaatgatgaaaaaaactaataaaaaccaaataaacagtacataaaagtaaacaaacatgtagatcatgattttagatgaatttagagatttaaacggcctcattccgagttcatatgaattagttatgaattttacaagattaaactgattttagccttatacagaaaaggattatcgatgtcatgacgacatcactgccggcgatggagagagatggctagcgcggggagaggcggctagggcacgggaactcgagctaggggatggaaacgaaagaggagggcttggaggttctatttataggcaaagctggaggaagatcggctcggacccgagaggatttggcggcggattagttaaggttcgccggtttgggataaagtttatccggccgatttgaactcgaatcaaagggataaaatccaattccttaggagaaaagcaagaggaagataggtggaatatttcccctcaactaattggacatggggtcgctcaggtgcgatggacatgcggaaaatggcgccggatcgggaagaacaggggctctggatggctggctggaggttgaagatgccactgtagcgacagggaggacaaacagacttccggctgggcttcttcttgatggccggattgaaggaaggatagaaactggacttcgggaaagagagggagatgggctgaggatgacagatagacttttccagtttcagcccgaaaaggaaaaggggaattttaattaattttccaattaaattaatcactaaaatgatctttgaattgttaaaaatacttccaatgctcaaataatttcaagaaaaatcctgaaaatacttggacactcaaagtacttaacaatattataatcagaccatttaatgattaatttaatatgtggataattactaaaaggttctttgtattattaaaattaagaattgagctccgaaaaatcaaaaaaaaaaatccagagagtataattaactatggcgaatttaataaaaattaaatccagccatactttatatttaggaaattttatttcccacatttaactttacttgtaaattaatgaacatttaatataaattctaataataatttattaaataatttataaatcctaaaacgaaaatcaagatatgacattggacacaggagcaagaagcttgaattctttctcaacttgaggccattgcttcttgtctgtaatgttagggatggttgatgcatatgctgcttgaaatctgagcacagagaaagccttatcaacatatttctccatatttggttgcctcacggttgtgattactgccaatgcatgttggcaaggtttctcagtaacttgccattccctgcaggtgcaagtgcacttgtcaaggtgcaccacatgccttgttagctcctcatcattatgtatctctgtaacctcagcttggtaaggatcacccttagtgacctttagatggcctaacccctttgaggctgcattcaactggtgaatcaccacaggaagaatcactccattgagggctgtagagatcctactcttctaaaaaagaatcaaggttttctccctaattgcatcagcaagagcatcgattggcaagtccttcaaacctttgatccaagcattccatgactctgccatgttattgttgatatattcacacttgctctgacatgaaaacttgtttctagcccacagtaggttgtgatgttcgtcaagccatggcttgacatctgagctatattcaaacacttcatccatccacatttgatgcttctgaagcatgtatgtcctagctgcaggccacatctttttcccatactagtagcatgtccgtggtaacgctacggtaatatttatattaagcaaccaaaagacaatatataaaatgagattaattttaagaaataaaaaaatgccagatcaagagaagtataacaccagcgttcaaatccaagttctctttgctactcttatatacataatgaaaattttcatctcgcagcagtcatggttccttggcgacgcggattgactaaataataagaaaatggatgcacaaagactaaatgaatcctttccaagatcaggtgttggcttatctgaaactgaaatcatgtaaccaagagatgtgaactggaattgtcttctgtatgccattattaaaaaaagaaaagaaaattgttgatgtccagctaaacacatatattgccaacagctgctgaacatccatgaaagctttttcctcagactttgtgtaatatcagtatcacaaagaaaaagatgcatggggttgtagtgttatatggaaaaatacagcatcaaatctattgtagctagatcagccaccctcctacatgaaaatacacttttatattcgcatggatgacttgtacatatttgaaaggttatctaacctgcggagatatttcaggacagtaaagtatagcatttgtagataaacattccatgtattgtgagattagtgtttcagttatctaatgaaatcagagagattcaaacaaaagacctgccaccggtagttgcaaacagatgtaaaaggattatccgtaaaagaaaaggtaggcaagtagtaattacagtcactttatgatattcaaatctacccagaaatctgtaatgacagaactatttcctaaaaatgatcagtaggctgcatctgtacactttgtaagtcaatctcaaattgtcctgagcaatttatacttgttagacaaatggttcatgaggaattgaggcaccaacagcagatgaatcgcaaactcagcatagcaacagcagcagaggaagccaaacagttgtccatcccatgcagtggaatgaaatgcccacatgaacaacgtttccatgttaatctatttttgtatgtcctagtatgatcgatcactgttgtcattctttcaactcctaaccaacaaaaaaaaaatatagaactgtagctaacataaaagatcaggtgatagagaaaataaaagacttccgctctctgcatatatgttacattgtagcatacaccaaaacacaaatcagaaaattcttactaaacagtaagattttcttgtatgcttcacttttctagagtaaaatattagaagtacatcaacaaacatcactaatcccatgcagatttctgtttcaagtaacatggatattt

SEQ ID NO: 23437 - DNA, 1114 bp, Oryza sativa
gcagatccatattcaaggtgtgaagtcatccgtacacggtggccggacgtggtcgtcagtaattctaggtgtgaagtcattcgtacaagcgtgcaggatcaccgccgccaatgtcccctcagaggatatcctctccctacaacgccggacgcgcggaccgcagagtatcagccgccggggcgcgaggagccgaggaggatctccgttgcctagatcataggcggtcacgcagagtcgcggatgattgatggcgtggctcgaggtggcggcggcgtggatcgaggaggcggctgcggttgaggggagcgaccgagaggagggtgagagagagagagagagagagagagagagaggggagaggggtgcgtacggaggggagacgtgggacgatctcgagccattggattcgatgattctggatcgtcggatttgatgaatgaggagtgtaggagtgtagttggtgaattatagggtagatatgttcccatgaaacaatttattcatattctccatcaagtgcctaaagcactctctttgttcagcccatgggaaaactttttttacagcagtttctaggcctttgcaagcatcagtatgcacaactaaattctctactggccctattgcattacctaattgctccatgaaccaaacccaattatctttggtctctgaatcaaaaagaccaaaagccaatggaaacatccaattatgcccatctattgcattggctgcaggcatgtgtccattccacattccattgagagcagtagaatctatactaatgtatggcctacagccctctaagaatccatctatgcaagctttgaaagcacaaaagaatctgttaaagtgaaccttatctccaactctaactatgtcaatctcaactacactaccaggggatctcatttctatctcagccttgaacctatacaaccaatcaaatgaatcatcaaactttccaaataacttatctttagccctctgcaaaccataccacgttgtctgatagcctatggtggtcttgtatgtctcctgtagcttaccttgaagttcctttgcacccatgtctttcttcttcttcaaaaatggaatagccctttcagccacc

SEQ ID NO: 23438 - DNA, 1477 bp, Oryza sativa
aaatagcagaagtagtatcacccggaactaggaaagctaatatgaggcagttggtggcaggttagaagtaaatgacaagcatgatatgctcatgatgacaagcatggtatcctagtaatgacgagctgatctcgacgcataacgtgaaatgggtaacttctatgaggttgacgccaaaaatatgaactatgcgaagttctggaactgaagcaccatcctcaagtgccgcaacccagtcgaagtcagctaaaggttcaaccagggacaagtcaggtgaagagaagattccatctgcaacaggagattgagccaagcagtccagagtagagaagttttgctaggcaagttgttataaaagacgcgacggaagaagtcagacaagaagagaagaccgcccaacctatcttcttgctagcctcctcgaatctcggggacgagattcttgtaaggggggtggatttgtcacgtcctgataaattcatcccgaaataaaaatcattctctaaaaggaataatagaattaattaaaattcggaaagaaattggcaaacattaaaatacgtacaagaaaaattcaaatgtgacccggagaatttttgttaaattctccttggtctaaaaggagccctcaaattttagtggaattctcagagcacaaataataattattaagaaataaacaaagttaaaatgattttataaaaagaaaaaccctaaaaagtctttcccccccttttcccctcttgggccggctcggcccatccctttatctctctctcctcttccccgcggcccatccggcctcctccccgcgcgcgcgccgctgacgggtgggcccgcccgccaccctcgctgacgggtggggcccacctgtcatccctgtcctcccgccgctcccgccgcctcgcccgtgccctagcgccgccgccgccgcgaatcccgccgcctcccgccgtccacgcgcacaataaagtggggggaaatattccccgtgattccctctctctttccccccatttctccctctctctcccgcgttcaaacgggcggatttgcccccgcaaatctcgccggcgccattgatggcggccgacctcccgcgccggtttcctcccttccccggccaccctctctcgcccccggctctatataaacactccccgtgcctctctccaccgtttccgccactcgccgctctctttccccgtcggaatcgagctcgcgccgtcgtactctctctccgccgtcaccgccgagctccggttcgccgccgtcgttgccccggaccatctcccgcttcggcaccgcctccttccgcttcgccgcatcctcgccgacctcgtccacctctccgtttcggtcgccgagccgccggaacgccgccgtccccgtcgacccgagccgcgccgccgcctctctccgctccggtcgccgttcccagtcgtcgccatcgatcaggggtgagccatggaccgcc

SEQ ID NO: 23439 - DNA, 2339 bp, Oryza sativa
ccggcgagcatacgcgcccgagccgcccgagtcgccgccggtgctgacgtcatcgctgacgttgtcgctgacgtcatcgggaccgtccgccgtgagccggtcgtggaccgatcgatctcgaccgtccgttttgcacagggttgatctcgaccgttcgttcccatgaacagataccgtgcacccggtccaccgcgaaaccctagctgctgacgcaataatcctccttttccttttcaagaataattcattattgcgtcatattcaattaaaatccatatagtgttttaatccgatttaatctttaaaaattcataactaattcatttgaactcagtttaatgtggttcaagttgcaaaaattatataaaataaagatctacatattaaaattgtccataaatagaattaaatttatttaattctttttaaatgggctttaattagatttaatcttgtaaaattcataataaattcttatgaagtcagaatgaggccgttcaagtctcataattcatctaaaattatgatctacatgtttgtttactttatatgtactgtttatttggtttttattagtctttttcttcgttttgcgtgttagcttgtcgtttccgtcgttgcgaaggttcgtgagtgcgccggaagtgttcaagaagattaattgaagaccgattattgcaaggcaagtcacacagatcctaaacacaatcctttgagcatgttgatcctatatttaaattctctatttatttcaactgtgcatttattttcgaatgtcactgggtggtgtgaacctattcctttgttatggcctgtttgcattgattactttattccttgataccttggattattataacttgacaagttgagctttatatattggttcagctagatattagatatgattgcttagccatgcttagaaacattagcacactattgggataacttatgactcattatttaatgatggcttaatgatagttcacgatggtcaatcgtgattggttaatttatcacttgccaactaagtcttgataatggtgggttgtgagcacatggttttgagagtcgtgctcatgacaattaaggaccggttcgcgaggctactattgtgaagcattaatcgtgccaaccacaagccagcgtgggcaacggcttgacctttcgtatagcatggttcattgcggggcaccagactgagaagtgacggagataagcccacgggggtcgctggggagtccatgccttatttataagggggtgattatgatccaggaatggtgcactgcggtggattgtgttatgcaaggggtaatgtcacagcccctttccgaggtaccgtggtggtactgaggcacatggtgacatgatgtggggctgtgtcttgtgggtacagtggtacacctctggccagagtaaactattcgaatagccgtgcccacggttatgggcgggttgagcaatgtttttcgtgattagtcccacacttctcacaataattatggatgttatatctggtaataatttgcttagctcctggattggagattagatctgtacagccgggtatggttgtttcagaatggttaggcctgagcagcatgggcgtgttgttcagtgttgattaaaatttctgattaattactccactgttttacttctcttaaatgttttgctaaatgctgcttttgcaaatgagcctatattatgccaacctttggtatctttgcgcacttgcatatttgctgtgtggcttgctgagtatgtcatatgctcaccttgcaataatcaatcaacctcagttgaagaaaaaggatccagaaggagaagacgtttggcttataccccagttgagctgcctgtgggagtggagccggagcttcgctagatttttttttttccgctgcagttttcttcatggtgaggactaagtgcctctttagtaagtatttatcgttttagatattttgatgaatctgtatattaaattgttagtttgtgtacctcggctgattcctggacgaggattttatgcacaaataagttcggaaattactagtgaattttcgggcgtgacaacttacgccatggagtaatcttaacaaaagataatctgattaaaaggaattggagaggaaacaagtctagttctttctgccacaaagatgaaactattaatcatttgttctttgattgttattttgcccgcgcggtttggtctttaattcagtttgcttcgaatattagttttatctaatagtacaactcatatgtattgggcattggataagaagacaatcacgcaatttgagatctttggtcttattaggtgc

SEQ ID NO: 23440 - DNA, 1064 bp, Oryza sativa
cacataaccctccccaaaccatccacaccacgataaggtttcacccccacccctaaacgggcagtggagcagtcccctcgtgcgccgcggtgaatccggcagctggacaaccggacaccccggccgacccaactccatcacgcccacccacgccaccggtgcctaggaaagggtcgagctatacttcagatcaagcagttacccactcccgcttgtggtaagcacggtaagtctcccagggtttcccgtgaaccggtccttaattgccatgggtgcgaccagcaaaaccatgcactcgcagcccgccattcagtgtattttaattaactaacaccattgcggtggcaccaatccaaagctatgctaatagacaaagtctatgtaataatgtgatacccatttgtgtactagttgaactaagcatggctaagcattttcctaaaccaacatctagtcattttgatacccaagttatcaatggcataaggtaaacaataaatggctgagtaataggacccatcccacatgacattgtaaaaggatgcaacatttaatagaaatgcgggatatttgtaaattgggtacaatatgatcaattgtaatgcatgacttgccttgctctcgcactgatgagacctcagcaacgtcttcgagaaaccgcggatcgacgaaacggccagtctacgcgacaaacaaagcacacaagcaaaacatgctataagactactgaaacaggaaacaaaaccatttttaatggattctagggatttttataaatttactgagacttgaatggatttaaacagagctcggatgaattagttatgattttcagaagataaactgtgtttttactataaaaagaaaagccttattggtttattgcgcaatatatattcccagatgatgtcagcaggggggcgccgacatgcgggcctcactggcagcggctcaaagggggtggtccaccgtggaccaggtccacggggccggggtggtggtgtatcacgtggcgtcgacgtggcaccacgtggctggccacgctggccatgggatggacggcc

SEQ ID NO: 23441 - DNA, 1553 bp, Oryza sativa
cagagggggaggaggtggcggagtgcggcagcgcgagcgtcaggttaggggcggcaccgatctgggcgacggacggggacgggggcgcgggcgcgctccatggcaatgtgcagagggaaggtgtggaaagaggcagcgattgatttgctcgcatgcgtgattttcggccggtcaccccgcgtgcgcgcaatctctctcccacagtgtgaccccgcgtgcgccggtaccgttggatgcgagaagcgttggatgatttggttccgttagatataaaacccccacgtaatgtaggtgtaagagtgagttggtgaattatagggtagatagactatagttcgatttttatattttcctcaattttctactattaatgtaggattttctagacaatgagagtactaaacgtggaggcttctttttctattaatttattaagttaatagatttctagtatttattaaagtaccatgtggtaagttaggagcgtttgtaggagtgtcatatggcggtttaggattatttgtaggaagtttaatggatttctagtatataatagatagatagactagttttcacgagccgagctaagccgaatcggctcgttagccccccttacatgcgcgaggttgatccgacagctaatggcagtggactgagatctattatattattaaaacagccttgaaaggaggcaccacgttcgctgtggaggctaaaaattcccacattaatcatagaaaaagaaaagaagaatccaaatagaaatacaaatataaaaatagctaacattcggaattaaaaatatgcattattgaaagaggagtccatatagcaacccaatacatgattaattaaaactcggaataaaaataaaataaattttgaaattagaaaaagaaaaaaaaacaagagttcgagaaggaatacaatttaaaaatatcttaaattcagaattaaaaaagtccatacaggaatccaatacaagattaattaaatttccgaataaaaaaataaaaaacaccgaaattagaagaaagaaaagaaaagaagagttcaagtaggaatactgtcagggttattgataccacatacctaatagtagttgactaaatctcggcaggacccaccacataccatgtcttatacggaaaaaaccttcggatataggaggagttccgtataaggaaggatgaatagagttctacatgaaaacgacaaggactactcggattgtatctatattggtttccctagttctacttagacaaagggacacctatgggtataaatacaaggtcccctaggaggagaggggacacagaacaatagatcaagaccaagatcaacatacaagccaacatgcgccaagacaagacgccggatatcgacttcagagataagcatagctagtcccctacggtgtctacggatactatcaggagagacataacgatgtctttgatctcgccggatgcagattcgaggaggaaggctactctgttgtcgactacgagtcagcacttcagaccgccagtcgacaacagttatatagg

SEQ ID NO: 23442 - DNA, 737 bp, Oryza sativa
cggtgtgttcgccgtgttgtcctctacgtgctggtgccctctgttggtgccgtggtgccgccgttcgccggtgagcgtgcgccgcccgagccgtctgcctcgccgagccgccgccgccgtcggtgacgtcattgctggcgtcatcaaggccgtccgccgtgaaccgccgtggacccgatcgatctcggccgtccgatttggatcggatcaatctcggccgtccgttcgtgtgaaccgccgcccgtgcgcccggtccaccaaaccctagcccgctgacgcaataatccctttttccttttcaaaaataattcattattgcgtcataattcaattttaatcgatttaagtgttttaatccgatttaatctttaaaaattcataactaattcatcttagctccgatttagttggttcaagtctctaaatttttctaaaattaagatctacacattaaaaatatccacatgtactgttcatgcttgtttatgtgctgttttggtgattttgcttctttttgcttagattccgtcgtttccggagagtccgttttcgcgaaagaagagtttgaagagttccaaggccagcaaggcaagtcacacagatcccaaacaaccctttgagcatgttgatcctatttaaagctattgtttctattcaactattgcatctattttcgaatgtcattgggtggaattgacctattctttgttatggcccttttgtacattgattacctt

SEQ ID NO: 23443 - DNA, 1223 bp, Oryza sativa
gaggggacttcaggcaagtgctcccggtcattaggaagggcgctaggtctcagataacagatgccactctgcgcaggtcctatctttgggattgtatggttcaattggagcttgttcgcaatatgagggtgcagagcgacgtgtggtttgcggactacctccttcgagttgggaatggcaccgaggaggtgaaacggatatttgcatgtcgtgcaaagagaatgaaacggacctcgaaaggctcatcgatactgtgttccccaacctaaacgataatcttacgaacccaaactacatcacatgtaggaccataatgtccacccggaatgagttcgtggatcgaattaacatgaaaatgattgggcggtttagaggagaggtggtgacatatcatagctttgatcgaccagaggatgacccttataactattacccgcctgaattcttgaactctctaactctaaatgggctacctccgcatgtgcttaagctgaagattaactgccccatcatgctattgaggaacattgacccagccaacggactttgcaatgggacaaggctggtggttcgtgagttcggaagaaatgctattgacgtagagattgtggtagggcagcatgctggtaagagagttttccttcctcggatacctcaatgtccttcggatgatgagatgttcccctttcgcttcaagaggaagcaatttctggttagattgagctttgcattgaccatcaataaggcgcagggacaaacaattccaaatgcaggcgtctatttaccagagtctgtcttctctcatggtcaactatacgtcacgttgtctagagcaacctctagaacaaacataaaaatactatcgatgccggtagaagacaagaaacaaaagaaaaagtctaagcgtactggcgtgaaggacaatgagaagaaaggaaagaaattgtctaaacagacagcagcatacacaaaaaatattgtgtatagagaggtcctcacagattagaaaaggtatattatgtgactattaaccatccataatatgcttgcttaaattccattctttctgtaatttttatattccaagtctaacatttcgtgtgtttttttcttggacagcagtaaacattactttcggtgggattttggcacggactatatgcaccattacgggtattgtgatactactttttttctggatgatattgatctggagcccttgc

SEQ ID NO: 23444 - DNA, 1140 bp, Oryza sativa
ccaccaattccttgaggctgcacgtgatgagaggatcgaaaccatgcactgtcaggttatcacagtttatcagtgttagatgagtgagggacgtgagattgtgagcagagccatggactgaatgctcaactcgtcgctgatattgagttccctgagggaagcagggaagaacttgttgctccgagctccggcctctaccatggaacaccgatcgaacatcttgccacatcccctaatttcgacttcttggagtgaggatagatcatggagaccccctccatccgccacaggaagaaccaggttcttgcagcaccagattctgacatagctcaataagttggaggatgggagttgcaatactgcttcctctccaacctcaaatgaagagaagatcaagtggaactcagtaagagctgggaaacggtttagtagctttgtcaatgaatttctggtaagacgacaatcactgatttcgagctgctgaactgaagggaagataacaccctcttcaacttcactaaataacatgctttcacatcctttgacggcaagtcttgttagggagctgagcttttggagatcagtcaatgaaacgtgtggcatttcttcgatactcatatcttctactttgtccaggttatcaaagaccaaagcacctctgtatccatgtgagatcagcttgttttcttgaagacgcaacaaatctgtcttacgctctgagacaataacacatgtcaacatggaagtgtgaggtatagggggcagtgacaacttggggcaattttcaatctcaagagaacacaggttggggaaccatctggtgtttatgtcttgtgcataggagacagagaacctagaggatggcacaagcagcatagagagattgggacaattttcacacctgatgcttgtaatctttgaaaacaaatggcaatgagctcccccaacccactccacaagttctggcatatcaacaaatctaactttcttcaggtgtaagaaactcctctgtgtaacaccaccaaaatctggtccgaactgacgaatgccagcaatattgatcaaagtaagttcctctagatatatgaattgcccgaaaggtggaagagtgccccagagatgccctctagatggagagat

SEQ ID NO: 23445 - DNA, 2915 bp, Oryza sativa
aacaatggcagggatatgcaagataattggggatagctgtgctcaacatcgacatcttcgtcgagacacgaggagggatcaacatgaccattataaggtaagtgatgatgttctaggtaagatcaaatctgcactgccttatttcgagggaaactatgatcctcgtgcttacattaattgggagctagcggttgatagtgaatttcaaaagcatgtcttgtcggagaaacaaaaggttatgtgtgcctctagtgttttaattaaacatgcttctaatgattggaaacatctttgtaggcataacaaaataccacaatcttggaaagacctgaaacgatatttcagagatatttatgttcccatgtattatgctgacattttgttcaacaaactgcaatgtttaaaacaagataccagagctgttacttcatactatcatgatatgcaagcttgtttattacgttgtggtttagatgaatgcgaagaagctaaagaattgaggtttttatgtgggcttaacaaagaaattcaggacatgcttgattgtcaaagatatacatctctttctcatttgttacaacttgcttgcaatgctgaaagtaaaatagaggaggacatgaagaagcaacatgctatgtttttgtcttctattactaaccatttgcaggaagtgcataatcatgaaaaggaggagagagacatgaaagagccgccagtcccattgatcacactcaaagtcgaggcacctccattatctgaagagggcatcaaaggtaaacttaatggtgctgaaattaataaaggtgagtgtgttgttaatgaattgaatttgtccacttttcatgctatagcagagcaaccattagtggaaccaactgctgagattcctttgtcacaaattgatttgtttgctgttccttgtgataaagaagagttatgcgataatgcttcacttatatccatgccacaacttgtgaatgaacatgctattcctactgttaattcatactgcactgattttaagcatgttgttcacattgctaataaaatagaggagcgtgaattgagatcttctttaaatactttgggttatgttcagtttgatgatttttgtgagctcgataatttcaaggagaaattatttgctaagtctgatttgccatatccaaccaatgttatatttcacatctttggtgaatataatgatcttggaatatattttgtgcatagagtttacatctgctcggatttagaacctcctgtacatgtggataaaatatgcaagctagagaaaaatgttattgctaaccaaattgtctcgagtttgcctagttttgattggaagaaacaggttgttgtaaatggactacgcaaagagcaccatatggaaaaaccgaggacggttttccgtgaagaaggggaggatgatgtgaccatggctaccacggatgcaaccattgctcacatcatggatgaacaagaagatatcgagatcaagtactccaagtgctggaatccgattcggccacctactacactgctgatttcaaacggccaccgaatctgcatacgacctccgttttcggcccgggagtacttgatggaaagctctcggagccctctttctaacggatccagcctcttctctgaattctatctcgtgtggccagaatcacaggaacaaggtgttgcatcacctataatgggcctatgggcttgtaacttcatttgggaccccggcccaggtggggcccatgtggggtgcgccccaagctggtggagcacgaccctaggcacccctaggtcgtcctcccacccctatatatagctagttaccccttcagggtttctcgggttttgttagattaaagtttagccattgctacttgcttgcagcgcgcgtgtcggctagaccgtccgtctgcttgttcttcggaaccccaacttatcatttgtattaaattcctatttgcaatatcagattgcttttatcttgttcttgcttgtttcttcgatttgcttgcaggaatatggttgatctgcaccggcaagatcagcaacccacggagaggtgtatcgatcgctaaggcgcaacacaacgtctcgtacggttgtagtcggatcgtcaacgtttctcccaaatcgtagttatcacaactcaccgaaagatcgggccaacaacagccttgagtgtcgagaggaactcttggttcatcaaattctgcatggggaagacaatatacacaacatgatagctttacacaatccatcaatacaagaaacaatagaatgaaggaagagtgacctccatggttgcacggctacgcattctccatattgtgtgctaatcagccgttcggaagagacgtccgtaagaacgggtggatagttcggaaagaacgtggaaatggtggcaaagaatgtggaaatggtggcttgggctggcaacaagagcttcggttgctgctggcgcaacttatatgatgattgtaactaatcacgattagcgtgatcttgccatgccgtcaaaagcgaaaaaagaacaaaaaattcgttgcctggttgtttctggcgttggaccgtaacagtcagatgttatgtttctggcattggaccgtaacagtcagatgttatatgggccgattaggcccatagcttgtttccttggctatttctggcgttggaccgtaacagtcagatattatatttctggggaataagttcatctgaggtcccttgactttacaccaaatccgattttcgtccctcgatcggaaaaccagacacaacgggtccctcaactatcacaaccgatgcagatcaggtccctcggcggttttaagggcggttttggctaatgtggcgcatacgtggctaatttgactcagtcttcgttcgacatggcattgacgcgg

SEQ ID NO: 23446 - DNA, 1842 bp, Oryza sativa
acggcggcgcttgcgctagggtttcgggcggcggcggcggcgcgaggaggaagacaggcctgacagacgggccccacctgtcagcggctgagagagaagagtggcggctcggcggactgggccggactgggccgaggagggagagagatagagagagggagggttttgggccggctttcggcccaaagccaaaaaaaaaaaacctttttcaatttaaattattcatgaaatgcaattccatttattaaaaacacttccttagctcaaataaatcccagaaaaatctaggaattatagaattaagcaaagtatttaacaaaattttatctagcccaattttatattgagatttaacaaattaaaattagatcttctcttttaggcttttaaaatcatttctaataattcctttaaacaacaatttataatttaaggattttaaacaagaaaagcacttaacaattataattagatcattattgtcacgaccggaaataacccaacgggcgttccttacgtgcgtgtattattccttgtcctaggaggcaaggtacaccaaaagttgatacaattcagagtttaacaagcgaaagcgtaaatagttatttattacatgggcagcgacggcccagcacactcaaagacaacgaaaaacagcggaagactaaggcgacgaccacaggcgcttgacggcaggcacgagctagacaccaaagccttcatcctccaggggctcctcttctgggtttgggaaaaattgaacaagactgagtacaaccaccgtactcaacaagacacacccacaagtgcagcataattgcaaaggagtacaatggagttataatataggggttagggttttgcaataaacagcatttaaaagacccttagttgctcaaagctaaatttaaaacacgatcctagaactatacaatattattaatcaaggccgtgaacccacacgaacctgccttaacccaaggcctacgatgattcagaccgaactggcaacccgaccctgggtcccagctcgtcccaagccaacccaggccaaccattccacattttagttgttgagcaaattttaagaattaaaacactaacttgggtacattgctcggcttgcccataaccgagggcgcggctattcgaatagattatactctgatcagaggtgtacatctttacccacaagacacatcttcctcacgtgtaaccacgtgccacataccaccacggtatacaggcggaagacgtgacatagtttccaacccatcctagccatagacaagagtaccgacccaatcccgcctacggccggaacccccgggacaggcaggcaggactgagcccctagcagcagggcaccaaccctctgccatgacatctcgactaccgggccgcagctcgtgtagccttcatttgccctggagaatgtccatcgacccccgacttcatccatctccaatccgtgtacttttgtttaaaaccagactgagccacaaactaagccttacccactagacatgtggaagtacggtagtgctttgcaacagaggcccgagcttaatccttatagtggccggggtgctacttcccacaactggcatgcacccaaaccccaccgaaaacaggttttaggggttttgaaaggggaagagaggtgtatgtccaattccaccataaaccaacaattccatagtgtccaaatgatatgaatattcccaaagtctaaaattataaaaccacctaatgttgtcctattaatcagcgaagcatctacctaaattcatactagtggaaccatgaatagagtacccactagttggggttttgtttatc

SEQ ID NO: 23447 - DNA, 3049 bp, Oryza sativa
tgtgggtgtgtcttgttgagtacggtggttgtactcagtcttgctcaatttttcccaagcccagaagaggagctccttgaagatgaaggctttggtgtctagctcgtgcctgccgtcaagtgcctgtggtcgtcgccctagtcttccgctgtttctcgtttgtctttgtgtgtgctgggccttcgctgcccatgtaataaattaactatttacgcttccgcttgttaaactctgatttgtatcaacttttgctgtaccttgcctcctgggacaaggattaatgcacgcacgtaaggaatgcccgttgggttatttccggtcgtgacacaccatcacctgggacgagttttcatctgtattcaagagatcccatgttcccgcaggaatgatcacactgagaaaacgagagttccgctacctgaagcaagaagatttgaccgtcacagagtacctgcacgagttccatcgtttggctcactatgcaccagaagatgtggaaaatgatgaagacaaacaagagaagtatctccaggggttaaaagatgagatcacagtgcaactactcctagaggaatatgaagattttgagaaacttgtggacaaagccatacaactcgaaagtgagcataatcggatgaagaactgtaagagaaggattgtcagcatcccagtattcccatgtggtaaccaaagacagcgcacggagccacttcagatcaccggatcttctgttgcgcatcaagagtttccgccccaagaagatggacacaatgcagacaacaacattagcaatactaatgatgatgataccaccaacaaccatgcttcttgccccattagtgaccactcaaatcaagcgtgcaatgtcaacatcattcaccaaggtgtcgacgatagtatcaatgatggcacccaaaatgacaaccctagcaattgtgactctgagaaagactccaatggtgatagcaactatggtaccactgatgccaatgttagcaaggatttccaaccaccaattccaactccaagtcagaatgatcgtccccagacggatagctcagcaaagaagacgttgatttgctacaattgcaaaggaccagggcattactcgagggactgcctgcaaccaaggcaaagtcgatctccacattaccgccaatttacacgaagcagacatcccaatcgtattgtggtcactggagcaaacgccgtacccgtgaggcctcgtgttaatcagaacccatagcagaaacaatgtgccgatgctaagcaccttttcttttaggcagtgcttagtattcatgtaatgagggagaaatgtgtaatacagacaagttctatgagggttcttttggaagatgtggatatgtgattatgtgtataattgcttactgataaaggagacctagggtctcatttcagacgaactatgttctaacctcgagttaataaccaacctgttgatggaaaagaaaaccaattaaactgtgttgggttaaaaagccaatgagacagtagttggggataggagtttggatacgccttttacagatcaagataaggattgttggatgaaacccataagggtacccgccatgcctctacattgataagttcggatatacctgcaagcagttaagaagatccaggagacatcaatatttgagaacatagtagtcgatggttggtaattaatctatcaggtatcagaaaagggtcaaaggtgatatggcagaagaacaatttggatgctccccatctcgaggaagcactaaagatgatcatcggcaattaaaccctagtggcatagatacagatagcaagcaatgtatttccctgaaggtagtcagtgcagctttttgacgaaccacatcaaggtttcactgaaaggcagcaagccaaaggatctcatcgtccccagaagcgtccgcaatccacattaaagaataccacctgttagaggtaagccgaaagatgattgataaaagagattggcaaagatgttctctagcatgaaagaagtaggccgaaaggtgattgataaacagaaacatgctctgcatcgctcacggaagacccctgattgtaattgccccgcaacagtcaccttgtcattaagtaagcaagatgacctaggtaaaagtgtttctaggaaggcaaatagtgaaatgtgcaactcggtatcagatgctacacggagtgaaaagtgcaagcaccggttaccaggcaatgccatttcttgggagatgatccaatgggaaagaacacatcaaggttaaaggtgtaaaggaatacgttgaatactaactgaggacaacctgaagatgataatgggaagtaaactgaatgtaaagaaagtgaatccgagttgcttgttcgtgagagctattcccagttatgaatcaagtgatatgttcgaagataatctacagaggtcagattaaaatcacatctaacaacgaagcctcagatttgacaggataatgattagacaataacaaatccagcagtaaagccatttgggaagacgtcaaagcatatcaagtgggataagttggttctcttgggaagcataattcaaaggcaaagttatcgacccttgcatcaaatagcagaagtagctatcacccggagaccaggaaagctaatatgaggcagttggtggcgagttagaagtaaatgacaagcatggtattctcatgatgacaagcatggtatcttagtaatgacgagctgatctcgacgcatgacatgaagcgggtaacttgtatgaggttgacgccaaagatatgaatgataagaagttctagaaccgaagccccatcctcaaccaccgcagcctagtctgggtcagttagaagttcaaccagggacaagtcgggtgaagagaagattccatctgcaacaggagatcgagccaagcgttccagagtggagaagtcctgttaggcaagttggttatagaagacggagcggaagaagtcagacaagaagagaagactgcccaacctatcttcatgctagcctgctcgaatctcggggaccagat

SEQ ID NO: 23448 - DNA, 2776 bp, Oryza sativa
ccgagaggctgacgcgtgggccccactcccgtggacccggtccgcgcgccctctccctcggctgacgcaataaacccgattttttaattaaaatttaaatgaagaaattcgcaaatatccatttaaagagcatataaacttcaaatggccatatcttggccatttgaactcggaattggaccgttcaagtctctaatttttccttaagaagtcaagaacccatttttgtgctttgttcctgcttgttgtatggagtttattagagtaaaagccttttcttttccgttggtcgtgtagacgctgcagcttcggaagatccgctcttcgtggaagttgaagccggcgtttgggaaagcgagcaaggcaagtcacatcatccttgaacatattgaatcccagtttatcaaattattttgatttaaattactgcattattgctttatttaaattcccgcgttatcactgttttatttagccatgcctatttacctttgttaatacattattattgttattgttattattaccttgttcaccctaggaaaataaaaaccccaactagtgggtactctattcctggttccactagtatgaatttaggtagatgcttcgctgattaattaggcaacattaggtggttttatgactttagactttgggaattctcatatcatttggacactatggaattgtttgattatggtggaattggacatacacctctcttcctctttcaaaacccctaaaacctgttttcggtggggtttgggtgcatgccagttgtgggaagtagcaccccggccactataaggattaagctcgggcctctgttgcaaagcactaccgtactaaccacatgtctaatgggtaaggcttaactcggtgctcaggctagtcctgaacaaaaggacacggatagagatggatgaagtcgttgcgacgatggatatctctgaggcaaatgaaggctacgcgagctgcggctcggtaatcgagatgtctaggcaaatgaagactacacgggtcggtgcccgttagtcgagatgccatggcactggactagtacgcgggtggtctcacccctatgtgtgtggcgcacccggtctagatcttgttgctaggggctcaaccctggcctgcctgtcccgggataccggccgtaggcagggttgggtcggtacttttgttcacggctaggatgggtgaagggttatgtcacatctttacgacgggttccaaggccatggaatgcggagtaaagatgtgtcttgtgggtaaagatgtacacctctgatcagagtaaatctattcgaatagccgagccctcggatatgggcaagccgagcaatgtacccaagtcagtgttttaattcttaaaatttgctcaacaactaaaatatggaatggttggcctgggttggcttgggacgagctgggacccaggtcgggttgccagttcggtccgaatcatcgtaggccttgggttaaggcaggttcgtgagggttcacggccttgtttaataatactgtgtagctctaggatcgtctttacaaaatggctttgggcaactaagtgacttttaaatgctgtttactgcaaaacttaatccctatattattattcccttgtacctcccttgcattaatcatgcatctgccggtgtggcttgctgagtactgtggttgtactcattcttgctcaatccttcccctcttcagtaagagaagctttggagaagatgtcttagggggagtcctggcttataccccagttgagcgcctgtgaagatggagccgtaggcccgctagtccgctgctgtttatttttgattgtcaggccttaagtgcctttgtaataatgtaaatattgtcgatataataaagatgtgtcttttatatcatgtttgtgtggtgtaccccggcttttcctgggacggggattaatacactagcgttcgggaaaaggcaattttcccggtcgcgacaagctggtatcagagccatctcgactgtaggataagccaagtggataaaacccaaggacatattttataaataaaaattatttgcgaaagttcctttttctccttcccctaatgctatttgcaaaaggtttactccgttcttccttcttcggatttcaactagtactagatggtcaggtcagtgaagaagaagacatcgtcagttgttcgccgaagctccggaagactgcaggatctgctagtgaagtggaggaagcagtgaagccagctgtgaagcaggagtgaagatcttggagaacccgtcgcagaacctaagccaccctctagggtagagtcgttagtcgtgtgtttccttgtttgtgtgtgtagcgcgtggtttgcatcagtggggtgtgatgtaaccatgtctaggttgtttgcttaatcaacttgcagatagtgcctaacatacatcataacagcaaaagtacttatatctgttaaggtcctatccttagtttctaatctgtctctcccctttgttttccctctctccctctccaaacctttgcaacagatggctgacaatgagaaaggcaataaggtcagaagtcaggacattggtacctcaagctctcgagtgaatgaagcaccagacaccagttgtgtgacagtggtccaacacctgattaaccagaacaaattgcttatagagatactacagcagcatcagacgccaattgctgaacctgagtcagatacaacctcaagtgcagttgcaggcagtccaagcactcacaccacgagtcagc

SEQ ID NO: 23449 - DNA, 15469 bp, Oryza sativa
cattgccctttgctcattttaattggttaaaattatttccaaggctctgaaaattccactaaaaatcctgttagcatattttgacatgtagaatccaagaaaaattccacatgtcgattccgattattatttgcatttgttaattagggattcatctctaggttaaattaaacaatttcttcggacgatttattttatgaatttagaacaagggaggggaaccttagggcgtgacactaggtttcctcgttccctgcgcggtatcctcgactgccgtcgtggtgtggggttgaggggagaggaggcagcaacagcgataaagcagcaatagaagctagtgacgggggagagcaaggggaggccaaggccgatggtgggggaactgtagttcgcacacaactcttcccaccgccatggtcatctacgaagctctgtcacggccccctgctcaaaggcaagtggcaacaacagtgatggcactggtgcgtgagtgtagccatggcgaagccaacagcagagggagctcagcagccatgcgagagctgggcttccactggtgcgtgcactacgcggtcaccggtggcgcatggtggcaaagtcaatgccactccaatgtacatgagacggaaggagaccctaggagcgacaatgccggtgtcgacgtgtagaggggctcccccacaagattcagatggtggtggcagtcaatcaatcagcatgccctcttcccactcccagattgtagctgcaaacaagatcaagaacaaaattacaacacaaaatcgaagatcaagaacgaaattacaacacataatcgaaaatgtagacgacctaaaccctaggatttcggttcttttaaggggtccgaaaaaaatggctgctggtcaaatattttagtcaacagggtcaaaatcagtcaaaattcctaatcctccctaggtggtgcgctgctcgctggagtcctcaacagcggctggaacgacgaaagagcgaactcatcgaagaaatcgatggcagacacaacatcttgtctcgcttcaccaacacggcacgtagcagcggagcgggcaatccctgcatcgatgtggcccacggaggttgagcgagtactcaagcaacatcgacaaccacagtctcaggagacgtcgacgacaactgttcttcgttggcatcatgggcgacgacagctcaagttgcaggtgtattgtgttctaggcagttatcctcgttgtgaatcatgcatgcctcttctgttttgtcgccgaagtagctagaaacgacgaatgtcttgccgaatttcctcatttttgttatttttttcaatattttgttcgaaatttccaaaatttcgttgaccccttcccctcagcgaggttacctcgccccaatgccaccgagagaagatgaatcaattcttggtgaaatccgagagtgagtttttgatttttgttcttgattggattaggggattggttgcatttgttcttgattttaattttgtttttgctcatggtgtatgtcatataggttgatgaccaggttaatattttcacgcaggagtcaggtcaattgaaacagccatccactatttgccactctcttagttcctatttggatggttagtccctcccatccaaacaaccccttagatatgacaaatataacttactgttaagtaagggtaaatagtacatgtgcagtctcaaaaggtatgctaggcacaataaacaaattagtagtactagtacgttttcttttatctttttaatcctgacaggaactggttgatcactcaaagtataagtatatatatttactttcggatagctggtattccttggttgtctcggaaaaagagaaatcctctatatttgtggataaactaatggagcaaagtcccctatatttctagatagagggagtacatcttataaatatatgagagctcaactatcattgacacatgcatggtaaatatttgacaaataattaaatacccctccaaagctgatgagtgacttaattctaccctataattcaacaaatggttttactcattcatcattcatcatatcatatatccaatggtccaaaatcaattgatgaagtcgatcggacggctccgatcgataacaaatgacgcccctccctccctccccaccagtattgcgcaagacgcgtccccaccccgctcgcggcgcagatcgcgcaactccccttcaaaaaaaaaaaaaaactgcaaaatctcaatgaatctttcgccgtctccgaggcttgcacaactcttcttcctcatcttccgcggcggcggcggcggcgccggcgacggccatggcggcggtggcggcggcggagcaaagcgcggagcagttcaggggccaggcgaagctcctgttcctccccgtcgccgacgctgtcccccgcctttcctccttccgtccacctgccaccgacgccgccacccctggcagtgactcctcctacccgacgccgacgtcgattcccccgccgccaacgtcactgccatcgacacctactcctgtggcagtgtggaggactgttgcttccgttgataatgcatccccgccatcgcgcctcagatcggggacaccgacggccctcatgccgaccgcgccgctgcgcctccagatcgacgctgccgacgcccatcacacgcaccaccaggtaatcgtcgtgccgcgccgcatcccgcccctccgccgtcgtcgcatcccgcgaccccggcggctactccgctgcaacccctgtgcggcaggcgaccccgatggctcctctcgtcaccaccaccgctgtcttctcccattgtataggtatccaaactgagattgcttgatccagtgattgctagagtgttgattgatgaatggcattttgtttggatgtgtgtattgctgtaattgtgtgctgatgatttcatagggtagattatgaataatgtcgatttatgttggtataacacaaatttttgacttctgaccttgggtaggaacagtaccctgtggatgccattcatcatatttacaactgtctttgaatatgccacgtcttttcttgcatacaaaatcttatagagagttttgtagtgctcaatttttcacttcttttatgtttgtgagaataaatagtttagaggattatgggtcggaattatattattttttatttgtttctctgtttgccactgtaccacctatgcatgattaagtacttatctaatctgttaatgtacagtcaaaatgatgtgtagcgtttatgtaataatcgagtccatatacaggagatcaatatatatttctcggttttggcgatgtatagatagatcctatatttcttggcagcaatcatctgtttgtcttgccttcttcctcacactccacatgtaaatgtcttgattttagtgtgctaggtgctcaatgaaattcccatgtgaacaaatttctgtttttgtctatcaggctatgtgttcatcaaagagaacaaagggaagttagaaattagaaatagtacagttcctatatctagcaggtgtgatcttcatttattatttcattctttgatctctattgtaaagggttgcatcgccacatttgcataaagcgaaatgtgcactgcagtatgtagttaagtgcttttgagcaatttattattatttaggctttactttgaatgccaacaaacctacagctgtatcatggctgatatcaccaacaaattactgctgccaaactacaggagaacaatagatgataagctgttccaaagaaaggttagctagcaagtcaattacatgattaacaatacttattactgatttgcagattaattgatacataggttgtcattatttctttgctgtgtatggaaacagaggaatgcccatacgctccggccatctctactatatctgggatccccatcgcgctcctccattcgtctccacagcttctcgcccctcccaacccaatctctaatcatctgaatgcgcgagggtggaagccaagttggagaaacgggaaagggaggacgatgacagggaagttgtcgttccatgtcgacgagtgacaagctgaccgatgcattccgccagctcggcaaggctttcaatccctaggtaccgcaccgaccatcaatcgctactacatctggtctgggggaattttttctccagtactcgagtatttctttagctttgattctagcaagcacatgcggttgaccggttcgaaagaaggatcccatgtgggtttatgtggcataggaaggcagtcaatatgctgttctgaatatgtttgagatgggattccatcatctctccattttgatacacttttcggcctcttaaatcagggttagactcaataaatacaatgtgttaattatctaccgtgtaatttgaaggtaacaagactaattcacttcttcatacactgatacaattccttttttaccaaacatggtaaacttgttagctcctgatgatatagaaaaatatatagttagtctattgtattttctcatactaggaggtataatagatcaacaagtttaccttaatgatgaaattttccatgtttttgcttcatattattcagtagatgtttaacaactaaatttcattagaaattatgatgtctgaattttggactaatattaggttcctggaggtattatgagaggtttcttcctaatggtgttgtcttcgagaagacatttttcctatgctggatttgagcaacaaccaaagaagttcgtaagtccaaagattcgtttgctaaacattgaacaagaactgaaatatgaaaaagaaaatgcagaaatcaggtatgctagcagaatccaagcactatcagtgttacctttatgtgtagtcatatttaaatgcaccctcggttcttcccctatttctaactgtattcttattttatctaggttgtctgatcctctacaatgccaataaatctttgatgctgaatggaatatgatttatgacaaagttggataaatgtgtgaaaaagtggggcaaaaacagtcctttctcggttggcaattggtggtcttgcaacataggtatgcatccagttgcaactcattcttttatccagtattttttgcagatgacgatattttcgtgctgtttgtattactcttcagacatcaatgaataatggcattgatgaggtaaccatgtttgttttcatgtttttaggttatagattgaactgagtcgtaagtatggtgttgatagctattttggcaacaaataagctcaactatagtgatcctttctgttgaaaaggaacttgttttttttgcgaattttttgaggtaaggcaagtgggcaatgaatggttcaaatattcagtggttgtcctggtcaaacagcaagcatagtcctttgtgacagtggtttgttgttacagagatttgcacttgtccttttgaatgctggagctgcagtctgcaccttcttaaggtgatagctctatgccctggtttcttgagatgtaagaaaatttgttctatagccgtcagttattattgcactgaattgcatttattggagacccacctgattaaagactgtgatgagcaacacacatctttttttcggtcttgtatgattggtcagatgctaattgaagctttgtttttttttcatgagacataattgaagatttgttgtgctgctgcatgtctacaaaacatagaatataaatttataaatgggacgagcaaaatgcctatgctttgctatgggtagaagaaaatattctaatttgtcatagcaaaattttttaatcaaatatgttagtatcacttgattatattagttcatgcttttactccaaatagtagtacattatcttagtattttacattttaatattaattgtataagtttctaaaaaacaccaaactcggttggtatagccgtataggtgactcaaagcaacttaaattgagaattcaatctttatccatgtataaaagaaacaatgtgtcctataaagtataacacacttggtttgtatttctatcctgtcgtaaaaagagacataagttctagctactactccctccgtcccaaaatgtagctatttctagcacagtgtctcgtcccaaaatgaaactatttcttcacctacctcctcctctcaaccaatcacaaccattcttcttcacctactttctcttttcaaccaatcacacacttcctccaatcattctcacatactttcttaatacccgtgccaacctcaaaaatggcttcattttgggacagaggaagtatttttgtttaatcatgaaatagaacctttctgagggccaagcaagccaaatgggactgcaccagtggtaagatgaaagtttttccttattcacatcaactatctgatttgcatttatttttgttcatagagattaaatttgttccaagagagtgcaaaatctgtcatgtagcatttatcgttcgacaacatataagttggatccgaatagatgatttagatcttttctttcactactctgctttggagcaaataaatatttttcgtcatcttgttttgtttgtgctatgacgaagtgtattatcttcttgattttcttacttgcagtgtcctattgttgttaagggcgacaacactcttgcatggatgatggttcaatggaaaaattaggaattgcagcaccgacaaaagttcacctattgcactggtgcaattttgtaattaagatattgtcccatgatgaaatgcatgtttgtactgtgtgacgattttaaattaaatgtattaccatgttaatagtaatgtagtattaagggttgattaattatttttgtttgaaaagtttagcctaggtttggtaaattgaaatttaccatgttactatgacatgtatgagaatttacagattattttttgggccaaatatattacaatatatatcattgtttggtttttcagattttgacattagtttgctaaaatatgtatcttttagcatttggttgtttactttgcattactaaaagattaacaatacgccgttgtgttagcacgggtatattactagtttacactagttttcgaagttaagggtgcatcttatattcatatccagtcctatggttgtcggatgtggtagtgaactttttcctaaggggtgcgcaacatgttgtcgaatttttttcggatttagattttttttttaatatttacagaaataatctatcgaccaaaaaaaattgcagaaatagcccctgccgcccacctctggggcggcaagctgacgtggcaaacgggggaggaacgggcagtgacggagggagggttttttttgcaggaaaacccttgccgccctttggtggggcggcaaggggcccgaatgcaaaaaagccagtcagggccggctattttgcaggcggccccttgccgccctctggccgggcggcaggcctcgctgcctataaaaggcctgctgcccagcccctagccctcattcttctctcctcaattccagtgaaaaaaaaagaagagaggggaggagaagagaagaaggggcgaagccctcccggattcagacgccgatttcaggtaatattcatagatcctatatgtgactattgagttaaatagtgtgtattctttaaaaatttgtttgaataaatgcattatatttttagggttttagttgtagtaatctagaagtgcgtattgtagatatcggtaactacgtagatctgctagtttggaattaatacattaccgttgcattggcttacacaagaagatattacgttgtagatgtttattgcatgaaagagtaatatgatctagttatttcgttgacagatatgtcgaacaaacaaatattccaagtttaccatggaccaggaaacgtccgttacgggccaactggggtagatctgtcagattttattgtatcagaaaggggaattgagagaccggctaagaggagtgtaccttctataaaaggatggttaatgaggggcttgagagttgatccacagacaagtgacataacaatcaatgttatagtaagtcgggcaactgagggtttttattgggaactaatgccagttcaaaactctcgagtgtggagatggtatttggaaaatgcattgcaacgcgggtggcctctagctttggttccgtttgttcacccgaaggatccaggtgtgcagacgaacatggatgatggcgagggaccaagtgctgaagtaaacgagacttctgtgaaggaggtcaacgcacgagaggacgggggcgtagtagctctagtgggcattcaaccaggtggagtggctgacgagggggagactgtcggtgccattgtggatgaaatggagagggaggattctgacaacgagcatgtagaggaaggtgattcgtcagatgatgagacggatattaatctagcagaatgggctagtgaggatttttttgggctgatcgtctctgaagaggatagtgtgagatgggagtacaaagaaaatgaggttattcagggagcgatttatagtagagcagaagatatgaaggaggcggtaaaacattttgcagtgtcacttcatagagagttttgggttgccaagtcgaaccggtcgcaatatgaagttcggtgtgttaaggaaaaagatggttgtccctggagagtgcacgcgtataaggggaaatggaaggattattagacagtgtcagttgttaccaagcatacatgttttctacctggtgttcagaaataccacaggaacattacatgtgcatttgttgcatctgagatgtatgcgcatgtcatcaataatcttacatatgaaccaaggtcaataatccgacacattgaagagacatacaagtatactattagctatgccaaggcctggagggccaaacagaaaataatagagatgagatttggaacttacgaagcctcgtatgacaatttgccacgcctgcttggtgttatcgaggaaagaaaccctgggagctcttacgaagtgaagaaattcccctcaattgaacatcctggcaagagtgtgctgcaaagggcgttcttagctctacatgcatacaagatggtattcgtgaactgtcgtcctgttctctgcattgatgggacattcttgacaggaaagtatcggggccagatactaacagcaataggggtagatgggaacaatcaggtattgcccttggcatttgcttttgttgagagtgagaataccgacagctggtactggttcctgaaattggttaaaacaaaagttgttggtatgaggccaaatgtatgcctgatacatgataggcacgctagcattctgcgagcgataggagagttgcagtttgggagtatggaacgaggataccccggtgtttgggaagatgtacagagtaggtggtgcatgcgtcatatgggagctaatttcttcaagcaattcaagaacaaggagctcatgaacatgttcaagaggctgtgcaatcagaaccaggagaaaaaattcaatgagctttggaagagattagatgagttgacagccaaatgcagtgatcagcgtgcagcggctccatcgaccgccgttgctgaccctcctcaagctcttggaactctcccaacggatagtccaacattggttagaagaactggattggagattcggaaattttctcagtggattctgcatgaaccaaaagagaaatgggccaaggcgtatgacacaggtggtgctagatatggaataatgacaacaaatttggcagaagtttacaactgggtgatgtgcggtgtccgtggactgccactagttggcatagtggagttcattttacatgggacatgcaggtattttagggatcggttccaggcagttcttccctctatgccgaacaacagcattttgtttggagctttcatgcagaaaaagctagaggagttgcgtaaaaaggccatgaaacatcgagctctagtgcaaggtacccaacagcacaggtttgagatactatgtcaagataaggcaggcaggggtatctaccgcaagagagtgaagcaggagtgtgttctcaaagccgacgtcacatgtcattgctcttgtgcaaagccgaagctgctccacaggccatgcacccatgtcattgctgccgcagcggagtgtggcataccagatgcagtatatgtgtcacagtacttcagtaagcaagcaatatatcatacatggagcggcgagatttatgggttcggcatagctggggagttcacagagactaacgatgaagtactcaatattcctgacccatcgaagctccgaggcaaggctggaaggaggaggactcgtcgcatccgcaacgatatggacgagtcggaggctggcagggtgaagcgttgcagcaaatgcgatgaacatgggcacacctacaagcattgtcctaaagacaaggagaaaccaagtgcggcggaggcaggactatcaggatcagcagcagatggagctcgccctacgggtgaaggcactacctccactcgaccacgtcctaggcgtcgtcgtgccacgtctggctacgtggtgtagtttttatgttctatgtcggcatgtggatttgcttgtaattcgtttcgaacttatcgatgtgtttatgtttcgtcgtgtaatgtcatacttcggcatgtcatgtctttaggtctcgtgatgtaacgtcggactaaggcgcctaacgtctttaggtatgctgatgtatgtcggacttcgacatgtaatgttatgttatattattgaactctacatatatgttaaattgcacgtcatcgttatgtaccattagtaacgtttgctatatttaaatagcctgtactcttgttgtacataattaatctcatgattttattactatttcataatttttgcaagttatcttttgttttacagtactattttttgaattgttctaacacgaaacactatatttttcagagatggcacgtcaggatacacctcagttgttggacccggcgatagatcaccgacaccggtctcaccttactgcggtgcagggggctcagcttgggacgttccgggcacggacgtgcggtgagctactcacggttcacgactcctttgtcgagaggtacgaacagtgttttactataagttagttgcattgtaacattttttataatgacatattaatttgttattgcaggctacgtgaggccggcctcttaccgatgtgtcggctggtggaggctgcggccggcgacgcggacccggccagacgatggactgtggacaggtccctcgtagcagctttggtcgatagatggaggccagagacgcacacttttcacttgccgtgcggtgaggtagcccctaccctacaggacgtatcgtacttgttggggctaccgctcgcgggagacgctgttgggccagtgaccacggctgtggactggcaggacgatctgacggcacgtttcgcactagtacagcgcgcaccgcacctcccgctcgagccgttggcacaccaccgcaacaccggacctacgaagaggtggctgcttcagttcaccgtgagtgtttttgtaccgaaatgacaatcgtattacatatttagtccgcagttaaggtgcctaacattttatcgacggcttgcaggttgagcagctacaggcggaggccgacgagtactcgtacagccgatgtttggaggcgtacttgctctggctttttggctgggtgatgttctgtggcggtcacgggcacgcggtcgacaagggactcgtgcactacgccaggagcatcgccgacgccgcggtaggcgaggtgcctcagtggagctggggttccgcgttgttggcggctctgtaccgtgcactttgtgagtcttgcacgaagacggatcccagcgcgacctttggtgggtgccctctctttctttctatctgggcagctgagaggattgcgattggccgccctgaggtggaccagcacgtgtacgaggagtcactgtacgaggagcgaccagaggtcgactaacctacgatgggtactctgtggtgccgtcgtcaggtacgttgcatcgatcttatcgtattgttaagttaattgctaagttcattgtacatcacatcgatcgtctcgtattgcagcgccgatgggctcacgtccaggttaggcggtcgtatcctgagtttgttatggagttcgaccgccttctgatgactgacgtcgtgtgggagccctacagtgccgcggctacccaggctcgtgcgccgttgggtctgtccacactctgcaccagggaccaggcgtactggatgactacggttccgatggtcttcgacatctgcgttgagcctcacgcccctttccgcgtgatgcggcagttcggcttccgtcagccctttccagtaccgtttccgaccaccgtcccagctactgttcaccggtaagatcttgcactacgcttttcgttgttgcattaaaatctgcctgttcacaataatttgtaacatctgtcgtttcacactaatattacacattaattcgcaggtactcgcgcaagggtcagcagtcagctggcgactggcccgccaagttggcgacttttgttgaggactggttgctcgcaaccgaggaggtcgtggaccacgagggagagccacacactgaggagtcgtaccaggcctacctacgctggtactagccacgcacccgtactagggtcaccttcgctcccttggagcagcagccccacgttgcgagcactagagacctctacgccaggcaccgcgaccaggacttcgctcgtgttgtgagtaccctgcatcgcaccattcctttatgttttcatgtctttttcttcatcaaattttacgaatatttatgaacaaattaaccatgcaggtcgacgacatcaaccgggtcgtcgttgacggttcaacgacgatccaacgtttagacgcggggattccggtacccgtagaggagcacctgacgacgtacacgcggatggtggagtcgatgcgctcgattctccgagtgctcacctgtcgtgcagacgacgttgctcgggcagacgcagctgtacagcggccacccgtaccgactggtccccgtccagctgcgcacgttcctaggccgactccccctccacacggaggtaagtatttttattactacttctgtacatgcctcgcacatataagtgagccgtttcacttgccgattgcttcagggtttcgtgcaccgttcagcaccccgccttcctcggctaggccttctgttgtgccccccacaggtacttaaaaaaacaacattacttccacaatcaatttacatacattttatgtcttagcttacaagggtcccgttgtcgatgtgtaggtttcgcccagtttgctatgacgcaggccgcccacttctcctaggctgcagggtcagcgtcacaggcagccggcacgtcgagtcagggtccaccactggaccatgctgggacctcgtcggaccccttcctgtcttccaccgtgctcttcgacatcactgacttcgacttcgcttcaggctcgacagaggacgtcatcggcccctcacagctgggaggcgcaccgccggtgcagacgcaggaccaggcgcaggccactcctccgcgggacactcgtgctacccgtgctgtgccaccggatcgtttcacctactcccaggaccacgtgcgagcacaggcccggaggaccaagcgtggtcgcggcgtgaggcagggccagtagagcagtcttctttttgtttacttgcttcactttccaatactgtatgcttgtgtaatgactacgttgttgttatatgtgcacgataccttttggcgcatgcacgatacctttcggcgcatgcacgactactttctgccgcaccgatgcagcctcctttattcgcgtgtgatacgagtatttgcccgccatttggcgcatacgaccaatgtaactttcggcgccgatcatgcatgtatctttcggcgccaatcaggcgtacccaccataccccacacgttcacatgtcaggggtatcactcgattttttgcgcctatataaatcgccttaacgagtgaggcctcacaatctttcagaactcagtcacattcagtactctcttccccacttgcttcattacaaatccgactggctttcgtcaatggctagacgccggggtgttgaggatccaaactggcgtagcgatccttgtgtatacctactaccaccttggtgttagcgtcctctctgcctatgcgatgatcgatgccaactaatggcttcgaggaatcctgatattcgaggaaggcgcttttttaggtgccctaactatgaccgtgaggtattttattatctgcatatgcttattcattccgtatgggcaatcgctttattcttcgtaacactactctattcggcagacccgcactacggcttgcgcatacatcgagtgggtcgatacagaaaatcccgttctcgacctaaccacttgtttacaagaaggtcgctggtatttcgcatccgaaagtactgagcaatacttacagagaaaagcggcttatgaacgacaatgtcgtgaacaacagagcgactgacgggtgctaactacggcactccctccatgggaagcccgtccaagatgcaggtgtggtgatcgttgtcaggttcttcgttccataaatcctacaacattgggtcgaaggttctttgtttgtccaaatattcttgacgacgatttcatgataagaatattttgattacatgattccttattttctcacaacatttacgaactttgcttgctttacatctattctttcctcccaggaaccaccaaggagatgtcaatacagagaatggatagacaccagaagggttctaactccacctagccgtattgtgcagcttgaactaccagagcaatacagggttactaaagcgcggtttgagagaggagagggatcctcacgtaggggttagctattatcggacaacttggcatattgaaatttctactgtcatgcttccttgtcccattattacatcgtcgttgtgttcaactattgcactacctccctcctagttcgaatctaatatcatctatgtaaccgcaatgcaaatagttgtatcatgttcaaattgtactactatttcttcatgttacataattctccttgtttaagtccatataatgtttctacgacctagactgcgataggcctatataaattatccgagtactaatacgtcgaatatggtacaaaataatacctcacttaacatatgaaattgcacaacaaccaacttcaatacatttttataacaatattaacaagttttaccaataaatacttctttatttattattaacataacatagaaaaatcttttggccgtacttttttcatctgg

SEQ ID NO: 23450 - DNA, 25906 bp, Oryza sativa
tcggtccaccaagaccaccttcacggcgaccgaacgcgagacgagcacgtagcaccaccgctcgccgtgccgcgaccacgtgtggcgcccgctgcctccgcgacccaacccaaacaagaaacaaaaacgaaaccaaaccaaaccccctcaaaaatctcgacgcgtgagccataagcccaggcgaccaccgagaccgaccgacccatccaaccaacccgagaccgagaggcgagcagcaaaaaaaaaaaaaaaaacaaaaaaaacaagacggccgcagcagcttcctctctcgccatgcccccacacctctcctcctccctcttctcctcctcccctctccccaccgccctcctctcctccctcacccgccgcgcccgcgccctcctccccctccccctccccctccccgccgcctccacccgccgccgcctccctctccgccgcggcccgctgctgacgcgtggcatcatggcctccgccgccgcagaggcaccggccccgtcgccctcgcccaccgccgccgcgaacagccgaccgcggcgggtgctggaggagctctcctgggacgactccttcgtccgcgagcccccggcgacccccgatccgacgccatcccccgcgaggtgcgtgcgtcgctggggtttactccccgcttcgtggctcgtctcgtctagtgcccttcgctttgcttgcttctgcttcacccggtgattttgtgctgcttgggtgacgcaggtgcttcacgcttgttacacaaaggtgtcaccctcagcgcccgtggacaaccctaagctggtggcgtggtcccagtccgtggctgacatcctcgatctggatcacaaagagtgagcccccagaattattctagtagctgttatgcatttatgcttgccgtccctagattattttggttttggggggtatccctgatgtctgtggataaatcagatgagggttggacaggctgcctttgaattagcatagctcgcttttttcagatgcagtaagagatactgttttattcgaaataattagctttccgtgattggcaatgcgttggagcatatacctcgatcgaaaatagtccgttatggatagagatgtaaatgagaagtggaaatttgagtgtgtataacctgcaaaaatattacaaaacctatcatatcacccttggtagcacatgagctcgaactggtccatacagcacctctaacttatgcattcactgttcgaagatttagtgtcattaccttttgcccaccagggactcttatcgctaacattttaatttatgcccacaacactgacaagtaaggtgaaaattttattcatttatgtttttgctgatgtgctgcagtgtgggtgaaagtggtgttgcctagagttaatgttaccgaaactttccaataaaaaatacaccttgtctttaagtttttgaagaaagttagcacagagaaaaggattactaatcagatgttcaaaattcgaacaccagagcgaagtattacatggtacacagacatggcatcatgacactcgtgtcagaatcctaattggagtggtgtgtccgatgcggcataaaaagtgggcacacataatacaactcagaatcggactggagtggtgttggaatacgacttggacctgggtgcctgattcggcaagaaattatttgcccatgcaatattctttttctgtgttgcccaactcaaacttcttgttttttaatttgccacatgataggccaagtgtgctgtctggcatgttatcagcttcttcttttggctactgaccactgaaactgtttatgacaagttggttttgctttttatacagatttttgtactggttgatttgttacaagaatactgtatttcttaagttgcttttgatcttgatatgatctgttaatgaattaagctgagtaatgcatttttacctcctaccaactctcattttctccatttttgtgtagaagcatgttcattgttctcttccctgttactgtcatccattccttttaatcattttgtatccttgttggtctactttcaggtttgaaagacctgattttcctcagctgttctcaggagcaaatcctttggttggaggtgcgtaatactaatgcttaacattctcttcatatgattgcacaagaaaagcaacacaccttctgatgaacaactacctgcagttcaccttatgcccagtgctatggtggacaccagtttggttcatgggctggtcagttgggcgacggacgagcaataactcttggagaggttatcaactctcgaggtgagagatgggagttgcagctcaagggctgtggaaagactccatacagccgatttgcagatggccttgctgtcctccgcagcagcattcgtgaattcctatgcagtgaagctatgcatggcctaggcatccctacaactcgtgctctttgtctagttgaaactggcaaatctgttgttcgagatatgttctatgagtatgtcatgacatctctgttttctgaactacatcatgctcgatctatttttctttctaaatttactttagaaacagatcgttccatatccgaagttgtatatctcattgttatgagatatttcttccttctatctaacatggtcacaaagattaaaaagagaacaatagatgatatgagtctctctatagaaagaatgatagatgatcaataatattattatttaaagctaaatatgaagctgccaataggcaaaaataataatggtagcgtgtttctgaaaacgtggtactattttaaacttttaactgtatgtttatggagaacatatcctatccgcacaagcttcccgtgcacattaacagccaaatatcacggaaaattctagaaaaaatatgacatgtactcttaatagtattacacatatctacaaagtcttatattcaaattcgctatattttagctgtaacaaaaaaaagtgaaaattttgacagttttaagattaaaaatctgtcataatttcgtcttttcgttacgattaaaatataatgatttgaacatgaaatgtcacagataggtgtaatactatttaaagtatgtgttcaattttttctagaaattttttgtgacatttgctagttggtgtgcacgggaagcttgtatgcataggatatgttcccatgtgtatgttgcttgagccacatatatataccagcataagctgcagtgggcctgctactgaacaagtctgttagcttctttggtgatggttgtgctggggatgtagaaattaccctgaatggcacgaatcatgtggtgatggctcattttcgtttttagcacatgtgagtttgagttttttttttccatttctttagtgcatgactgtatgtggaaatcatatttggcatattccagtatcattagtctacataagtaaattgtctggttttcatgatatatataatagcacttgtgagcactaaatgttgaaatgattaccccttgccactatgtcaactatgattcttggctgcaatattacgcaaccgagttactgcagctgctaactgcttttgtccacaagtgtgtgtagttacataacaaagcagcagcgaccactgtaatgcagcatgtagcagctgctctaagattcttcaggtttccttgggccatataacacgtccttcttttaagaaagtgcataattttgcccccccccccccaattttttttatttttattaactttgtattgaatactatcatacaaactccattgtccctttcatttacctactgttgattaacattaccttagcggctttttcataaagaacactggttgccaggacctttccccttttttttttccagaaccttccttttgaaggttttagtaattatgttgtatctattagcatttgtttatgatgataaatctaatggtttgtctttatatatcagtggcaattcaaaggaggaaccaggtgccattgtatgccgtgtagcaccatcctttttgcgttttggttcatatcagatacatgctacaagggacaaagaggaccttgaaattgttcgtcatttggcagactacacaatacgtcatcactacccacatctcgaaaatattaaaaagagtgaaggtttatcttttgaagcagctataggggactctccagcgatagatcttacttcgaacaaatatgcaggtaaatatcattatgtgctattttctttcagtctactcattgatatttaaaaggctaagtattctccccttttaatccttggttacagcctgggcagttgaggttgcagagcgcactgctttcttgatagcaaggtggcaaggtgttggttttacccatggtgtgctcaacacggataatatgagtgtattaggactaactattgactatggaccctttggctttttggatgcttttgatcctagctatactccaaatacaacagacctccctgggaagagatactgttttgcaaatcaacctgatgttggcttgtggaatattgctcagtttacctcaccattgacagctgccgaacttatcagcaaagatgaggcaaattatgtgatggagaggtgcattgttttgtccaatatttactgattattacccatgattatgtccagatgtatcatacattttgatttctgtgtactgcaggtacgggacaaagtttatggatgagtatcaatccataatgaccaggaaacttggtctacccaagtataataagcagctaataggcaagctgcttaacaacctggctgttgataaggtcgattatacaaattttttccgtcttctttcaaatgtcaaagcagaccataacattccagagaaggagctacttgttccacttaaagctgcactcctagatattggaccagaaagaaaggaagcatggattagttgggtacaaacttacattgaagaggtaggctttacttttggtaatcgtttattcagtttgtttctctaattctattttataagtgcactttcaaacccaacataatggtatagcacatcaatatattatcaatgatttttgtcttgcttgttggtgtttgggtatgtgtttgtcaacccctgtcattttgtgaagttggaatagtcatgtgtacaaaagaatgtcacaaggcagaaatgagtggttgtttgctcccgttatatgcttccaaatatttacaatcatttacatattggattatattgttttgaaaattgcatcaactgttggttttggataatatctcattcattgttaatgtatcatcagcatgctaatcaattccctgaattattgacttattctgccaatagccaatatgttggtagatcctctttgcttcattagttcaaacatttatagcgaactacagctttgagaaacgacaagttgtaaagaggctatttggacatccttgatctaatgatatatttttttctttgtgaagttggtttcaagtggcgttcctgacgaagaaaggaaagctgccatgaactctgttaatccaaagtatgttcttcggaactatctctgccagactgcaattgacgcagctgagcaaggtgattatgatgaagttcgtcggttattgaaagttatggaacatccatatgatgagcagccaggaatggagaaatatgcccggttgccaccagcctgggcatacaggccaggagtgtgcatgctgtcctgctcatcatgaaaccaacattccatcacgtcaaatatgcaaacttgttttttttatattatttttttctgtataggaggtttaattttgagctactgctatagtgtctaaagcatcacatgctattttactgccgatgcatatcagaaactggtgttgttaatcttcgagttatcatattgttgacggtagctaagcgttcatagcagttgggaaatagagccaccaaactcatccgattttcttagatatagtgctttgttgttgtgaacagattatattttcgcagatgaacatgatgtgcatttagttttagctgtccatctaattatgtccagcaacatgagaggtgtttatttacttcaaattattgtgttgttggtacacatgcaattaagcgcattgtcgccgtacggacgatctaataccacacaatgtgaaagcaattagttataacataaagattatttattccactgttctttgtgttcatggaacaaaagtaacattttgttcagactgattttgtttatgtagagatacaatcgaattgctccggattttgtttaggatgttcttaaaatctgctttcttggtattgagtttctttggttccactacgtgatcgttttcctagtttctttaattctacacagccgttcggtggcggaggacgactaaacaggaaaggttcagtcactacaaggaaaaaaaaacaaaaaaaacatttttctagtattatagagagactttttaaatgcctttacaatactttcacaatactataaaggtattttaaaaaatacctaataagtgtcttacggtaagaggtattttataaaatatctataagatggtagatgtattttctgaagacattaaattctaccacaatcctatgaaaccaatgtaaaaaaataaaatatttttccttgttttcgccaatccttaactcatgattaattggacaaattattctcatctataaggcactaaccaactcaaccctaagtatcacttgtgtgtatttgccttgagttacttatatttagtcatttagttttttttattctaagaagtgtctttatcgtgtttaaagtgtctcgagaaaatgcctttacaaaccaggcacaatttaaagcgccgtaagaatgcctctataagataaaatctaataaaatgtgctaaaaatatgctaaggttacggtgcactgagttattattcaatcttcaccggtcagctcgtagattctctttcacctcagtatatttcattgcccacaaaaaatggggaacttccttgtcatatttgcagccttcaccggttagctcggagattcccctccaccttagcatatttcgttgcctcaccaagaacggggaacttcctcatcagatttgcagctctgggcccacaatgttgtgtcttgcgcccctccgggaaggaagagagaggaccagagagatgttggcgtcgcggtgacagcaacaggctggtgcttgtgatgaggatgtagcgacgtagggggtaggggagaaattatcgctgccacccctgtcattgtgggaggaggagaggccgctggcagtgaggaagataggaggagctcaaggtcgaggccacgccactgaggtcgatccagagccagcgagcttgatccgtagctcgacagcttctggcccaacgaggtggagccccgcttgaccctaaatgggtgtgcgccgccgcttcgctcatcgccactcgcaaccacgacctcacctgctccgcttgttgagccacttcgatctgccgcctcgaacgccacctcgcctctaccgctctgcgccgcggcagctgcaggaagaggaggaggggaggtgtggcgaccggaggagggggaggcgcagtggagaagagaatggaatggccgacggaggagaggagaaggggactgagagggaagtgacggagaggcagaggagtttgaggtcgaggccgtcatcgatttggagccggcgctggcgccgctcgggctgcccggtactgtcgccgcatggaccaccgcgtcggccgccgccgctcaaccccgacacctcgctttctctggccttggcttcctttgctggtggggaaagaaagagaggagaggcagagatgaaaagtaaaagagattggtattggtagtatccattataagtaacttgcagtgtgaagtataaagcttaacacgttcttagtctaagtggcatgtgaagaacggcaaatatcagggacgcaccgcctaaaaagtaaggtacggattccttaaaattgcttttgcccacaatttgttcattgtggcgagacgctccacggtttagccacactttacatattagttgtgtccgccactgaacacaaagtggattttaaactctcaaagggaaggtttcctcgttgtttacatgacactcaaatagttatggaaaaaattaaaaccatttgagaagatgtattaatatggatatattattccacaaatatgcaagttaaaattcaacttctacatttcgcaaagaaaaaacaaatttgattgtgattatacgttaactagttatagtttaatttattttttcgttgcaagatatagaagttgaatttaaaattgcatatttgtggagtgatatataacatattaatacatcttcttaaatgtttttaaattcttttataatcattagagtgacatacaaacaactagaggacatcccctcgagagtttagaatagttttcccactaaacgaacagcagtgtagcgcaagaaaaatatctacagtggtggaggggggtgtttggttgaacacctcacattaccgtactttttgtgaacgctactaagacaagagttattaaaagtatgagtctacgacgtgtggattcaaagctaaaaaactgtggcacgtcaaagctatggcaatgaaccaaaattggcaggctaagagagtttggtaattggtactgaaccaaacagcccttaagtaatcgagttttcggcttgagagtacatgaacgtgcgtgctggtactcttgtcatcaatcaatatcaccaaatcgacgtaccataccagatcgagtttaactaagaccagtttgatttcgtgtttgatacaaaaattaagatggacggattcacaagagagcaccctctacttaagctttacattacaaggccaaccagcagctgcctgccggccgaccactgcgtgcgcacgcgcgcgcaataatcaaccaatcacacacagtacgcacgcacataaaaaccacccatagccttcacgtacgcccggacgcacgcaccggttcgtgccaagctcaagggtagatggttctcgggatgatgatgtcgccgatgttgttgtgccacgggtccgagaggtggctggccaggttctccagtgggccggtgcccgggtacgccgactgttggacgcagaaacccacaaaagccagcatggccaatcgccctacaaaccgatcgataatatatacgcatatgttatcgtctccgtttctaaatatttgacaaccgttatcgttattaaaaaaaaaaagaaaagttgggtgcattgcataccgttcttgatctccttgagcttgtactcctcgaacttgacggggtccttggagaagccgagggggtcgaaggcgccgccggggtacttcttcttctcggggtccttctccatggtgcgctggtgctcggcgaaggcgatggcgacgaactcgatgaccaggatcgtcggcagcgtgccccatggcaccgggttgccgaggtacgtggcctggccgccgggctccgccgcccactcctgcgcctgcacccagttgcccagccccagcgcctccggcaccaacaccccaggctgcacaagcgtgattcagttcagttcagttcgtccatggcggcgcaggccatgccatgcggagatcagaatcaagaaccataccacagcgagcatggcccaccggcagtggtacacctccgactccttgaaccgctcgaagttctccggcacggtggcgaggcccagcgggtcgaacccgaagtcactgcacgcacgcatggcaaatcctagctttgtcagtctctcgctcgccacggacgcacgccggcgaagacgtgtcgtcgtcgtcgaacgcttgtgcttacccgggagaggagccgtcgaggtgggcggggcgtggctggcccggcatccactcggcggacatggtgacgcgcccggaggtggtggcgtaggcgcagaccggcaggcggctcctgttcgacgacggcgccagcaggctcggcacgcccaccgcgctgcagctcctcagcccgctcgtcgccattgccgccgccgccgctagcttctcctcctcctcctcctcctcgaacacaccagcaagaagacgaagtaggaagaagaggtggccggtgagtggacgccggaatccgtggcgggatattaaggggggagcacgacgcgagcggccggagacgaggccggggatgggggatatccgaatcccgccgccgattggctgcgatatccgcgcgcgcccacccccattgggccacgtcggatcgtggcatcttttgcccgtcctacgtggcactcccctgcatttgccttctgctctgattgtctcgggctctcagctgggccaagccatgcaatgcagtccacatatccatgggaccatgtcttcttactccttcactagggaaaatctgacatgtaacttgtataaatccacaccaagtgtccaattccagatgatggttttgatccaaaggaagattttttttttcccttatcctcttgaattgtgcatgaaaggaagattttttttatccaactagtatttacagaattgtgaaaaagagcattgttttttcaaaaggttgggttgggcacaattcatgctattaaaatgagatttttaacttgttttattttttgctactgtacatgtaaccacagtgggtacttcctttgatgcaaaggatgatttttttttatccaactactaggcaactagtacgatgttcgccacaattaaaaggttttactgacttactccgtatctaaaagagcactgtcttttactgaaaggtttgagtttgatacaatagatgccattcagatgagatttttaacaaaaaaaaaaattaaaggacgatttggcttatcttattgtttgctactcactccgtcacataatacttgtcattttaggttgattagtataaattaaggtttcaaaaaaaatactatataggtgcgttaccaaattttgctagacctcacatgccgcatagatcaagaacaatattggctacatgctttacagtgaaagtcacttatagtgggtcccactaatatcaccttcacttttcatgtatctctctcctctcttcctttccctgtcggcagagaaagccaaggcgccggaggataaagcgaggcaaggtcagcgacgaccgtcgggtggagcggcgaggtcggcggtgctcctcctctctacattttccctggcagaggaagcgaggtggctcgttcggtgacggcgtcgagcagagcagcgacagcgcggcccatgcgacaccggtgctgggtagggctccacctctcctccccctctgaccagtgggtgacagcgcgatgggagctcagcggcacgcgaacgggaggcggcggggttgatatggtggcgagggcaccaccatcggggtaggggtcttcccgcttcaccgcatccgtacccaatcgccggcacaccaaactgtcgcggcacgtggaccacgccgactcgtctacctcgtccacggttgtggctggcatcggcctcgagctttggatccggtgacgtaggggccgcgagctcagcgaaaactcctcggcgacgagcccggcgatggcgcagtgtggagctagggggcgacgacctgcttggctcccttcctcccttcctggttgacggaggatgacggtctccctccctggccgccgagacgagccgagctctctttccaccctctcccttccctggcgacgagtgtgggtcgacctgacgatgctgatattttttttatgaacagtgtgtctcagtttggtcacgcgttcttggtttggtcacaggaaacacagttggctaggaatatcctacgtgtaagcttgaggcagaatgacacgtaagcatattgttaaagccctaatgcttcatgtttgaatgtgagagggtgggtggttaggataaaatgggaagaaatttgaataggagatattgatgggataaatggcactatatgtgacaactattttaggatggagttagtacatgtaaccacaggggaaaaaaaataagttgggctgggcccattcttggcccaaaaaagtgttcattctgtcatccataggtactaatgaattctgctgcgctctattgttgttctggtctctctagatcagcttatcttccgtaattccgtaaagcagtcagtcattcagccccattgattttccttgatcagaactgatttgcatcatctttcttctttttttctgggaacatctttctttctttctttctttcttttgacaaacaagatgaactattctgaaattaatggaggatgaaaagggcttgtcagtggctggctcagttcaggatggctgtctttgcttcatattgttgcaaagtgtttgtatagtcttcacctgtgctatcaatgtattcattctgccacggaatcgtatgctgaccaattaccggtgtcggatgaaatgaagggcacatgatttgttcaaggaccacaagcaaaacaacgtgcagaaaaaagtgtttgttaggaaattatgtggttgtggctaactggtgcctttgtagtttctagttgcacacttagcacaattgtactaattcattaactacatcaccagtcaaaagcacatgcgcttcgtcgatgactgaatgattctatgtgaaaccgttcacagaccatcataataaaataaagagacaattagcaccgagggtccagccaccaatagcatgtcttataaaatggagtaaatttcacaaaactacaaaactacaaaactacagatacttagatcaaattatcataaaactatagatttaagaatgtattacaaaactacagatttagcgtcaaatttttcacggaactacagatttaatgcaccatatcacaaaactatagatttagtgatgaagtaatcaaagaactacatattctagagtttagatcatagcactattatttatttaaagttataaaaatatgtagttttatgataaaatagttttaaaatgtgtagttttgtgataaaatagttgttaaatcaatagttttgtgatataatatcttaaatctgtagttccgtgataaatttgactctaaatctgtagttttgtgaaatacattcttaaatctgtagttttgtgataatttaatcaaagtatctgtagttttgtgaaatttactctataagataccgtctctctttaaatatagaataaattttagaaaatcctatatttataagttaaagttgtagaacatcatctctctcgttttctatgcgcacgcttttcaaactgctatacggtgtgtttttttgcataagtataagtattactatgacccatggtacatagtattatgattataaagcttcacaaaatctcacctttgtgtatgttgagtctgatttacttacaattctaaaatatatagtgcatataattcttttaactattaagttcttgaataaagatgataataaggttgttagtttaactcttctttacttaaaaaaaattatttcaaatatactgaaactaatcaagattttaataacggtggagttctatgaaacatatataccataaaacttgtggtcatgtgctacacgtcataatacttgtggctttgtacaactttaattttctaaaatttgcttttaaacattgactttttgacatgtttgactacttatcttatgaaaaataaacatgagaagaaatcatgttttaagtatatttaataataaaataattcgtagtatatttaggaatacatagtttttttaaaaaaaatgattaaacgtcatatcaaaagtctatggtgactttatttttcaatttttatataacgtttgactcctcgtcttatttaaaaattttctatgattaatagttttattgttattacatgataaaacataaatagtactttatgcgtcatagtttatttaaataagacggacaatcaaacggtgtacacaaacctaaaaatgaaggtttttttttgggctgggggagtacaagacaatgttgtttacaaattgtactagtactgatatgatttgatacatagtataatgaatttggccagaggtatgtctaaattcgtagtactatgatgtgtcacattcaattttagattggttttttatggaactgcgagaggagtacaaaacaacagaggaagtagtacaattatttatgctgaaccagcttcagtaataatcatgcagtaatcccagaagcagttattccaaacaggcaccagcaacaaataaacacatccagtcatgggggtcagaaccaccaccctgatggatcttggctctagctcctggttttctttctttgctccctccctgcctgtcacccagtcttgggatcctccctgttcttctctccctcttgaatcccccaagagcagataaagagaactagtactaataccactacagttaatccttaagcacactgtcatttgcactaataaaaatctcattcttgtcaggctaataatcacagtggagctagatcatctcgttttcaacggttggtagactgtaaacaaagtgcaaggccgagctgagctgagctgagctgcagcgagtgacagctccacagaaaagcaaagcaagcaagctacctctctctctctctctctctctctcggtagcttctctctcttgctggctggctctctgcgcgtggtgtgtactcctgctgtccctgctgcggctacagctactgttgcagctcgagcacccagaaggccagaaacccagaacaagtctcacaccctcctcctcctctcgtccatactagcaccaccgctgctgctgttgctcctgctgctgtgctgccgccgcctgctcgtccaagaatcttccagctttccccaatactgagcagccaactcctgctaccgcttcttgatctgtgggattttcttcttgtttcgaatccaagatcacttccaatccatagttttggcttttggcttccctccagcatcagtgaaaattggttctttggaggggaagaaatggatagcggctggatatgcttcttgagccagattgctgatttgatgcaataaggtaaacttcctcctttttttttctttttctcttctcacctctattggatggttcatctcttgaattagtttctctctgtctctctcttttattgatgaaatgaattagtttcttgtttttgttcctatcttttgtgggttagtatattggttgatgtattccaacctgagtttaatggggatatttgttgtctgaacttgtcaagttctatggatctcaatatgagacacttcatttatgcttaataaatcgattcccccagagatatctgataatctgaaatatactgttccaatagcttgttacagtaagagtaagttcttgtatgcttttcttgcagatttctatcttatttcttgctgcagtatcacaaatcaaactaggagaactgactgagaagtgaaatattctgcttccaagaatcaatcagataaactgattccaagaaaataacaagaagtaatcagataacagaagcagctgcagctgcagcagtagcatctttctgttcccagtaattgcccaatccaactccagctagatttaatcagatagagaagtaatctgctggattgaaatccatgggtaggggaagaggcagagggaggaagctcaccaatggcaggagccatgaggacaagggcagcagcggcgaggaggttgtgcctgcgaggaagaggaggggaaggccgcagaagcgcattgtcgacaaggtggtggatcaagcagaggccaagaatctaaccgagggcgacgacggtgatgctgactaccaacaaggcgaaggagaagacggcggtgcgaagccgaaggtgtcaagaacggagaagagctctgcagggaagggcaacaagaggaacaggctgcccaaggaggaagaaagctcaaaccttgaccttgaggagaacagctcaagcacccggtccagcaacgatgaatccaccaggtccaatggcttccggcagaatggcagccggcgtaagagcacgccgcggcgagccgcggaggcggggatatagcttggaaactttggaatagggtggggaggacagtttcatcagggattggttcttgggttatatcatcagttaggcaagctgctcttcagttttgtcatcttcagattcggcaagttttccttcaaaattttgtcatgttcatgtttgctaggcaccaacatgaatgtaatgtaaacatatactaatccgcgagacatcggagttttgcttctggtgatgaaaattgtatgaactagcatcggcttatggtactactatagctagcatcaccaatcttgttgcaactttgtttcatctcatctgctttacttttgccatttcagagatacatccatcggagttttgcttctggtgatgaaaattgtatgaactagcatcggcttatggtactactatagtctatagctagcatcaccaatcttcttgcaactttgtttcatctcatctgctttacttttgccatttcagagatacatccatagctttttttttttagataagagtatttttacctggcctctacattcaactggatatatgcagtttttttaaattaggaacttagccctcaaataactcaatctaaaattcgctcctgtgaagatttgaactcagaaccttggggtgttactcaggtcactgcaatcattaggctatatgccctttcatcagtgttggctgttactccttgttcttgccagatcaagataggttgactgttgatcgattgctgcactttgtcttgctctaatcaagatagcttgattgctgatctatattgcaaaggccaaatgactataacatgttcattctgttcactggtgaagtgcagacttcatggaattcagatgtcataatatctttttgctgggcatctagggttccttttgctggattcaggatacactataaatagtgaagcatagtatcctgtcttagattggtgaagaaacagtgcttttgtggacaatttgcacaccatgatggatgttttcaaatgatgtcaaattatcaatctagcatacacgaaaggaagattttcagggtatttgattctgcagtgatgatgctgtcgaaccatatttctgccctagcatttttttggcaactggccttgaaccattatcgaccatattgtaacacaaattgttgcctcctgtctggatcaacagtaagtctaaccacactaaaacctaatctaccactcctagtatttatcatcatggaacaaaaagattcagacaccatgatagtatctccactgagccatgtaagagcaagtttaatagtatagccaactattggctctaaaatcaattatagttaatttaatagctaattcatacaatagttacctataaacatgtactatataattaatatctggtcccacctatcatgcacacatgcatattggagtctgtgctacagctggctacaaatgtgtagctcgctgcttttatctctcatcttttatcttcttaaaatatgtttatagctgacttatagtatgctactgtacttgctctaaatgtgatccctctgcattgttggctgcacttgtcagaattcgttttttgtgtagattgcttctctgacgaccatctagaaagcgtttcaagtggagactgaactttcaattttgccatttcaatttcaggtttcaacaaggcttaacaaaaaattcagtgcctattgccggatttggcatgtacgatgggcctaggtacactcggaccgttgaaattggtggtttgtggatgagcattttgttttgtggttccttgctagttgctccggcaagccgtagtggtagtgccggtgacctaatctagaaccaaagatgggtcctcctgtttttggaatttgtgtaggtttagtttatcatgtatatatatgggaaggataagttcatgggtgagaaagttgaatcttgcactttctgccagcacaaatagtagatgattccgattttctagtattttccttttaaatagaagttgtttcgatattgggcttttgatattgtagagaattgtatcgactatcatcccatgtaatcggataagagatgtaaaacaatcttattatgatttttataacgtgcatgagcgagaaacaatcggagatagaaactgttaaggccctatttggttcaaagtatttttcaaagaaattgtaaggttccatttccttcaaggaaaaaccgttgtagcagcgtttggattaaggtttcattttcttcgaggataatgtttggtgaagcactagggttatgtgaaaagacaaatgattaaaagtcatggtaattaatatatttttctcaaattcctccatttcaaacacaaatatgcctatattgcctatgttttttcattcctttgttttgcaattatgcattcctaagttctttcctatgcttaattcatgtggtttgtttttcttagtttcatacaggcatgcaagcgatgggcttggtatgtgttttatgatctaacctcaataaagtattgtatggtacttttcaagagataccaccgaaaaaaaaacatggtaataaaaaggtagagaaattctgttatttgtagctgttgaagcaagagtaaggactctgcctataattttttttttggatggtaatccccagctctcagcatcaagcgtagattctcaagcatcggtcttgagttagaatgggtttagtgacgtggcgataatgtgacaccgtatcccagggtgttttccatggatgaaataatttttgaattttccaaattagtaaacagctttaaaaatcatgaattccactatagagtatttctaatatagattagtttgtaggtacaaaataaaacataatttgtctgcaaaatataatttaaatgtactaaaaaccattttcgtgcgaccaatttttttcactacacctaaatttatttaggtttaaatcaaatgtgcaaatgaagtgggaattgttccataatgttttgagtttattactaacttttaaaattcacattattaaacaaactatttaaaaaaaactaagtcgcatattgtgggttttagaacctagatattttgtctacaatagactaggttgtcatctataagatattccactctaaagaataaaactattctaatgccactcaaaaagatgtaatgctgtttttccactttgaaaccttttgtattagttagtatggattcaccatttattgaccattttgcccctgtgcttttaaaaaaaatcccccgtgtgcattccctcttcatctaacagaatatggcaaagctcagaagcttggagtggcaaaaacagaattacaacttttgaaaatagcatgataacaattacattggagtggaactcttgaaaatgataaatgttcaattttctcttagaatgaaggttacttgcataaacaaaatcataaagaaaaaaagagttggatccataatcaacttacctcccaaagggtatgtttcttgtaggaagcaattcccagtcctactttagccacattttttcactagaaccaaacacagttttacgggggatttacaattatgacattgcaattttttacataaacaaccaatacttaaattgaaaagctccacactttgccctgatagcaaagcctgatatatgacacctggaagtacacctgaagcactaaacagcagacaaattatgcccttttttatttgtaatcagaaggataagccttcacatggattttgtatcagcaaatgccaagatctcgctgttccccggtggcatcacgggcagcacgacttgtaaagcaactggacataatgaattctgttttttttttctttctccaagcaccaaatctgcctataaatacacaaaccttagtgagaacagcagcaggagaagagtcagtggagaaagatctactgctgcaacaaagaacagccatggagcttctctggctgctgctgttgctgctcatggcttcctcaacatcgtcgcggtccgaaatgaaggcgggagaggtgatcaggagaagccaattccctgaggacttcttcttcggcacagcttcttcggcataccaggtatgttctagaagcttctggagagtactggaagatgtgtgtatctgtgtgtgcatcacttggccctttgttacaaactttttgatgttgcagtatgaaggtgctgtgagggaaggtggcagagggcccagcatctgggacaccttcacccacaatcatccaggtctccttgctcctatgatcctatccaagattatgttttttactgtaatcttaacccttatctattcttaagcatatcaaatttatcaatctgactgttacatactaggatatttaatgtgatttaatgtgtcgacaatagtaagatttgaaacaggactatgcaaaattttaacctgttgtcaacttggtgaatgacagggaattactttgaacaatatcatagcagccttctgactaaggaaaaggcaagcaaagctagacaagatcaagtcaactgagttataacacagacacacagtagccagtaggaccttcaaccttagaagtcaaaaccctctctgaattatgaattatgacaaaacttcgtacacaatatttatgctttttaagcagttgcaaatgtgtgaatcacgcaaaagtttctatttgaaaaggaggtataggagatctgcgcccttgattaatagtggaagaaaggatagaaattacatactccttctgtcacaagataagttgactattggagttcaaactttgtcccaaaataaattgattgttaccttcttgcctaccacggtccacaaatcaaagacagtcagactaaacatttccaaactggcaaaacaaaaaaggagaaaaaaatggttaccaaacttccaaacaagcaagcacagacaatcctgtgatcttctggttgtcataaagtaataccacttgaaagatgccaagatcagaggccactccagaaagagaacctagttaagtgcattccttccatagcatgttagacattggttaatttagtgaaacacaacatcaatgtaccaacctgtaccacaaaacctcctacactagacattgtatattctttagtcttttgacccttaaaacaattagggtagaaggcacataaaacaccaatctaatgcttgattgggactttaaagcacttcagtcatatggtcaatttgacctacgagaaaccaaaagtagtaaatttgttatgtaggtactataaatcttcattctaacctactaacaagatcaattttacggtccttgaggaggtaccatgaggtacaaaaaatttagtgtaaaatttggtatctcatagtatctaggtaccaagaggtaccaaatttacaatagaaaaaggcggtacctcatagtatctcctcaaggaccgtaaaattactatactaacaaaggaaggggagaaagaagaagcaaaaggctagtgaaaacaaattttcaagcatctgatgatagattggaacttttcttaagtagtttaatttttgttagatgatggcttaagtagttcaatgaccgctattagctatcactactttattactccatgtaaccacaagcaaataaacagcttagttttcgtgtacttaagttacagtccacatggttcaaaagatgtctatagagaacctaattaataagctactggctatttatttttccttatatacctcaagcacttggttattagacaactcaaggatgtcatgcatgaaagaagcatgtctaaatcatgtttaattaactgacattcagatacggtgcttcataatcaaactaccaataatttgttcatgcagagaagatagcaaatggaagcaatggtgatatagcaatagattcctaccaccggtacaaggtaatgcttttaagataacatgatcaacttgtaatattctctacacaagacctaatgtttagaatatgctaatatgttattcactaagtgcaggaggatgttggaatcatgaagggtttgggcttgaacgcgtatagattttcagtttcctggccgagaattcttcctagtaagtgattcctcctttattttactctatttttcgttgaggcttggagcatattccaggtaccacttatcattatagctgctcaaactaatatttttccattgatctgcaattgaacactattgtaacttaatttgatagctgtatagattaaggaaagaaaaagagtaaaataagttgatcgcaggtcagtaccttatgcaatgatgatatttatatagatggaaaactgagtggaggggttaacctagaaggaatcaaatactacaataatctcatcgacgagctaatttcaaaaggtagagattacatatttccgcagtgtaaattcaaaacaaattgctcttattactatatgtttacatcttaataatgcctaacaagcaaatacaggtgttgaaccgtttgtgaccctttttcactgggactctccacaagctttagaacaacagtacggtggattcttgagtaacctcattgtgtaagtaaagcatatgactcttcctatatgtacccgaaatttactgatactccaattactaataagaaccatgatgaaatgacaaaacaaaactggaatcccctccctgtgtgtatcttcttattactaatgaaatgatgcgctctcatgcgtgttcggaagaaaaaaagatatgacaagaaaaataaagcataggagttaattaacagcttgtgccaacattatcagggaagacttcagggactatgcagacatctgctttagggagtttggtgacagggtaaaatactggattacattcaatgagccttggagtttcagtattggtggctattccaacggcatattagcacctggaagatgctcctctcagggaaagtcaggttgcagcaagggagactctgggagggagccttatattgtagctcacaatcaacttttggctcatgcagcagtagttcagatttacagagagaaataccaagtatgacctagttttctttactgtgaatttgtggttattttcagttaaaaaaacagaggtaaagatcaataatataaaatgcatttttacagacgaagtatgttaatagataaagaccttttagttttttttttctcgaacatgcagactttttactaatgaaaacattagatattaatggtaaaagaaaaggcagatgtagatagatagttcatttccgtagtttttgctagcttatttgttgaaacttgaatgtgataatcatgtaatcatgcaggggggacaaaaagggaaaatcgggattgctattgttagcaattggatgattccctatgaagattctaaggaagacaagcatgctaccaaacgtgcattggatttcatgtatggatggtgagttcttgttatgtgcagtacggcaaagagctcagcttcatacttgaattttcagatcaatacatacagtattttttttctttttctgatcatcaaattgaataggttcatggatcctttaaccaagggagattatccagtcagcatgagaacattggttggtaacagattaccaagattcacaaaggagcagtcaaaagctataaatggatcattcgacttcatcggtctcaattactatacagcaagatatattcagggtactaaacaagatagtaacagtcacaaaagttacagcactgattcactgactaatgagagaggtaatcattcaagaactctgttttctgttctccaattaattgaattactttgttgagctagctaatggttttctgaacatgcaaccatagtggaaagaaatggaacagatattggtccaaaggtatgatttaaatcagacatcatcatgttcttcatatgtacgagctagttcatattattacacattcaatatataatccgttgtggtaatcagtggataataaagaacacatatagttaattaaacatagaaggaatagagttaataaataacacatatatagttaataaaaaaacataaatatatttaatttgtatccaggctggttcatcttggctctacatctatccaaaaggaatagaggaactattgctatacaccaagaggacatacaacaaccctactatctacatcacagaaaatggtacggcattctaactgtttaccaaaagttgttctgctgcttatcaaaaaataaataacactcgtgttacaggtgttgatgaggttaacaatgaaaatttatctcttaaggaggccttaattgacactaccagaatagagttctaccggcaacacctattccatgttcagagagccctaaggtaattttgatgacaattaattgcttgacaatatagtggacgaaatcacaacaaatatctcattgtttcaatataatttggatcgaaatggttaagtatctgcgtcaaaataaaaaaaatactgtcatggaatgtcaggcaaggagttgatgtacgaggatactttgcatggtcactgttcgacaatttcgagtggatggatggttacagcgttcgattcggcattaactacatcgactacaaggatggactgaagagatatccaaagcgatccagccaatggctacagaatttccttcataactgaagtgtgcgttgttaacagtatgaatctatacagcttttgagggagaaatattcctagtgtaatgtataaattggagtaaatttatggtactaaaaagttaccggaaaatatcacagattgtagtgttaaactgttaatatgtggtagtaccttgacaccgtagaggtgccagaaggtatcaaaatttacactatatatatatagatcgtgttgtgttgtccaagcttcagcagtagtaccaaagtaactctctttgtggtaagatgcagcaaactggactgtaacatcgcagaactagctactttttctaacacaatactggagcggaacttcatagaattctaattttaagatgtacaatactagtttgaagtatcagataaccacttgctattgtaccgtgaaatttatagtaattttaagatgtacaatactagtttgaagtatcagataaccacttgctattgtaccgtgaaatttatagtagcatgtatctaattaaccccataggggggtatattctacacaaactcgctacatagcacagcaacaaacataaactattcaaatcattgatattaagatatcgattatttgatattcaaaccattgatatctgcttgttagcaatggaatttttctccacaacatatttaacttcgccatcttcagtctttatcacccactccggggcagcaatcatacacaaaagaacatttgattcaggcagcaaaaataacccaagtacaaccagacaagttgttaaagtatgaaccttgatgtaatcaaccagctttcaatctcatcttatttcaggtacagtcatccggctagtacagtcatccagctaattgactaacactcgaacttagtaaagtattgatctctccaattatatgcaccggcctgccatcaaatacagttgatagcgttgtctcgcagagcttcttgagttccctggtttttgtaattgctgcctcctgtcacattacaaagctaatcactaccaaatctttttggctataga

SEQ ID NO: 23451 - DNA, 5486 bp, Oryza sativa
caataagaaaaccaatacgaaacatttgacttcctttaatttaaaacgaaggggacaaaaagtagtagttcctgaaaggaccttgatgtcgcctagagggggggtgaataggcgttcctaaaaattatcacaacttcatagcatattagagagataataacttttgattcaaatcgaaacttccggtatgggattggaagttccggtctcaatcgaaaagttcagcggataacggaataaacactagctatgaacttatagctcaaacaaacaaaatgtatatgaatcaaaaggtgacaaataagatatctaagcaagatataaggtcaccaactaaatcaaataagcatgcaagtagatcgggtaaaaacaagctcaagcacaatatgagagaatgcaagaatgggcaaaccaagaagggagacgcgcgatttatttcccgaagttcggatccacggatcctacgtctccgttgaggagccacaagggccgagcctatttcaaccctttcctcacgaggttgcacaaatgcactcctcggtttcactcttgatttcttcccttgcggaggcgaaatcgaagccttcacaaactttccgtggcacaccacaaccttgggtgctcaccggcaacgcctagccgtctaggagaccttagtccccaagagtaacaaaacaatcgaagatttgcttgctatgaactcgagtgctcaaagtatggagtgaagctcactagctctcaacttctcaatcactcaatccaactcttttcccttctcaaatccctctcataaagaggcaccacaaaggatggagtgaagctcactagctctcaactcctcactctctcaatccaactctctccccttctcaaatccccctcacaaagaggcaccacaaaggtagggaaatggggatggctatttggctttggatgtgtctaatactccccaagagcagcagccactcaaaggaggggtggaggggtttatatacccgagcccctcaaaaactagccgttggaggccaagactgtaattttcggagtttccgaaaagcattttcggacaagtccgaaaacttacagaagcaaatctcatattcgcagccattttcggaatgtctgaaaattttcggagttatccgaaaaattttcggagtttccgataatttttcggactttccgaaaagcgaagagtaaaacgactataacttttcgctcgggagtccgtttttaatgaacttggactctatggaaagctcactcagaggactacccaactcaaccaacaacaaggtctaaaaccactcaaaggatatgttaaaacttgggtttctctcaaggtagcactatgataggtcactttgagcaccgagacatacacaaacacctcgacgttgcatccctcttaatagtacggcattcctaaactcaaatgtaaataagaagagaactataccattaggaatgcctttttttcatctttctttcattgtcttgagggacgccaatgccgataccgtttcaccatatattcttcaaataattgatgcggttacttgtagctttaaatggtctcacacggtccatcatgacaaagccgtcactcgcccttcaccaccggatttggttcttcggcgccaagccccttgcttgcccttcaccgccgcatggtccatcgcgaccgagcatcgcttgcccttcaccgtcttgtcataatagccacttcgtatcacacatcttcaatatcttcactttgtcattcttggtattgttagatgtaatgatattacttgagcatcaacacctttgtaatccttgggacctatttctttcattcaactcaataaaattattagtcccaatgatccggttgtcaacctacacatgttgaccaactgatcgcaagtataaaaggatatgaataaatgatgagtattaatcaacaccacaagtgtcatatactcaaatatatgttcaagtgtaaagatcccaattaaatgaaggtgaataatttggatcgattacatgcataactaaagtataggatttgctccccctaaatgtatgcatacaaaatatttgtgtgaagcaagagtatgcataacaagatagtaaacattgagagcttatcctatataagaatagaaggcatttatcaaatatagacaacaaaataaaaacatacctgaaagtgcatctaggcccctaatgattttgatgattgattacaatgcgattagagaggactaacacttttattcaagcaaatgtgaaggttgttatgtcctcgacatgttgtaatgagatgcataccccatgaatgcgacatcacgatgcaatgcggcaatgatcaaatggtatattgtatcttttaccttgcattgtgtcgtaggaatgccgtactattaagagggataccacatgcatataattggtagaacactagtgctcaaaatgcttcatctttgtgtgagttgaaaaacctaagtcaaaatttcaatcccgagttgtttcacttgtcacaacacttacaccgggtttctttgcaagtttttcaacatctcttgaaggttttggaccatgttttatgttgggtttgatagcccacgaaactagcattccatagagtccaagatctttgaaatcggagttcggagtaaaaagttattgcagttttacttgagcaacatcagactatccgatttgaaatcagactatccgatgtatcggactatccgattcttcacagaacttcactctctgtcttgatttgaaaaaatcctatcgagtgagtttttctaagtatcggagtatccgatgtcggatcagatagtccaatgatacagagactccgaaatttcatagaacttgagtctctgtttgaggacgaagtttttgcttctaaaatattagatactccgatttaacattagatagtccgatgtctcggaaagtccaaaatttcatggaacttcgttctctgtttctagttgccttggaggtttaaaatatcggactatccgatcttgtatcggactatccgacgtgggctgaaagattcccctccaacagccacatttttggggatctataaataccccccacctaacccttttctagggttacccaactcatttcattctcattcactttgggttgagcttggtgctaaggtgctttggatctttgagctctttctccctctctcaaatccctccttgttctttgtgtggtggatcttggtggttgtggatttggtgtttgagggcctagtgtgtgtttcactcgatcttgagcactagggtttgaccaagagttatgtggtgtttgttactcttggaggttgagggctcctagacggctaggtgtcactcccgagccacaaatctacgtgtggttggccgggagaagtttgtgaaggccggattcacctccgcaagaaaagagataccccttagtggaaggaggagtgcttagtgcaacctcttgaggaaagggttagcaaagacccggctcttagtgagcttctcaacggagagtagaatcccctcaaggatttgaactccgggaacaacttcgtgaacttcatcattggtgatctcccttcatcctctttttagctttgcttaattgtgccgctatagatctagtcgctgtttgtgccttactcttgtttgtgtgatagatctacttgttgtgcttcattggtggatcagacagtctgatccaacatcagactatctgatattttcggatagtctgactgtggatcagactttccgaccttatttcagttttagcttccgcataaagttttaaattagcctattcacccccctctaggcctaattgaccctttcaattggtatcagagcctaatctcctaattaggcttaaccgcttggagagatcatgtcgggtcaaacggggaatggcaaggatggtgataagggagctacgtttccttatgactatccctccgcatctacatcttatgtgagcacctatagcggcaaagctccgtacttcaatggtacggactatgccgcttggaaacataagatgaagatgcatttgaaatctattaaccctttgatttgagaatagtcgaaaaaggctatgttttgcataatcctgaggaacccaccaaggaggacgacgagaacgagcacaagaacgctcaagccgctaatgcaattcttagcgtcttgagtggaagtgagttcaaccgtgtggacggcattgagagtggcaaagtgatttgggacacgcttcggaatttgcatgaaggcacggatagtgttcgtgagtcaaaggtggagattctcaaggggcaatttgagtggtttgtgatgttggatggtgagagcccaagcgacatgtatgatcgattgagcaagatcgttaatgagatcaagggacttggctccacggacatgaccgatgaggttgtggtcaagaagatggttcgggcaatcactccaaggaactctaccttggtgaccatcattcgtgagcgtccggactacaagactctcacacctcatgacttgctcgggcgtatccttgcccatgacatgctcgagcaatagtccaaggaggccatccaatacatcaaccaaacctcaaccacaatcatcaagaaggaagacttggcattgaaggcgaaggaagaagaagaagagagtcgcaagagcaagagcaaggcggagatcgatgatgaagagatggctctcttcgtcaagaagttcggcaagttcatgaagcaaagcggcttctttaagggaagttcgtccaagtattcctctaacaagtcaagtggaagacactccgcaagggtgtgctatgtgtgcaaagagcccgggcacttcattgcggattgccctcacatcaaggattgcccccacttcaaggaagacaagaagaagcttgagaagaaggagaaacacaagcatagcaagcatgatcgctatggccaagctcaccttgggatgatcttcggctccgactccgagtcaagctgaagtgaagaagaaggagttgccacgttcgccgtcaagccttcatcaccaccgagactcttcaactactcaagtgatgaggatgctcccatttgcctcatggcaaaggagcctaaggtaccctctcccctcaagtcatttaatgttgatcttattagtgatgaggagaaagatgttgaggatgaggttatggatgacgagttgttcaaatccatagcaaaggaatccataccacacttgagtgagttgcttgggagaattgagaatcaatatgcaacccttgagaggcaagaggaattgctcattcgtgagaaagagtggtctcatgaactcaagagtgaactttctaaggagagagagagaaatgaggctttggtacggctttacaagcaaaccaaagagtctcatgctaatcttgaggtgacaaacgctcaacttcaagagagagtggatggcttggat

SEQ ID NO: 23452 - DNA, 648 bp, Oryza sativa
gcataataggccagccgtgtaggcggaggcaccactcggcggcgacggaggcaagccggcggtgaagtcgtagacgcccaacagcggcggcataataggccagccgtgtaggcggaggcaccaatcggcggcgacggaggcaggccggtggtgaagtcgtagacgcccaacagcggcggcataataggccagctgtgtaggcggaggcaccactcggcggcgacggaggcaggccggcggtgaagtcgtagacgcccaacagcggcggcataataggccagccgtgtaggcggaggcaccactcagcggcgacggaggtaggccggcggtgaagtcgtagacgcccaacagcggcggcataataggccagccgtgtaggcagaggcaccactcggcggcgacggaggcaggccggcggtgaagtcgtagacgcccaacagcggcggcataataggccagccgtgtaggcggaggcaccactcggcggcgacggaggcaggccggcggtgaagtcgtagacgcccaacagcggcggcataataggccagccgtgtaggcggaggcaccaatcggcggcgactgatgcaggccggcggtgaagtcctagacgcccaacagcggcggcataataggccagccgtgtaggcg

SEQ ID NO: 23453 - DNA, 9982 bp, Oryza sativa
  unsure (1)..(9982): unsure at all n locations
atggtctgctaactaattctggtgaacccaatgatctgtatgaggcacttgatgataaaaattggaagggagcaatagatgaagagtatggtgctttaatgcgtaataacacatggcacttggttcccgcaactcagggacacaatttgattgattgcaaatgggtttataagataaaaaggaaggctgatggtactattgatcggtacaaggctcgtttggttgctaaagggtttaagcaacgttatggtattgactacgaagagactttcagtcctgtagtcaaggcggccacaattagactaatattgtcactagcagtctctaatggatggtctttgcgacagctagatgttcaaaatgcttttcttcatggagttcttgaagaagatgtttatatgcgtcagccacctggttatgaagacaagtcaaagttggattatgtgtgtaaattagataaagcactctatggtctcaagcaggcaccaagagcatggttttccagactaagcatgaaattgcagaatcttggatttcaaccgtcaaaagcagatgcttcgctcttcttttacaagaaaggtacaatctccatatttgtgttgatatatgttgatgacatcattgctgctagttcttgtgaaaaagcaacttcggcattacttcaagatttgaaagaagaatttgcccttaaggatcttggtgcattgcactatttcttgggcatagaagttaataaagttcatgatggaattatcttgactcaagagaagtatgctactgatctgttaaaacgtgtcggcatgcatggctgcaaggagatcaatacaccgttatcaacaatagataaattattggcgaaagaaggtgagcctctaggtgcggaggactctacaaggtatcgaagtattgttggtgcgttacagtacttgacattgaccagaccggatatagcttttccggtaaataaagtttgccaatatctacatgctcccacttcattgcactagacagcagttaagcgcatattgagatatctcaaaggatccttgggacttggtcttcgaatttgcaagtcagattcaactctagtaagtgcgttctcagatgctgattgggcaggatgtccagatgatcgcaagtccactggagggtttgcagtattcttgggagctaatatgatttcttggaatgctcggaagcaggcaactttttcaagatcaagtaccgaagcagaatacaaagccttggcaaatgctactgcagaaattatttcggttcaaaccttactcaaggaacgcggcataactcagccgcgggctgcatgcttgtggtgtgacaatattggtgcgacctccttatcagcaaatccagtcttccatgcgtgaactaagcacatagaagtggattaccactttgtgcgtgaacgagtgtctcaagggttgctggatattcggtttgttcctttggagatcaagtagcagatggcttcacctgtaacctacctagaaggcaatatatacaaggcggcctccattgtggaggttaacacgcttcatcaataggttacacaaatttacagtgctaacatgactgcatctctacacgccagcatctccactgtgctcggatcactgatatggtatatcttcgacactcagcagtgacaaagtttcctgtattatcccgtgcaacaattcctgcacccgcaactccatccttcaagttcagtgctccattagtgttcagtttcatccatcccaaagcaggtggagcccacttctgaaccacagccgatgggtcctcctgagatggaatctccagagatttaatgagctcatcaaccaattcaacagaccttaacgactggtacttgacatcgccatggttgtagctgtttcggctcccccagatggtccacattacagagactgcaattgccgcctcccgtttgctcatgatatctgcatccaacacgtcccacgaccatgtagctgggtttaaccgtggcatcttgagatcaaaaagatcctgagccgcactccaaaacaattttacatgctcacattcgactaatgcatgaaactttgtttcattgtcattgccacagagaggacaattacttatttctttcatatggcttctgcggagttcagcagcacagggtagcaaatttttcaccacccgccaccagaacactcttatcttaggcattatccggagtctccacagtgctttctaggtagcctcgttacccgtggacgatcccgtagcaggttcagacaggccacaacgctgaatgagttccctgtacgcagatctcaccgtaaatatgctcgttttgtcccatgcccaagcccaaaattcatcttgctctgttctcggccttggcatgttcagaatagcagccgcatccaatggaaggaaaatccgctgcaccttctccacatcccattggtttgtattatgcaacatgagatcggcaactaactgaactggatcatcagtcattctccctaacggcttcattgtttagtagtccatctatccattgatcatgccatatttcagtggtacgaccatctccgatcctacagatcaatcccattctcagtacctctcttcctttgatgatccaagtagacgaggcacctcgagggcaattagcagatagaatatctcctcctttgctgtatctccccagcaaaacacgtgcacaaagactatcgggcctgtccagcaattgccaagcttgtttggccagcacggcatcgttgaaactctcaagatcccgaaaaccaagtcctttttcattaaagaagcaaataaatgacttcaggggcttgtgtgttgattttgttttgaacacatacttgaatttctccttgctacctaataagagttcaaaagaaaggaaggccctattccagtcaaaagtactctttacgctcacgagcagtcctatgaggatcccccctggttctgactatgattcactagggcgaagatctaatataatctggttcaagttttccttttctatcgggccatggatcaccttccttttttccatttttttaacttgatcacgcaacatttctttctgctttgacccaattgatgactttgtcaaactccgtaggtagggaggagtggtctttcaggattggtccttgtgtttcactactgtacacggaggacctcctcttttttatgcatcttttgatttagtttttgcaatacctcattcacttcaagggcaccccattgcaactaatgaataatgaatttgctgtcttctatctaggccgacaccgggattcaccacaaccctttgttgtattcttgaagtcaatccatagtcatgagttctgattaaagaaagcaagccatacatacatcagtgggctgagaagcaaatagttcccccgccactccatgctatatttcctgccttgaccctatcaagcaagagaagagggttgggggtgtgctgtgatggtcttactgatatagaacccttccctcattgaaaagaaagatgccctcacccgatagttcttcttgctttagcttggataccggataagttgatctgattcaagatatcttagaacacagcacattcagtgcataggccggccatcatctctctccttggataagcaggatttagcaggaaatatcgacagcatttcctatagaaaagaagcctacttggttgggtgggaggatgaaaagattctcttcctactggaagatggcactgttgaagtctggagagcggaagatatttaagtaaggatgttatgccaggtagcattcggtacaagagtgagacggaggtagctccgtagaagaaagtagttttgcaaagaagcttgttcttcggagtagattggcactacggcactactagcttttgaacagaagaaagagtttgttttctcgtcataagtgccaccaatctcgttcaggcactaaactagtttctgggaggatggatggttgtcccttcttctcaatagaatccgatagacaagaatcgaaagctgcagatttttttattcctcaagtaagtcagttgatgattcaattccatcaaagatggcaagagcggggcatctagattgattcgtttttaaggttgttataccgaataaaaagtattctgattctctgttgaggcaagctattcatcattaacaggaaagatcccaaagctgttattgcaaacatgggatagcctgactctacgctacaatctctattttcttatgatattgaatctggcttctattattgaatcaggcttctattattcaatctctagttaccgtgggaaaagaaagagataagagctcttagtgcatgcctttttttttgtgattcgagcagttcttgtcacaagatgatgggccagagaaaagtttgataggaaaggaaggcgacagttaaataaaaaaaaagaaagggaagatgatactgatataagagtactgctctttgccctaagattacgatcagtcactttttatgtttcaatcagctcctcacttcttattaaggttttcgcgaccgacacctagttctttccacatcactccactgtttgagcaatttccactctccttcctggtcaaacctatcaaaaccttcgttcaagaactcattccagcccatgccttctctgactactcctttcactttttgaagtgtatttatttggaacaactttaaatacttctcgcacttgtcaacccattccctcgttctcccctccattaaacataggaaatttaaccccaatccagggtcaaacgaagatacttgttagcctagcatcatgtgtatctgtagccttccctatttttgacaatctcctatttcttcgtagcacgtgtctccttcctatgttccgtcccctgttactggataagtagattttctgtttgaagtgcctagaagatccagcaaacggaggttatctctcccgccttgagtttcggtcttacgcattcaagcctagaataaggcctaacaatagggtgtaaactttagcgaacttccatgcttatataatccaatcaattgcaccatgattaatccactagacaaaaggaaaccacaatcactacattaaccgagctatattagccgcgctttcaagagcacacatagaaaccacttaacagtgactccttctgttagctattcatttcctgggagttcagactgacggttaggttctttttctaaatttacttaagaacttttgggcaaaggatacaccggaaaagaagaggagcctttgttcgtttggcattcgttggggattcatttctcgttttgcgattagattcattgctcgtcgatatggtttagtaaaaaggttttttctttttgaaaaccagattcatgcccagaagaggatcctctatctgctctcgaagcagtcgtcagcctaagcttaggttttaaatccttaggttgaccctacccctttttcttcctttccctatccaacccgagctctatcggtcatggctttctcctctcttcaattctttccgcccaaactaatccgcactagccccaaaccctagccctgttgtctggattcccgatctctctcctacaagaaaaacctattccactaacgactctctttgtcttataacttgctaatacccacatgagaaacggtttcccctcgctttcagcctcccattatgtcgtaggctctccggaccttccattatatttgagagatgaaatgcgtaattcaagtcatcaaacgagcataatgaaacatccaatgcctcgagagaggaattttagagacattgctgggcccttagcctgccagtcaacttcagcctgagatgtgcccgtcaaaccactcgaaggcggcgatcagatgtgttacacattcaggagacttgacaaaaatggctaaagatctacaacctctcaaatatccctaactcatactcatgtgaatctagttcccaggatgtgcactagattcacactttcatcttaagcatgattatacatagcaaacacaactaagatgaaagaaacttaagacttacaacaacttaataattacataggccgaccggccaaatagacttattagagaacagcggaagcttgactacccaatcacaagcacaccgactaggggtttaccccattaagttctcatcctagaagaagcaatcggaacccgcatcactcaaagactaagactaaacctgcaaacaaaaggttatatcaacagcaagagtcagtacattaaacaagttaatgtactggcaagcacaagtcaatcctactatactacatgtaaggcatatattcaaaggaaggcaatatgtagttcaatttcagcataaagcaagttttgttttgcaattcttttgtaaaggagttgatgcttcaattaacaaagacaagttntaagtttcattattaacttcttcataattccatcataaacaatctctttttgccatacttaacaataagtcataatgtatcaccacatacacaactcaacacatttatcaatttcaaacccatgtcacatgatcacatttttaaaacatagtctatactcatgacacatcaccaaagcgctcatgaccgtgagcacggctaatcgattagtttaaagaactctgcagagtttgtacagctttacccacatgatatgaactctctagtttgttttgagtttgcaagactccaccacactcttcatgttgaatgtgatctagaggtcataacgaagcctttacactacttagagcctagccttgcaccagcacgatacgtgttcctccatcctaggcatacttggaatatacctggaaccgttaagtggcgggcccacgccttaaacttaacgccgtggtggcggacacgacgggaacccaccacgtggcacaataccgttgtattggacacgcttagtcacctaaactaccacgtcggggtaaataggaagctcctctgaattatacgaactcatacacaccggcctaccagaatgcaaagctagtcctaaatagattactcagcttaggccatcccatactagcacatgtggatgtacgaataactttaaatgggtgacacaagttcggtccttatcgacttgggcaaacactccccctatcggtatgcaactaacaccatatgcacaccacttgccgcccaagtataaaatcacattttacatattttagttcgtaaatacccatcatattcattttattccaacaaaggttcatatatcaaaatcatattttaattatagatggaatgagcatttgcatagttctaagcatggctaagcaagtagttacaaatagagcatatataaacccatttgagcacaaagagtgtactctaaccatttctaggggttcaaacagtaagaggatcaattattcaaggtggggtatgcagcaaataggtcataactaccttaacccaattttaaataccgatataatctaagttcacatgcagctttgcaaacaaacattttcattcctcaaatcatgggattcaatgtgttcaaaggatgggaggagaaaacttgccttgatcagagaattgttagcacctaatccacttcttcaccgattatgcaattatctagaaaaaggacacgacatgcaattaaacaccggaagaggtgaaaatccaaaatgctctaaaatgcatgatttatgcacagtgggttggaaatgatctaaaatgaatttaggtgaaataattcctattttattttattccatttgggagttatgaattttagaatttttatcggtttacaatagtatagtcttaggtagtgttatgaaatacttttgtaaagtgatttttattagattagacttcacaggggtgtggagatgtgttttctaagactaacacatttggtttcacaatttttggaattataatgaattctttatgcattttacaagttataacgtgttttagacatatagtgttttatatgttcatgacttttgagttataggttcagaacatgctacttcctgtttaagttgaataaaaggaataattcgcttaactaaaacatttttagttcacatgtttatggtctttactactatggttcatattttataaactagagatgctctaatctaaactagcaatatattatattaacctagaaattgttatatgagctaagttcttctaagttttagtggatgaggatggaactatggcttcactggtcaatcaagtttttatttaggtttaattagacctaaagtgtatatatatacttatacatgtttatgtattacttaaacaacactatgtgtttaaattcttatttcactaagttaaggttttgatcaatgttctctacaaaaggtgacaaattttattttactatgttgaagataactatttgctggttctatagaaactttgttcatttcatttggactaaaaataaattttctacaagttttacaaattaatggctgctctatgttagtaaattcttatatgaatatttagagacttttactacacagcaagtatataatcttatttcataacttggaaatacatgttttagtgatcctacataacttaagtttattcaaattgaagctaaattgggttctacatgaatttctaaagtttagcttatctaaaactaatcattatagagataatagttttagaggcatttgatgcaaagtaagtcattacttttatttaacctaatcagagagtgtctgatgatgaatctgcagtttttgagtttgtttcaaaatgagttgaaatgaattttctatgtattttataagtttgtacatgttttatgcatgacttatcttagataaatcttagagacattatttgtacagtgagtgtcaagttttatattcctggaataaagttcataacttcaagaatctacagcaactggaatcacttcaaaatgagcttcatttgattttatatagattttacaactttgtgcatttttctgctaaacatgtatttgtttgggcattttcctaatttttcttcagattttaaaggatgggtccacatggctgtgagggaccaatatgcacaaaggcccttgaggtttctaggaatcaacccgcagtcctaggcccatatgtcagttactaatattttgcgcaaaaacccctggtttctcgggaaatagatcccgcagtcccctagttttaggtttgtatgcaaaacgatgcttgagttttagtttatttacagattattactggtcctacttgtaagtgactgttccagttgttaatacatccctgggaatctttaaatttcaaaagccatgcccttgctctggacagagcagagcagcagcacagccgcgagcttcacagcatcaccagtggcgaacaacggcgattcagcttaagctcccaaaacaaaaagtgtagagaacaaccgtgtgaacctattggtggctttctggcaagatttggtgctctatagcggctgttagggtgttagaggcggtggctaagctcggcttgcacatgcatgtgggttttgaggctcgatttaatcgtgcatgcgtatgataaggactctagggactactaggaggctcaccaagaatcaaacgcggctcggcgaagtcttggcgacggtgtactggttcggcgacggcgcaactgctacggtcgtcgtcgacggtgtactcccgggcttctactgcatatagagggtgcatgcttcggtttagatcagcacaaggtagctctaggcgaaaaatattgcgccgaagctcaccagagaaggagaaagaaaggaatggcgtcggcggccagagttggaaaaaaaaaagaagaggatctcccaccgtggtccacctcgcgtcgattccttcgggattcttgatctacagaagttgatgaagctc

SEQ ID NO: 23454 - DNA, 13621 bp, Oryza sativa
tgaacggaaatggagctcaccggattgcgacggcgtcgaggacttctctcaccggcgccggagttggcacccccgttcccggcgaatccgaggcggggtacctcggttcttctgcgaaacgagacaggggcgagagagagtgagagttggtcggccagtcgggttaagtacggtcgccggcggagatggggaggaggagctcgccctcttccgcgctcaacgcgtgctcacacgcgtggcgcgcggggtctgagtcgtgggcctgtgtggagagggatgtgaggctgacaatggggtcccactaggcaagagagaggtgtagaaggaggaagtgttggacagggctgaacctagcctaaggtactgacaagtggggccaactcgatggaaactaggccagggagagagatatgggtagaagactggtaaacttgatttttagattaattttcggaattattttctcctctaactttgtaactacataattcaatgtgtggaccaaattaattagtgttgattttactggaggtaaatgattacacctagattccattttctttggttgcactaaaaaataatgggtggactgctcacagaaattaaacaaagatgggctattagaaagctagattgaatttttaggaggcttaaacagagaaggaaaattctagaaaaattacatttattcatgataactaatctagtatttgaataaattattttccatgttcacttatgtgcagttaaatgtacttttggatgaaatatggttttagccgattaaaatttaatttgatttcttttagttgtctgcttcgaccgattaatttgagatatcaacttgagtgttaacacgttaccaaattacggaggataagtttgtgctaatcattgtccacataaatttttccatgattttatcttgcacaaaatattttagagaattaagttgacctttatttgtatatgtgttcccacttcataattgcatctaatattattatagggattacattaaacttcttttagactgagaagatgatatttgagtttaatattaagtccacatgttatcacccaagattaactataggtttgtttagtgaagtaattcttttagattatgctcatgggatctattatagaatgcaagaccaaaactccaaatgcacaaagaactcgagcctaggcatgcattatgtacatgtatgcttggtgacatttctagtctaatgttgggaatgaaaaggttttattttgttctcaaattttaatcatgcaatggtttaagttgatcatcacctaaattaaaacggaaatttttggctctcaaaattggagaaattaacctctaactattttgataagaaattttaagtcctaaaatttcgggtatgttacacattataagctagatgactctactgtgacatgttatgacgatctggaagcccccaaccatagatagatgctttgatcatccaggttttgccaatccacgaactgcatcgtataataaccgcggatatcaggcgtaggttgaccttgagtggttcactgaagggtagggctatctcttccctttccatgcctttgattcatcccggattgtgttgatgtgcacatgaacaaaagtgcacattcctatccccgaagcaaataaatcagatgacttttccgaagcaaagaagaagatgatggctctacaaggcacaacaccaatggaacagtggaacgggtatcttttagcaaagcaaagggaaaggaggtatcataccaaggggttgaagaaagggtttaaccagcggattcgcatatctttttccaatggcttccgcatccctagttttttaactcctggtttcgggtaacggttatgggtttggcccccttcccttggcgagcataagaaccattcgtatacgttaggagcagaagttgacgtgggtatactcttcatttcatccttttcattgaatcccctatcctattatccagcaacgcccaagctgtcgatgatcacctagctcttgttggaagcaattgaagtatactctacatcaacatgggattgaaaaggtgagggcgtagcgagcgctagagctattcctacgaaaaggggagctattcctatgattcctagtatccgttcatcgatagactgtcctcgggcaagggaaatatactaacactattactcaacccataataccctttccaagggctcaaaacgggtctttgctacaatccaatccattttcaaacaaaagaaaagagcaagttcccacaggcgaagagctgcttccgagaaatatttatcttcttttaccccctttacgcccttcgcggctgctaacaatgagctaatacacaggaacggcacggctcctacaccgcttaactccaataacagaacctggtcccacatcccttgcatttgataatgaaacaatcagaatttgttgaattgaacatatttcaatctcatttcttttacgtggttttggcaactatcaattatctctttcctcggcttcctacacggatatagccgtaaacggtatctagtaggcaacctgggaactacattagcttagggggatcgggtagcgagcgctctcctcggcaaagcacatgattgagatttgaattattgtattgtgaataaaggcatgaaaggaatttaatagtagttaggtattaaaaagaagatctaattcaagtggtaaagcaagtatataatgatgataaagtccagaggaaaggaatattgtttcacgcctgcatagacaagtaagtctgccacgaacccctgtccctgccaagtagaaagctagtaagcaagtactgaacttcaatcctgcattctcactcttgtttttgtcgctcaatccaaagaaagaaataggaatacgaatcctcatccccaaagcctgggtcctagactactacgaatagaaagatttctatggatatcctttgtatcaattttataatgcttatcacctccttctgagctattcccacggtgcctgagcagttgccattgagaatgttgtggggaacgattgggtgacttagcacaagcagcgcgtaacaggtcctttgcagatggtaagtacctggatttcagaggcattgctagatgtgtcgacttgcgagacgagattgcggtgtagctcttgaaagaaagaaaaagaggggctcagtaacggcaatcaacggctcctcggaggcaacctagccaattgagtagagatatgaaatgacgagcgaattacccgattcctattatgctacgccccgggatagtaatagccttgtttcggattttctagcgatgactagccctttgacggctcctatccctagacaccggcccctggtaccaatactagagatttgccttggctgtagttcaaagaagttcttcggctttgggaagatgcgaaccttataccattgtccttggatagatatgaaccttacgcgggcagcggatgagcatatccctagaatacctgcctatcctacctaacgctgggttgaacctaacgctagagcgagtactacgatgcaagctccttttacaagcgatacctttgtctttggtgcttgagttgtcctcctagcggtgtgctcctcggtttcggaaatgacatattgaaccggtatctttagcaaagcccaaatccggcagacccctttgacggcatccctcctctaaagctgcttccttccttcaagcaacgcattcacgaaccaatacgtagtacacgacgtagtaaatcaattaaataatgcaatccgggttaaagaaatgaaatggttgttgccttctcggacaagaaggaaatatcactctctatctaaatgatagaagtatttaatcaaatcagaaagagccctgggatttgaccaaaacggcataattgaaagctctcgtctctgccgctcgcctaagaaaaggtatcgggttgctccgtgatgacgaataagcagcccagaaatgaggggaggagactctgcctccatagtataagttgctatccacttatgcttggtttgtgcttgaccacgaaatcttgcctcccaccatcatgaaagacagatgatgatgtcgatttcttactgtcgagacagcctgtccgaatccaaatcatttgacttcctcctttgcagtggcgaggtcgttgattcctataaatcaagatgttttgttgcctgcttctttttatgagccttctctcttggatggtattatccactggtatattgtgaaagtctctacaaagacgaaaggaccccatgccttctttgaaaatgatatccctcttcaatgcttccgctagccctagactcggaatactctgcttaagagatccccctctccggccagagaggatttgagtacaacattgattgcggaagatctttgttcctattatttcaaagcctaactaggcgcgcagcggtgagtgcgagctgctttcaagaaatgctggaaaagagccagtaacgctatcagtgaatagagctggtgtaaagtccggctaaagtaccatacagccccacaggtttagccacacattcacagagcatctaatccatcttttcccatgccaaggaaaaacaaaaaccaaatcacctcttagtgttgcttagtgctcatgtgcatcctactgggtagtcctaaacttcagtagttctatgaccactacatgatggaatttaggctatagtaacacaagttaaggttcccacagcaatgagggctttaaaatatactccctccgtccctaaatgtttgacatcgttgacttttttaaacatgtttgaccgttcgtcttattacaaaacttttgtgaaatatgtaaaactatatgtatacataaaagtatatttaacaataaatcaaatgataggaaaaaaaattaataattacttaaaatttttgaataagacgaacggtcaaacatgtttaaaaaaggcaacggagctaaacatttagggacggagggagtacctcccagcccttcatctctaggacgtcggactggtcaagcggtactatgcacccccactttggtataccctcctaagaggagtacttgacagtaggtggtgggtttttggggatagtatgactcggcccctggaccatgccaaccaagacttcccaccaggttttcctatttggggaaaattccagatatgcaagacgcatatgcatgcaatgcttaggtgtagtgaggtggtgtgtgcttattgcaaataggttaacccttagtttatacaaactacatttttcacaaaggaaagaaatgggaatgttggtgaattttcaagtcaagccatttatatttataagccaaaaacctttgatttaaggcttttattcccttgtggagtcgcgtgttgtacgcccgcattttggcaccgcttgccacatcatcattactttggccacctaagcaacccagtagaagaaaaaggggtttagagtcgccacctgaaaaatcactgaaaatttggaataaataaatggatatatatatatatatatatatatatatatatatatatatatatatatatatatatatatatatatatatatatatagtggctatcttccttcaagtgagagagaggatcgagaaaccatcgcccaaaggtgctttcacgaaagccggtctccgggggtaaagaacctttcttcactcttccagccttccaaaccatccactggattttcatgttcgtaagttgaaaggaatatgtgtgtgttgtatataaataaaggactttcgatttagcgttgtcatttttacgaggttttagataatccaattttctgtgagattactttcattttgactgaatcacttgaatcagttaaaggagacgaggcttctggcccagccagaggggctggagaggagagttttgaccgcgggggaggcaggtccagttaacggggagaatccgctaggctgaggttaaaaaaatcttccaaaactttttctttagagatagaattcctcccgagaacacacgaaacaaaaatatgaactaggtaaatagaaatggaaaagagatgtttccaattcatcacaaaatctaaagctttttctacatccatatgatctactttagtagattggtattgcccatataatgaaagcagatcttggtccatggagtcccaagaaggttggaactccaacctgtccgatgctttttcggccaaataaatagaaaagtgggaccagcacaatgagcaagctgcgcgaaaaaccgcttctttttccggttccgcaacaacttgggcgaaatggggttctaccgggaaaccatggtcgagtttttgaccttggttactggtcgagccactggataagaatctctggagatctttcctctccacttacttgtaacaggctttccctctgtataagacttcttccgaatggcataattgtcctgtcctattgacacctcgatctttaaagaaaactgactcctccttctcttttaggatttgattgttgttggtccttttttcagtaatgatctcaccatagtagttcgcgcgagggactatcttttctatcgcttgcttttcactctcaagacaacggtcggtctctctatgctataaagcgaagcaaagcgcatggcgctgaaagttaagaaagctcaaaaacacacacgaacacaatgcaaggcatagcataaatgagaccgctgatcattttgcttgacctttttctatgctttttttgggtgactcaccaaccgaccgagcagtgatcgatgacaaaatggtacgaacaaatcatagtcgttgaccattataccgtgctatggcacactactagatagattgtatggctccgttggtgactttctgatcacgggtttcatttgaaaaactccaacgccattcatcttgcgtccggtctttcatgcaagagttttatttttggccgctactacgttcgtcgaaaacttcttgatggcaccatcatctcattaccttatttttgcccttcgacttcggctatgaccaatgccccacctagctgaataggcgtaacaaagctacctgaaaaaggcaaggtgcaccttagattgaaatcgacaaattgcgttttgccagatggattctttagaaagattcccggataaagttcagtaaaatatttagttagaatctaaataaaggtgcatacgtgggcgggcagggggccccactacttcttcattcaggggggctagcctcatgacttcccactgggcgaggggtgcgcctaacccacctactcattcatcaattacggtgttcagctgacttgcacagaaagacccctattgtttagtaatttggcgccccatcttttttttgattgactgttgtcaactaatcttttcaatgttcgattctactctatgttagaacatttctgtgaatgctatttcgatctaagtggtcctattctctgtcccgtgctaggaagcattactcttcttttcattccaaattcttctataagactgatacgattgattggtctgtgcatttctcttattacttttttgtatccccttgttcctcggatacaattcgatccttctacggccaaatctcaatttgtggaaagccttcgatggcttccttatgaaaacatccatttgtatatgggtatagacggtctttcattattcttagtgatattgaccacatttctgatccctaattgcatttcagtgggttggtctggtatgagaagttttaggaaagagtatattacagcatttctaattcgtgaatttctaatgatcgtcgtgtcctacatgttggatcctctactattctatgttctttccgaaagtgtgccaatccctatgttgtgcggagctgagcatcttctattcgctgggatcaagcttttcctctgcaggggccttttgcagtaaaccccctacgggcggtcccctgtcgtcgtaaagtagtaaaggtccccgcgaagctttcgggaagaggggtagtcttgtgtgtaagcatagcatttctagtcgaaccaccgaaccacacatctttttttggtgggagggtactccgagtagtgggtacctcgtaggacctcgacccgcctactcaggtcttgtatggatatgcaggaaggggtgctcctaggtgtgtgtagggggtgtgtttgttcacgagaaaggattcctcgtcaagtcagggggagggggggtgtggacacacttgcgcgaattcgggtaacggctacaagggataaaaataaaggaaactgtacccgaccagggatggacgtaaactcgtaagctaccaagggtagggataatcatctaggtcttattgtttaaaaaaaagccgccccgccacagcaggcaggttagttcctctgtcgttgccagagagttcttggcgaagagaccttaggataagttgctaaaacaaacgggggaggggggggatcgacccgttcagtagaattccgaagaaagactgttggcagcaggtggagacatttctttggcccccttccaaataaatgcgggcagggtagagctcggcggagggttcgagaatagggtagggtcctgtcctaataaagaaaatcaagataaataaaggggcgggtccctttatgcatgcatctttgtacaagtggaggccggaaagatcaaaccaatagaaccgctcacatcacagtagtcgtagttgcgtaaaggccgtcagtcagggggcgaccataacataaggcaatgactttcacagatctctctatcgttagatataacgaacgggcgggtttgaaaggtagggtttttgacggccctaccactagtcctgctagccttctttcgggcaggaagcagaccgggcccgacgagcgggcatctcccgctatgcaagcagcatggttcgccaccactcgagaagcaaaagattcgagagtcaaggcggaaaagacaagcatagtggtctaatgacaagggccgacgacggaagtctaacgtacagttccctgagaagggagtggctacccactggagctttgaccaaccaccaccggtcaattccgctttggggccacccttgactctaccatcattataggggtatggggttcgagacaaagaaagatcaaggcagcatatcagtttttcctatatactttactgggatctgtttttatgctattagctattctgttgattcttctccaaacaggaaccaccgatttacaaattttattaaccacagaatttagtgagcggcgccaaatccttctatggattgcttttttcgcctcttttgccgtcaaagtgcctatggtaccagttcatatttggttacccgaatcccatgtagaggcacctacggctggatccgtcatcttggcaggaattcttttaaaattgggaacctacgggtttttaagattttcaatacccatgtttcccgaagcgacactttgtttcactcctttcatttatactctaagcgcgattgctataatatatacttccttgaccactttaagacagatcgatcttaagaagatcattgcctactcctcagtagcccatatgaatttggtgactattggtatgtttagtcgggcagcggccgttaggtcacctattttgagttatggacacacaagcaaggccaaaacatgtgtgccgggcgtgcgacccatcaacctactagcaataggggggaaaacttagcatgtcgcaacaaaagcatcgattcgaggcgtcagcaaaacaccgccgtctgttcctaaaacaaaaccccttagcgccccggggcgggagtgggggacggccctatgcagacagcaacagcaccggctctacgaagtccgaattgaatcttttggttcccttgaataagaattgttgggcgcggcgaagcgagcgcttctagctgtttcgcttgcttctttcttattgtggcggctattatagcgtggctgaaatgaccgaaaagcgagatgaacctttcaaatcaattgatatagatggcctgatctgttctggtagatcgaaagggtatctatcaataataagggttgacctctttctatctattgatgatacaagatatctatctattctggatccatcagaaagaaatcgatatgtatctgatggagtctacatcgtatgtagagcgcccaagcgcttttttggccagctcaattctattatccatcggtccaatgcactggcgcatctcatgggggggggaagcaaatgtagttagttgtcttgttgttgttcgccgcctcgacacattccccggcatcgtcccacacagaaagaaagagcgtggagccccagcccgacctgtaagtccgctaacgtaaagtgaggagttgagcctgaactggcgaaccgaagtcactttcgtaaccatacttcctacagctaacacgtgttcggtccagcgggaacgcgcagcgcaaacgaacatgagctgctttaccgaatatcccccgctggccatcggggacctagtggtaaggccatgatccgcagtgcaggggaagggatcactcattcttctattggggacaggtgcacgaacgacaactccaaatgtcagacatccgtcacctatacctaccgtttaggtggcaccagcgagatccagctaaggtaaggaacttcgtgtcgcggctgctccactccgctgcggtcttttgaacagaacttcgttgccttcccgcgcgcgaaacgaatgggcgcagtgtcgtgggtcagttttggggcggggggcagagagagaccagaagaatgattcatttggatcaacgagccattcgcgattcagtagaatgtctctctatccatatctattctatctttatatgacgggccataaaaaaaagaagtatttttttatggcatgtgagatgatcgcgcctagtagccacatatcagctgcgctcaatttgcgggatttccgttggatctgatctttcgctttgacgaattcggacctagcgaatggaccgtagaacggaaagcgccttctaaacaactcggtagaagggaaggggcctatgtatttgcatgacccctgcggatttgaccctacctacacccggagccaatcccctagcggtcctgccaccacgccgcagaacaggagctcgtgtggaaccttggatttctggcgtaacagcggtggaagttataaaaatattacggccacataacataggggcctacgctaaggtcggccaaaatatggacacccgaagggcctggcacgcacaatcctatcctatccgagcccgtcattgcatgcacttcggacagccgtctgtagcatcataaagagcacctccctttcgaggtacccaaatggaacgggctttatttgtgttgttggttggtctttctcaacgtggtctatagcacgaaaaaccattctttacaagatagggccgttcacatgaaagataagaaaaaaatccattcttcatggtcgggcgcatttctccaaatcctccaggatcacaagtggaacgctaagcaagggtggggaggctgcgagctccatgtcgaacagaaagaagcaagcagggggtgttgccatagcgtgtcggggagcaagcgtaggcaaccaaactaaataaggctaaaaaacaagtagctagcgtttttaagctggctgccttttctagcgcgcgtactcttctgtggagtcgcacggaacgagccttgtcttccctccaacgactagctcccttttcttgttccggtcacccttctcttgccgtggaaggacttttgcctgtggtgtggtccaacccgtgggcggagtcgccctcatccccccattgctcagtgctccctgcagcttcgctgggctttacccgcgtggacgcgggcttctataagagaatgaaaagctctctctttacaataaaatgcgaaccgcgcggagcccacccttttttgttttctgccgccactgggtggccgctggggaaacacagcccggccgcctgtcgggaaaggggggtggggggatgggcctacctatcctgagggagcatgttgagaggttccatatgccgagccaaagggcagaacttcagtgcgtgatcgtagtatgtcacctcgtctcgtcctcgcagcatcgaagagtacttatgcactatgttccgattcactgataaggaagatagagttggggtggaggtctacaatgtgatactatagtatagtatgccccggggggaaagatgcgcaactcaaaacggaagcaggaagcgtgttgtaaaaaatgtcggaggttaccagatctctgagactaccatcgatccgatagagcggatcgaccagaaaagaagtggagttagaaagccgtatgataggtggtaactatcttgtacggttcggagggtaagcggcgtactctgggggaatattaggctctatcgaacatacagggaattgggggtagcattttacttatgttaagtcatggactggtttcttcagccctttttctatgtgttggtgttctatatgaccgacataagactcgacttgttagatattatggaggtttagtgagcaccatgccgaatttctctaccattttcttctttttcactttagccaatatgagtttacccggcactagcagctttattggggaatttctaatcttagtaggagctttccaaagaaatagcttagtagccacattagcagcgcttgggatgattttaggtgcggcgtattccctttggctatataatcgtgtggtttctggaaatttaaaacctgatttcctctataaattctccgatctaaatggcagagaagtttccatatttctaccttttcttgttggaggggcgaccgtccgttgaactaccaaaaaagggtcaaccaatgtgatcatgacattgtaggtgcttgcgatgggacggatgcaacttccctcataagtaatgggtggcatagcccgtagcagaagtcccctttttttatccattttttattaccacagaggggcccgccctggtgggaccgagagaaagaaaggacgggggaggggggggcgaccatacatggcaattctcgaccgtgtctccgagggacagttgaacgagcgactcatgaatgcgtccgggtcggacgagccaataactcgaacgtgttcggtcagttttttgagcaagaatcacagcgttaccttaccttcaccatgatacggactccaagttcttatggaagagcacgaggagtttccttcaatatgatgatgagaatggaaaccagaagcacgactgggtcttcgtagtctgggatcaaacttatatatcagtcacagtaacgtaagcatgagactttttggtagtaccggtgaaccagatggccgcggcaagggaatctgggatggaggactcgtaatatctctatagatctggcaaaagcgaaagacccctaacgtcaggggctgaccactgagctcactcaggcctcgctgggcgggccagagtgggtgcgaactggaattgccatagcttatggttagagcaat

SEQ ID NO: 23455 - DNA, 2605 bp, Oryza sativa
acactctcaacggatcctccatgcgctgtgttgggcataccatagttcttccgtgcgtctttatcgtggcggaaacagaacaagagggaaagacccggctgactcgcccagggctcgagggcgagccattcgagagtgagtcgaattctgtttacgttctcggtttggtttgggcccctctcgatcttttgcgtataagggaggggggaaggagtctaaatctatggacattaatgaaccaccattgatggacgttgcacatgacacgatcaattcgacttgacggtccggtgctaatagaagtcgcttactctccgtctagcgaaggtgccaggggcagggcttttttgtagtaatagtgggtgggtctcatgggatttcatctatgccggccgtcagaatcaaacgagggtcgaaggaccattcgattcattaagggggacggcccatttgtaaggcgggggccctgatggacgacatcccccggcctcgattcttttgcatagtctgggggccggccgcagcagagctgcagggcatagcggcaccctcgcctggcgccattctcggacctagcagcagatgggcgggccgggcctgaatgaagagcggaccacgcactcagaccggaagatcccagttgtcctggactagacaagtacgtagagatcttcgtggaaccgaggagggagtctcaatcgatcttttctaggattcaaactcacgccacgcacgaagatttttctattgatagagttaagggctcggctcccctgactctaaaaggttaggttactaccaacttgcctctacggaagaggtgtactttgtattgtctgggggttatattatgggacggagtacaagttgaagaaaaaaaatattaagtacatattagttatagctaagaaacggtgatattgtttttcatatataacccttaaattgatacccgagatcttctatagctgctgtagtagatatatccatttttgcagtaaattaattattaaaaaaatagggcacaatatagcacgagtagtgcacgagacaacaaagaaattattgatgaggtagctagctttaagctgttgtgggaggtcatcgcctcaccaactgcatgctaaatatatcgatagatatattatgctttgttatattctgtcttgcctaaccggccgcatctcccccttcctccactcactttaagcatcgatcactgcttggtactactacgtcgcttaatcacttcttgattcctttgctaacctactactccactacttggcctgccacagtttgatagctagcttagctagctagcgatcgatcgacgtcgtcgttgatccatcgccaccggcgccggcggcgatgtgcctcccgttcctctgcggcggtgacgaccccgtgaaaaatagcgaggtacggccgccggcgaggcacccgagagaaggtccaaacgacggcgacggcggccacaagccatcaccacctccgcatgccggcggcgccgtcaacggcaacgggggagctgctccgcctgctccggcgacgtcgccggacaccgaggtccgggcgcccacctatggcgataaacagatcagtcctccgaaggaaggcgcagctgggaagccgcctatggtggtcccggcggcaaatcatccgcaagctcccaccggcgaggaggctaagaaggctcacggcggcggcggcgccgtcggtcgccgcaatggaatttcgtccacggtactcacggcgccgccgccagtgggacccatggctgctccagcgacgacagtgaaggatgctcctcctgctgctgctgctgctgccgccaacgacgtccatggcgatgctgatgagcaacaccctggctatggtgatcacggcgaggtcgacgaccgcaagcctcgacgcagatcatggttgtgaggtgagcaatggcacgcaactacatattggctgtgctgtgaattgtgatcctcgttctttatgcatatgccgctctcggcgctgctggctggtgatcaacgatgcatatatacatatgtgctatatatatttttacaggtttgcaaaaaataaagagacattagttgctaattgttgttcttgtgccctaactagtttgggtgtaatattgtgttaattgttgtattttagtatgtgcacttgtatgggtgttgatgaatcatggacatatatcagtattgcatgatctcgattataatgcagagcaaaatctgcaaatttgttctttttgttttatggaaggatgtaaattaatcttgtcaacttccatctgtttttgtattagttatctgtgtttagtttcatctccatcatatcattgacgacgatttaatcgaactagctaagcttgctaggcagtagaatcatggtctcatggataactggtggagaaaccatctttggtcggtcgaccagattttacaatagttccggttgtattaaaaaccggaactaaaaatatctttagtcccggtttaaaagctatagggtactttttcaatctttagtaccggttggtgttaccaaccgggactaaagatctatttgtagtcccggttgataacaccaaccg

SEQ ID NO: 23456 - DNA, 5561 bp, Oryza sativa
cgctttctccttctttttttttaagaatctgagattgttgtgtgatgtatttgatttgtgtgtgatgtgaatatgtgatgaattttgtaaaagttgtgatgtaattttttttaagattttatgatgtttttgagtatttgagatgatcgatttgtggatttggagacaatttgaggatgattgatttgggattttggggacgggatggagtgaaatcaatatatttaaaaataatgaagaaaagaatataataaaaaggaacgggaaagaacaaccggattagcctctttagtccaccaaccggactaaagatgctttatctttagtccctgttagtaacaccaaccgggacaaaatcgatttttaccctcggttttttcacccgggactaaaaataacgatatttagtcctggattcgtagtcccggttcaaaaaccgggactatagggggttacgaaccgggagtaataaccctttctccaccggtggatatttaacaacaattgtgcatagtggtttgtgtttatgctcgtgtggaccaacggaatatgttcccaagccaagatgtcacaaaatgcatgactctcactcgtttggatgagaaagaacctcttcccattctcttggcacattccattcattaatgtaggcaattcagaaggaaagaggagggggggtggggggtgggtttaaaacgtgatcgacagtaatttgcatgtttggtagacaacgtttctcaattaggaaaggggaacagataatgtgctgtttaaaatataaaaagtgcaccttttgctgaaatcttactactctcgcgtttcatattattagttgatttaacttttgttttagtcaaatttatttaattttgatcaaatttattaaaaaagaaaacaacattttcaatactgaacaaccatactataaaaatatatttaatgtttcaaaactaatttagtgttataagagttgctacatttctcttaaattttagtcaaatttattgaagtttgatttagaaaagaaagaaaaaatcaaaacgactaatcctacatacttataaagttcatctccgctaagtgtagttaatactatttctcacttctctcattaagccacatcacccccaattatttctagactttggatgattgatttatggtctaaattatctcttctttcttctctcataaaaacatgcaatctcaattatttttaggctcaaaattgtatcaaattattttagctttgatagtaaaactacaatttatttgtacatattatgtaacttaattttccgcagcaacacggtggagtattcatctagtagtataaagcaaaggagagtatacagctagtactccttcgttccatattgtgacttgtggtgaggtcttttagttttgtccgcaaaaaaataattttatcaagtttatgaaaaaatacatcaacatctgtaatatgaaattagtttattaaaattaactatgaaatatgtcttagtagtatacttacttggtatttaattactttttgtacaaattaggtcatattacataacttggtcatgttagagaacttttgactttagacaaaactaaattaccttacatggaacagagggacaacaaaacgcaaaagtataacatagagtcatatatataaaagcatgcgtaggtcatggacattaaatattagttgatggccaagacatgacatttatatctaagatgtgatgtgagataagaggtatctatactatctttatagttgatggccagtaatatagatggccaaatgggtcgctcggcatggcttggcccgagcacaaccaaggcacggcccaaccaacacgatgtgccgggccgtgcctaccccgcaccaacagcccaggtatggcccagtcaggctcgagccgtgtcatgctagccagaagacacaattagcccaacgggcccatgccagactaggcaagctaaatctgagacaccttgtacatctcagttttgcacaacaaatgcaaagatgtaactaagttacaacaaattcattcataattttcacaacaaagggaccacatacatcacaattcaattattcacaacttcacaaatctacacaaagccacaaaggtaaagatgaaagtagaacacatatttcattgataaagtaggtgtaggtgtgtagtgcaatggttgcctcgttaaaaacctttcgaggtaaaaactcgcacctcatgagaaaaccctagaaaggaaaagagtacagaccacagctttcaaatgttcataataaagtcttacgagtccaattacagtcatctagtgtttacatcatcatcaagatacaaattctcaaagtacttttgaagctccatattgtccatggtatgccgagcctttgcatctccgtccttgagcaatgccatcacttgcaccatgtatatcaccccacttacattttcatcctcgctccgtgtaaaagagttaacccgggagtgatatggttggaaggaagaggctttataagttggttccacccttgcaaaactagcaaggtggtattaaacatgcgcacacagctctcatggaccacacaagcctcatcctaattgggccaggatgtcacaaccaactggcaactgaatttgtttcttttgcagcaataagtcaaaaatcttgtcggctttattaatgtcaaagtcatatttctcctccttgtttgtatccttgacccattgacacatagttgtcttcttgaccttagaccactcggccaaactgatttcaaggtcttgatcatcatctgagtctgaaacacaactataaacatagttgaccttcttgaactttttagcctcctggaatctttgttcatgagccaataccttctgaacatggtgtgctaaactctcaaagtcttgtgatgaaaatttctcccttatcggcccaatcaatccctggaaagccagatcagccagtggtgaatcagccaaatttaagctaaaacatctattccttgtatctctaaatctctaaatataatctggaaacgattcattagccttctacctgattacggtcaagtctgataacttcatctcttgaacaccgctgaagaagtatttacgaaattgtttctctagatcatgctaacatctgatagaattgtatggtaaagaagaaaccaagtgaaagccgatcccgataatgatagagggaaaaacctaattctcagagcctcgacagccgatgcttcaccacattatgccaaaaatggctaatatgctcatatgtagtcacattatcctgccctgaatactttgagaagtttggaatattgtatcggtttggcaatgacactctgccaaaatattctggatatggatgccgatacatgatcccactatctttaggcttaatcctaaattgttcccttaccacatctacaatcatattggccaaaggttgctgttgaactcctccttgatgttgctgctcatactgattatttattggttatgctggagtttgaacaaaaggaagtgtgtcctgccgatactgcaatggtgacagcggttggaattgattattgatattgaaccttggatttttctaatactggaaagcattagggttcgtgttgcaatacttgtagactcttgccatctactaagacataagtgctaagcctaacatgatcaccctaatgcggaatccttaggttactgaccgttgtttgaagccattgatgctgtttcccttggttttgtcggtgtagaggtagtagtggtagcagtagcagtgtgagaaccggcttgatcccgaaggggtcgccggcgatcacctgcggggtagcggcggccttccggtcgccacctacactgtcccggaaccaccacacgttgtccctccagcactcaacttgatcggatagggttttgggaattttcggggagaagatgatcgtggagagatcgtcacctatccacgacaccggcctcccctattagtatagcgccgagggagatcaggggcaatccaaattatggaaggatttggcgctaccgatcaatgcgcgtaatcacgtagttttggaaattgaatcgcgttaatcctgggtggaaaacggcgtcgagattttggcaatgggtggaaaactgtcgtccgagatttcctctcgatttccatgccgagagatatattttcctaacattctcccccctgatcttgaggctaatgagtttattcttagaaaaatagatttactaaggcaacgtgtcagggtagtaatcatatcctaccaagacaccggtacctatagttcactataaaacttcgaaagaactctatctaatcttaatgggagttagttaggactaatgcccctatttccaggatcttagtcttaatcaaaggcaatcagttattcccatgccggctacatgatctttaaataaattgggaggtaagcctttggtgagcggatccgcgagcattgacttagtgctaatatgctggtttgatcctggattctatctttcacaacatgatacttaatgtcgatgtgtttggcagcaccactcgacttgttgttacttgaatagaatactgcagctttattatcgcagtatagtgtaattggtctagaaatgctgtcgaccactcttaaacccgggataaaattcttaagccatacggcccgccccgttgcttcataacatgccacaaattcagcctgcattgtcgacgatgcagttaaagtttgtttagagcttttccatgaaatagctccgtttgtgagagtgaagacataacctgatgcagattttttagtgtctacacaacctgcaaagtccgcgtctgaataacctaggacttcaagttcttcagatttcttatatgtgagcatgtaatccttagtgccttacaaataacgcaagacctttttaacagccttccagtgatctaaacctggattggactaaaatctaccaagcatcccgataacaaatgctaagtctggacgcgtacagacttgagcatacataaggcttccgacagctgaagcgtttggtaccattttcatctgatctgattctaatttatttttcgggctttgaaataatccgaatttatcgcccttaactattggagcaggtgttgcagagcacttactcatattatatctttctagtactctgctaatgtatgatttctgagataatcccagtactcctttagacctatctcggtgtaattcaatgcctaaaacataagatgcctcaccgagatctttcatatcaaaattagatgacaaaaattctttagtctgatgcaacatattaatgtcactgcttgctaacagtatgtcatctacatagagtactagtattataaattttccacccttagtcttaatgtaaatgcaattatccacctcattctccttaaatccgaatctcttaattatttcatcgaatttaaggtagcattgccttgacgcttgtttaagtccatagatagatttcttaagtttgcaagccaaatggtccttgcct

SEQ ID NO: 23457 - DNA, 3007 bp, Oryza sativa
gatcttctaagtggttcattttcgatcactgacggttgagaaggttcttctataatttcttcattttgtgcctcagaagtctgttgagtgtcattatttaattcattattattttcaacagaatcggtatcaccagaattttcatctggtgttaccacggtatgagtcacgggtacacaacatgaggtaccaaatttattggaatattattttcttggatttccggtgtaacattagcccgaatttcctcaagattaatttcccttttctgtgagctcccccagaattcattattttctaagaatacggcgtgtctagattccacaaatttagtgacacggtccgggcaataaaatcggtaccccttagatgtctcggggtatccgataaaatggtagcttacagtcttaggatctaatttctttagttgtggattaaatattcttgcctcagcacgacagccccacacacgcaaataatttaatgtcggttttcttccggtccataattcataaggtgttttgggtaccgacttacttggaactcgattgagtatgtgtgcagctgttttaagtgcctctatctataaattcacagacaaaatagaatgactaagcatactccgtaccatgtccataagtgtacggttgcgacgctcagccactccattttgttgtggttctctaggcatggaatattgggcaattattccatgtatctgaagatattgggcaaatggaccaggactttgcccataaggagtaggtctcccataatattctcctcctcgatctgatctcactactttaatttttgcattatgttgattttcaacctcagctttgaatattttaaacttatcgagtgattcagatctatctttaatggggaaaacatatccataacgggagaaatcatctgtgaaggtaatgaacgagtcatatccatcaatagatgttactgggaacggtccacatatatccgtgtggattatttctaatggacacgtgctcctagtagctcctttcttaattttcttagtgaattttcccttaatacaatctaaacaatgatccgcattcgaaaaatctaagggttgaagtatctcttccttaatgagacgctccattctccccttagaaatgtggcctaaacgacagtgccacaatttcgaagacgtctcattatcattacaggcattcaatatattcataatatgatcatccaaagagagcaaatagagcttgtcttgcacgctagcaagaccaatatcaatattattatacttaataaagcatttgtccttagaaaaattacaatcataatgtcacgcccggaaattcactaataatttccgaactaatttgtgcatgaaatcctcgtccaggaatcagccgaggtacacaaactgacaatttaatatacaaatccatcataataataacgttacatacttacaaaagaaaagaaaaacagcagcggaattaacggtctagcgctggcttcagctccactcccataggcagctcaactagggtataagccaaacgtcttctccttctggatcctttatcttcaactgaggtttgatgattattgcaagaatgagcatatgacatactcaacaagccacacagcaaatatgcaagtgcacaaggattccaaaggatggcataatataggctcatttgcgaaagcagcatttagcaaagagttaagagtagtaaaacagtagattaattaatcagaagttttaatcaacactgaacagcacacccatgctgtacaggcccaaccatcctgaacaaccatacccggctgaacagatctaactccaaaccaggagctaagcaaattattaccagttattacatccataattattgtgaaaggtgtgagactaatcacgaaaaacattgctcaacccgcccataaccgcgggcacggctattcgaatagttttactctggccagaggtgtaccactgtacccacaagacacgattccacacatgttgccatgccccgaaataccaccacggcattgcaaagggggaaatcgtgacaataccctttgcacaacacaactcaaaacagtgcaccgttcctggatcataatcacccccttataaacaaggcatggactccccagcgacccccgtggacttctcgccacttctcagtctggcgcactataatgaaccatgctatacaaaggataaagccgttgcccacgctggcttgtggttggtacggttaatgtctcacaacagtagctcgcgaaccggtccttaattgtcatgagcacaaccatcaaaaccatatgctcacaacccaccttaaccaggttttaattatcaattaattaacatcacacgattaaccatcgtgagctaccattaaatataaccataaataataatgtagtatatatgattcatcccattagtgagctaatgtttctaagcattgctaagcaattatatatataacttttagctgaaccaaaccaatacataaggttcaagctaatcaatttattacccaaggtatcaaggaatagggcattcaatgcaaattggccataacaaaggaataggttcacaccacccggtgacattcgaaaataaatgcacagttgaaataaatagagaatttaaatataggatcaacatgctcaaaggattgtgtttaggatctgtgtgacttgccttgcaataatcgatcttcaattaaccttcttgatcacttccgacgcactcacgaaccttcgcaacgacggaaacgacaagctaacacgcaaaacgaagaaaaagactaataaaaaccaaataaacagtacataaaaagtaaacaaacatgtagatcataattttagatgaattatgagacttgaacggcctcattccgacttcaaatgaatttattatgaattttacaagattaaatctaattaaagtccatttaaaaagacttaaataaatttaattcaatttatggacaatttt

SEQ ID NO: 23458 - DNA, 8610 bp, Oryza sativa
  unsure (1)..(8610): unsure at all n locations
gagctagggaccttggccgggtgattggaggacacctacgcgtagaggacgacgaggcgaacccaacggtactcaccacaacgacaaacgacgaacgatgatggccggcgacgaagaggacggcggcggcggctcggcttgacggcgacggcggagctccggtggtcggcggcgaagggggacgggcggccgaggttctcctcaccacggcgcacctaacggcggcggcggcaagcggcggcgacgacgcaagcgacggcgcggcgtggctgaagacggccggcggcggcggcgaactaagtgcgcgcggcggcgactctacggagcacgggagaccacgggagatggggcaaacgaaagaggggaactagggggtcctatttatagccttggattgaagagatcggactcctcccgcaagaaatcgatccgagaaaatcaaaactcggttttggagataaactcgaaaacgagtttgattcgggcaagatactcaaccatttgctccgattattgaggggaaagatagaggaggacgagaggataaaatcccctcaaaaacccggaagaaaaagagccggattggagcggatttgagggagaaaaggggcggctcgggcgacggcttgggctcggccggccggctgctagaggaagaagaagggcctgacatgtgggccccacatgtcggtgcctagagggaaagggtttttgaactttttcaattaaaaaataattcgtgaaatgatgtttcatttattaaaaatacttcccttgctcaaacaattcccagaaaattctagaaaatagaggaacaagcaaagtatttaataaaattttatctaacccaattttatattgagatttagcacattaaaattagatcttctcttttaagcttttaaaatcatttctaataattccttttaaacaacaatttataatttaaggattttaaacaagaaaagcacttaacaattataattagatcattattgatcaaataattactgaactgttctctgtatcatttacatttaggaattgagctccgaaaaatccgagaaaattccagagagtataattaaccatggagaatttaataaaaattaaatccacccatgctttatatttaggaaattttatttcccacatttaacttcacttgtaaattaatgaacatttcatataaattctattaataatttattaaataatttataaatcctaacacgaaaatcagggtgtgacacataaccactgttcgttaaaaccattacagaaataaggttcctcttaacagagggagcataaagaacatcatgaagtaaaagattattgccgcttggaagtcgaagatgaagctccccaacggccatcactttaatttcagctccatcagccactcttaggatccgctccccctttcttagcgtcctcatggaaaggaatccctgtaatgagttagcaacgtgcacagtggcacctgagtcaatccaccatgatttatgagaaaattcaacataaagtaattcatcaacattagagacaatgtcaacattagtacctttcttagcaagccaagcccgaaagccttcacagtccctctgtgcatgaccttctgccttgcaaaacttgcaaaggaacttaccagcagaattttgtcctgctggaacctgagctttgcccttatgggcaccattagaagcctgagtggaaggagtgttgggtttctttttcttgttttgggagttgctggactccccttgatagaactttttcttgccgcctttagcaccatgaaggaggttcagctgatccttatgcttctgtttgtcagccttctgacgatcctcctcctcaacagaatgagaaatgagttcttcaatggaccacttatccctctgattattatagttaatgatgaaagactcaaaatcagaagaaagtgaactcaagataaaatggactagaagatcatcattaattcccatgtccatactcttaagctctccattcatagcacccatctgtataatgtgctttctcacaccatctttataattatagcgcatggacgttaggcgcttaattatagagctagcgtaagacttagaagaactcctgaagttcctattaatattttctaagtatgtcttaacatcatcagaatcctcaataccactaataatgacagttgatatgacactcttgatgtacatgagagaaatcctattggacttctcccattcattagttttctcacgatataacttcagtttctcctcataatcgtgctcaacactaaaaggctcctcaggatggtcctctctaatggcataatcataatcaagtatgcctaagttgagcaacacgtcagccttccacttagcataatttgacccatcaagaggctcaatgagtcggatctgaccaaaagctgaaaaatcatgaaaaaatatccgtaagtacatatatgcaattaatttgcgttggctcaattaattacataattaaacaaaaataaattcccctaattacatcaccgttgggcagaaataattttgggaaacataatcataagtaaatttacgtgaatttataatcaacgttggtcagaaaataaattcatatcatggaatacaaatatctagacaaatttctcgttggttccatttagctagaattaaattaataagcctccataaaaatttcataaattttcagcaattttaagcaatataaatggtactaatgcaatttctgaaaaatacttaaaggtgaattggaaagaaaaaaaatatataatatttgggccggcctggcgcgtgcggcccatgatgcacggctcggcccaacccggagggcgcgctgcggcctgctaatggcggtggcccgatcggaagcgatccgagccattcgcttagatggacggctcggatcgattaatattagtaaaagagaaaaaaataataaaaaaaataaaagtgccggctcaaccctaaccctaaaaaatttccccattcttttcctctctctctctcccgaaaaagcggcggcggcggctggcgatttcgcagtagcggcgagagcgcaaggcggcggcgcttgcgaggcgacggcgcgacggcgcgggaggcggcggcacgcacgagaggtggctgagtgcgcgggaagggcggcggcggcagggcgcagcggcaacggcggtggggcggcgcggcgacgacgcgcggcggagagggccgcggttctcctccgcgcgcagccagggccacggcggcgagcctcgacctcgcgcggcccatgggaggcagggcaggcgtgaggccggtccaggacgacggcgaggacgtcatcgagcgcgcgggcgagctgatgccacgcgcggcgacgacaacatgttcataatgccagtaagtgagtttctaatttggggattttagtgttctaatcttggggaattttgtgattagggtttttgaaaattttggggaaatttggggattgttactatccgccgaaattcacctccttctaatttctacccaagccttaaacgattaaacaatgtaaacatgaactaattagccttgagcagtggtaatgaaactttaacccgagcctaattaatcattaacagaacatgatcatgaggaaattttcatcaaaccgaaagcaagatcatggcattaggcttcaaaatgggatgatgggatctgaaggcttaaacattggctctgataccaaatgtagactcttgccatctactaagacataagtgctaagcctagcatgatcaccctaatgcggaatccttaggttactgaccgttgtttgaagccattgatgttttccttggttttgtcgatgtagaggttgtagtggtagcagtagcagtgtgagcaccagcttgatcccgaaggggtcgccggtgatcacttgcggggtagcggcggccacactgtcccggaaccgccacacgttctccctccagcgctcaacttgatcggatagggttttgggaattttcggggagaagatgatcgtggagagatcgtcacctatccacgacaccggcctcccctattagtatagcgctgagggagatcgggggcaatccaaattattgaagttatggaaattgaatcgcgttaatcccgggtggaaaacggcgtccgagattttggcaacgggtggaaaacgtactgccgtccgagatttcctctcgatttccatgccgagagatatactttcctaacaatactatgggccgattgtctgagatccaatcagctggtgtgaagatggctgagtttgtggaggaggaattaatggtggctggcttgtaatcagctgagtagccaatggctgtgtacttccagaaaattgtgttatcatgaagaattgagccagctgctctgttatcatggtgcttggtcctaaagtcccggatgccgatggttgttttggttgtaatgatcctagtgctgacatgaagtttccttgaggctgaccactcccaatattagtcttgatttctctatacttgggaaaaacaccacttggaaaacagattggtcctcctgtcttttcctcaacaattgatccatcaaccactgacttgatcaaatttgacaatgtattgaccaaaatgccagattggttgattaatgcatgatgcacagctgaatcaacatgatcttggaaagtcaccggatcaaatttaccctccttggcatcatcatcctcttgacttccctcagtcttgacattctttgttctagatccttcttcttcttgccctggtgattggaattttgtcttctaaattgcttttccttgacgggttacagaaaaagtcttgatgtagttttctctcacctgttgcatcacttgttccatctctgccttttgctcatcagttaaattttcaactgtagcagggataacgttttgtcaacaacatcagttattgagtgtgatgacatgattgaacaatgaaacttgtcccactaggcgtgccaaaagcgtgttgatgagaaaacacggtggcctaggagatctgcttagctccagtgaaggtccaaggctagacttgagtgtatcaagggtgtgccagctgatttgatcctgcaatcaacaagaaagacaaaaacaaagttagtcagtcgatagtcgatcgaccgatagcgtatcgttggtggtctcaaccgatggagttagaccaaatcggctatggactggatatatcaaagaatattaaaccccaaatatcatcggctgtaacactgtctatcaagattgatgaagaagcataagacaatattattaaaatagccaatacaacaatatttggagctagaaagataatgtactagctaatactctagtacagatctatataggcaaatcaacctatagtactataccaaatagagctcaatgctgtctatatagatgacaaatatacatgaaatagataaagaaacatgtatattgggtaagatcggctgaaagctcgatgctacccctacgagcaatccagaagcaggctagagatcatgattctaaacacgacttagtaggtcgaatgtactgatgcaacactaagtatgaaaagaaacataatatctagacaatcaagccgtagactgattttcagggtggtagatgtctaagctaatctaatctaacaagacgatttagtcgataccggcggaaaccctaaagcgagaagcagccgatagagctaaatcgatatgctaagactagattaacagagacgtatgatagcaatggtcatgatacaaggactaagatatctaaaacgacataatagccccgatagcataagccatcaagatgggttaccgcttgcgaagcgaactcgtcgaaaagtaaaaacgaaaagggtggcgatgcgccgaagttgtattggattgtgccccgtattacaatgctaggagattcatatttatacctcaaatacagactcagtctattatggacacgactcaaacctttctaaagataaaatacaaacaaaaccatatacggcggtctcttgccaaatctaacacaaactgatgtaactaaagatacaatttccttaatcgagctctctctctaattggcaatgacagttattctaatctaggcccagactgagcccaagtcatactatatcgactgtatcgaccatcggctacatcaaccttgatcaactcacactttatttcctgccgatatggtgtccagccgatgtgcagtctgactccaaattcaactcgattccacatcaaaactactttgatcttcttccttcttctctgaatctgatgcgaaattccgttgttaacaccatctcttagttattaatagttctctatccttatagtgaacttaagtttgtttactaatatttattgttcattttttaactgttcgatcaccgcatgaagctttcatggccgaggaaggtttcttgtggcttgatttctctgatctccgagccgtctattgtcgggaaaggatgaacgcacatttataacacaaataaatcaatagtatacgtaagcttgtgattattattaacaagcttcttttgtaagatgcaatacatggatgctgagaagacaaaggaatctatcggatacctggatcccagaagaatgtatcaaacacagcataccatgacgctatcagcaaactccgagtagcataaagacaagatgcctaaagagatagcggaatacaagaagggctttcacaagaccaagttgcttactgtcgcagagtacattggacgagcctactgggtgccatgttcgaggagtcgtagcgcgacctcgtcgacgaggggttgatcgacggcgggagcatggacagcttcncatcccgtcgtacgccgcgacgctggagcagnnnnnnnnnnnnnnnnnnnnnnncggttcgtttgccgtcaaccagctggagcacgtgatgggaagccgtctagccgtggacgacgacccccatgaccgccgtgcagtcgggccagggtggcgaacaaccagcgatcaatcttccggacgctcgtcgaagcgcacatcggcagggcgctcgccgatgagctgtttgttcggatggagaggcgcgcaggagagctcgccgaggagctcggggacgagatgggggtccacttccacatcgtgtgctcgctttcactcgtctgacgatatctacatcgtacactgtcctaataatgaaaaaatatattcaaattttgggcacaataatttaaatataataattgtatttgctaaataagtctgctggaaatatggtcataaattggcatattttaatttagaaaaacaaaataataaacatggcatgcgagtaggaaatgatcaagtgctagtgctaaacataaatatgctaagggcaagaaaaaacatcatctacaaacatgtagaagggctttgttgctcaaagacaagatgttgttgacagaaaacacgaggcctgggagatatgcttaactccagtgcaggtccaaaactcgccttcagatgtatgagcgtgccagtcgatttgatcctgtaatcaacaagaaacaaagacaaagaaaccgtggttaaatccataaatgatagccgatcggctaggtgccgatgacatatcatttattttaggccgatgtcatatgtgcatcgatcggcaagtattaataagcaaatcagaactaaatctactccatcggccgtagatattaatgatatataatccttgtatcaatatatacttaaatcaagtgattgggatagatcggtcgccttgccgagacagtataaatcacttagatcgaaatatgtattaatagtgaggttatatatattcatagcatagccgattagatagatctagcgtgtataggctaatactccgataccactctaaattaagatattaaagcaagtagaatataccaaacaaaagcctaatatacttaaatgcaacaagatcttaatataaagggcagatttaacatgtcaatcaagcatataggataaaagtagttaaatcaggtaagatcggctgaaactccgatactactctaatcggcaaccagaaggcaggcaagatattatggttctaagcacgacttaatagatcaaactcaactgatgcagcattaagtatgaaaagaagaataatatctagtcaatcaagccgctggttgtttcatggagtggtagatatcttacataatctaagccaacgtcgctatttaacctaatcggctgccttctaataacagatgctagccgattataggttagatgatgatattatcgaagattatatgagatatatgataactcgacgaattacataaacaaggttagagtatcgtaaagatggaagcactaatcccgagaacacaagccgtcataacaagttttaaatcttgttgaagatcgaaaccgatgcagctcaacccgaaagcaagaactcgtcgaaacaaaacgaaagtaaaaagggtggcgatgcgccgagattgtattgcacgtctgttattaattacatagggctcagggtctatttatacccgagaattacaag

SEQ ID NO: 23459 - DNA, 15759 bp, Oryza sativa
ttaatagatacaattgccttcccaggactctatccatgtatggcaatcatctcaaagcacatcaattcaaacccgatgtcggatacgagtcatattgtcggaatcggctgtatcacttaacccagtctgactcggtcttagccgatctcagtcgtagccgatccgaattccagccgattcttactctgcttccgtgataatcctcatcttcgattccgcttcgatctaatcttcatctctggtgctgattttatcaaatttggtcgttaacacatgccccccaagtccgcgatatttgataatgttccgaatttgccgtgtacatactctgaacaggtttcgcactttgccgttttccgaccgttattcaagcgctttaaatactaactgctgcccccgagaaatctcacaccgttacttccgttttcaccgcttaagcgaaacactgccttctctctctccggcgattcctccgacgcaaaaagcgatttccaggcgacttcatctccggcgagatctccgcccgcagcgatgtcgtcctccaccagcccatctgtcgcgccatcagccgagtatgctgaggtaagttcccattggctagatcccctttcttagcagcagatcgattttctgttgtcttatattgctctcctcttctcggttgctttggatttatagcatctctccaacctagttgcgattcccagcctatcgcatgaaaactactactttctcggcccagttggcaatcctgatcccaccgagttcatcattggtgaaaccaataggattccctttagattaaccaaccctgatctaggccactggaagaacacctttaaatcttggccgtctctagagaaaaccccacccgagaaaagttggactacatagttcaagcgtatgtcggcaagcaaaagagttcactgggacgaaattggaatcggccaagcactcgacctcaccatagcaaactcgaccaaagatgaacccctgatggcagctgcctcttatttctggtcaaacaccatcaatgccttcttgtttaatcaagggccgatgaccccaactctcatagatatcagcatgatcacgggcctggatgtcacctcatcggccaaccctatgagttcgaatacgaagaaccaatacgacttcaagaccaagagcataggtggctggtcaggctatgtagcagcatacaagggccaaggttcggtcacccctcgagaacatgtggctttcttgttaatgtggctagagaaattcctcttttgtggatcaagctgtggtcctacaaccaattggcagttcgtagccgaagccttagagacaaaaagacaatttcctttaggcaaaatcctcctcggctacttgtaccaaatgctaaataatgcatcggctaagttagctgtcggctcagtagtcggagcagatagaccatggtggctactgcaatcctggctaaatttggtagtcatgaggttcgtcaattagccatctgtaacagaagctgaattcccaagattagagccgattgtgaacaatgacggagaagaactcactcatcggagatgcacatcctatggagagtatgcttctacaccaactgatgcaggagcaaagctatcggctgagctactcaaagattggttttgcagcttttttgaggggttccaaaaggatgctcgagtctggtttctctatgaagattcaacacttctggaaaatccattggacttcagatttgaagacatcaacaatgacatatatcaaaagcccagagaaattttctcatctgcaatcagtccgtgtatccttcctgtcggcatccatcaagggagaaacatccaagtttcctatgagttttatcatccaatgagttctgccagacagtttggaatgggctaactcctaatcggcttattctttgccgataagatccagtgccgaggagaaatctcatcaaccttaatgatggatcggctgcttaatctccaagaacctcctctaggcagcattgacaacataaagctggcaaccttcagaagcaaagcatttgacagatggtggggcgaatggaagccgcacttattccatcaatcggcttctatgtatatgacagacctctttccagatgttgtccctcaagtaagtcttaactcacttgattttcatttgaataactacttaaccgattaatccttggctaactttccttttgacttgcagacaacagaatcctctcctcctatccagagcaacagtggcaaggatattgagtttgccccaggattgattcccaatggaggtgggccatctccccccgtcatcggctataatgcccccaagacttcagctcttcttcaagggctcatcagagaactagccgatgccggcaaaaagaggaaaactagatcatcggctgtagatacttcagccccagctccaaagaagaaaactaagacgaagaaaaccacgccagctgatgatctgcctgctctagatccatccattgaacaagctctggatgaagaagtaattgaagacgatgttgatcaggtcgcagccgaagtaagcgatacataaagaacaccatcggcttcacccaagcagacccctccaactccttctgctctagtccacttttcaagagtaagcaactctctttgatccctcttgtaatcattttaccttatggccgattactcacagatttagtaattgcagaaaaagaagactgctgtgaagaagaaatcggctgcaacaacatctaaaccagctccaccagtaagatagtctcaattcttttcattagttaattctcagccgattttgtctaacacttgtctcttttagcctccttctcctccttctctttctgtacaacaatcatcaagtgaccagactccatcggctgtagtgagtcaccatgtggaagaagaagttcaaccaactgctcctgctatcccagtaagttttctttgacaaaaatactcagatcggctatgcctatttgatctctaactctctttaaatcattgctgcaggtcttagccgatcttttctcttttcacatcagagattatcttgatgaaggagaataagacaccacaagcaaagccttagcccctttatccgatgatgtgaagaaaattctagaagatatttctcatcggctagaagcatcatcgctggatagcttgctagttgattgtggctcaattaggactcggcttcatgagattcaagctctgatcccagatgagctagctgatatcctcactccagccgtttatcttgagcaacatcaattcaaactggagaaaaccaagttaagactggctgaacggcagaagcacaaagatattgaagctacaattcaagtcaatcggcaactggtgcatgaagaaaaagcaaaacttgatcaattatctgaaggtccgatcaggtctaatattgattggcttgaagctcggaagattgagctcctggcacaacatcaagaatgcaatgccgagctagacatagaaaataaaaaactagccgatgtcccaaaatctgttgaagagcagaaggcaagactaaaatcggccataaaaaatgttgttgatctgaccaagtgtttaaaagtcatccctggaaccgatgctcaagacgccctagccatagaagaagtagaacaaattaggcgaaaagctatatcggctatccagcgatatttgtctcagtgactttctatgtaatagaccttagaaattttttgtaatcggctaagatacttccgatgtttatcctgacaatcatttgtgccgattaatctaacttccaaatttcgctcaaaaatttgctaaatttgcatcttgtgaatatatgtgcccccctaattttgtaatgacgaaggcattgagaaaattataatctggactaagggcgatataaccatatcggccattgtacatcggcaaaacagaaccgattacaatacaaaaacagctaagggcgagataacaatatcggccattgtatatcggcaaaacataaccgattacaatacaaaacaactaagggcgatataacaatatcagccatctcaaggcgatgtaaacacatcggctatcatgcatcaacaacactaacagatcatgcgttaacccaaacacttgggtaatatttgttcaagtacttgccattgagcgctcgtccatagacctcgccatcaagccctcgcaacatatatgtccccttagacacaaccttatagatttggaacggtccttcccaattcggtgaccacttgccgaatttgttatcccgagttccaatcggcaaaatcaacttccatacaagttcaccttccgaaaaagtcttggataccactttcttgttgtagtgccaagcaactcgttccttatctttggtaaccttagcaagggctcgcaaatgcgattgaaccaagtcctccctttcatcagccataaggttataatactcatcggccgtcaaaccatcttgcaattcaattcttctggagccgattctaacttcccatggcaaaacaacttcatgtccataaacaagtttataaggaggaacttgtatcgacccatggcaagccatccgataagaccacaatgcttcggctaaacgagtatgccattgccgaggataatcaaaaattttccttttaatcaacttaatcaagctcttgttagatgcctcggcctgcccattagcttgtgcataatatggtgaagaattcaataatttgatacccatgctatcggcaaactgaacaaattcatcggacacaaagattgagccttgatcggtcgtaatggtttgaggaataccaaatctatagataatatgttcttgaacaaattgtatatcatccccagaatcaaccttcttcaaaggaatcgcctctacctacttggtaaaataatcggtcgccaccaatataaacttatgccctttacttgaagatggattaatcatacctatcatatcaattccccaacctctaaatggccatggtttaataataggattcatagccgatgtcggcgctctctggatcgccccaaatttctaacaatcttgacatcctttataatatctgaaacaatcttccagcattgtcggccaaaaatatccagcacatcgaagcaaccacttcattttatgagccgactgatgagtgccacatatctcttcatggacttcaccgattgcaacttttgcctggtcggcactcaaacatttgagcaacaccccatcaatcgtctgataataaagctcatcatctagcaatgtatacttcaacgctttatatcttaatttccgagaagccgattgagatggatcctgtaaatatcgatagacatcatatctccaatcatcggctgttatggcgacaacttcaatcttaacatatttgatcatcggcttatatcccgatgccccttgggctaaatcagtagcttcaatattctgctctcgaggtacatgcttcaaagttactagccgaaattccttcattagttctttggcacttctcattataaaccattaacgtatcattcttgcactcatattctcctgccaactgactgattaccaacaaagaatcccccatgatttcgatagcaccggcttcaacttcctttagtaactgcaaccccttgaggaccgcctcatactcagcttgattattagtcgcataaagtttaatagtataagcaaactcaaaacatgccccccgaggggaaattataactaagccgataccacaaccatgagtacaaactgacccatcaaagaataaagtccatggcacaatctcatccgagccgattgaatcatcatgatgatcaacaataaaatcggctatagctggccctttgatcgccttcggcgattcataccgaagatcaaactcagtcaaggaaaatatccactttccaatccttcctttcaaaataggagccgataacatatacttgacaacatcggccttgcatatgacagtgcattcattggatagtaaataatgccttaaccttgtacatgaaaagtataaacactccacaggggaatatctagtctctgcatccaagagccgacggcttaaatagaacacaaccctctcctttccttcgagcttctgaatcaagaccgagccgattgacttgtcaccggccgacaaatataaccgaaaaggtattcctttctgtggaggaatcaaaactggaggagaactcaaatattccttaatattatccaaaactttctgttgttctgccacccaagtaaactgatgatcggccttcaatctcattaatggtgtaaaaggctctaaccttccagacaaattagaaataaatcttcaaacaaaattaattttgccgatcatctcctgcaattctgtcttgttctctggaggcttaatcttcttgatcgcattgacacttctttgagttatttcactccccctctcatgaacaagaaatcccaagaactggccagccgatacaccaaaagcacacttcgtcggattcatcttcaagccatatttcctggttctctcgaaaacttttctcaaatcggctacgtggtcctttatttccttagatttaacaaccacatcatcaatatagacctcaaccagccagccgatcagatcatgataaatataattcatggccctttgatatgtggctccagcacttttaatccaaaagtcatcactacccattcaaataagccgattgcaccaggacatctaaaagccgtcttatgaatatcttcctcagccataaagatctgattatatctcgcatttccatccataaaacttaatatcttatgtcctaaagcagcatcaaccaactgatcggccactggcattggatattcgtcctttggggtagctttattcaaatctctaaaatcaatacataccctcaccttgtcgttcttcttgataacaggaactatgctagaaacccattcagcatatcgtcaaggacgaataaaagcagcatcatataaacgcttaatctcagccttgacaggttcgagcatatcggctttgcatctcctcagaggctgctggtgcggtctaacccctggtttaataggtagccgatgtttgacaattgatcggctgagtcctggcatctcataatactcccaagcgaagcaatctctaaattctttcaagagctctattagcttggttctaaactctgaagataagttcttactaataaatgtcggccttggccgatcgcctggacctatatatatttcttccaaatcatcagccgacatgaaaccctgaccttgcttgtcatcgagatcatctactgcgtccttggtgtagacgtttcaaccctccacaatgccatcaaaataatagcttgggttctccatcttcaattggctatatatcagaatcgaaaacttttagaaaatctccatcccaaacttttccagataaacaatcaagaccatccatctcccaaagagctaaatcggcactggcaacattgactgtcctgttggctggcacaatctctatcttgttgcattgccattgaatcaagcattgatgcatggttgaaggaatacaacaattggcatgaatccaatcccttccaagcaacaagctgtaagaacccttcccatcgatgacaaaatatgtggtaggaatagtcttgctgccgactgtcagctccacatttataacacctttggtttctgatggattgccaccaaaatctttgagcaccatgtttgtcttgatgagatcttcggcgtttctacccaacttcctaaacgtagcacaaggcatcaaatttactgcagccccaccatcgaccatcgtcttagacatcggcttcccattgacatagccatttatatacaatggtttaagatgccgattctctgtctcctcaggcttttcaaagactgcctgttctggtgatagaaccaacttagccgattcttcttctacttcgtcgacatcggcttgttcgatcccaaattcggctggcaaggtaaaaaccatattaactgatgccgttacaaaacttttccattttgccaacctctctgcctcgtcggctgcaatatcatcggctccaggagcttgattcttaacgcgccactcctgcctcggctttgtcttctttagtcgatgactaattacttgctcgacctcctaaaaacgttctctgctcctcaacctttgaacccttcttttctgattctttgtaaaaataccagaaggacaccactgaatcttcctatcttcatcatcctccgggtcacgatcctggtttaccgggcccaatctttgatgaacaggaacccttgcatgcttcagccgattgccttcactatatgatcggcttgaactcccagtaacatcacctcatccaggacagttctcgatagatggtagcctcataccctcattccagcagaatctaaagaactcacagcccaacgaggataaaaaccaccattatcctcttcataacgcctctcctgctgcttgtcgtatttcctttgatacttgtttataattttagccgaattcacctaaaaacctctcgtacgtcccgcatcggctgttcggctagatgtgtgcaccatgttaacaggaaaaggattaccatcaaccttcatcggcctcttggaatcatcaaacttaatcttgcctccctcaatggccacctgaatctgttgcctgaaaaccttgcaatcgttagtagaatgagatccagaattgtaccatttgcaataccttcttttgcctaattcctcagccaatggaatcgtatgactagcagagagttgaatttgcttctctcagagtaacagatcaaaaatcttgtcaaccttggtaatatcaaagtcatacctatcctcttttccagaattcattacccattggcatggtattacccattcggctgcagctatttcggagtcatcatcatcatcatctgacacatacatgtaagggcaaacatgattaaccttcttagagttcttcctagcctctgcagacctctgctcgtgcaggtttaccttttgtataagatgtgacaaactatcaaagtcctcagatgagaatttttccctaatcggagcaatcataccctgaaaggccaaatcggccaattgggcgtcagtcaagctcaagctaagcacttattcctcatctccctgaacctcttaatatactcatgcacaggttcatcatgcctttgcttgatcgctgttaaatcggacaatttcatctcgtgaaccccactgtagaaatacctgtgaaattgcatctccaaatcggcccaactgttgattgacccatatggcaaagaagaaaaccaagtaaaagccgatccagacaaggacaaccggaacaacctaactctctgagcatccacagccgatgcttcaccacactgagctaaaattcggctaatgtgctcataagttgacacaccatcttgtcctgagaatttggaaaaatctggaactttgaaccgctttggaaggggaactctctcaaaccactcagggtaaggttgccaatacaagtttccagtatcttttggtttaagcccgaactgttccctcattacgtcagcaatcacatcggcccacggtcgttgttgagctgctccttgcgactgttgttgcatgggctcgaattgactgtactgaggagcaaactgaggttgagttagccctccttgctgatattgggcttgcggggaaggaggttgatattgatagttcaaattgccccctggtaattctggtagtttggctgaatatttcgcaccaagtgttcagggacaatatgaggtattaccgtatggtctagctgcacatgatggaccaaatgctctggaacaacctgattcagagcgtgttgtccagccgatggattcatcaagccttgctggtgaatcggctggatagcctactgtcttgatggcgtttgttgaattggctatacaatctgctgccttggtggcgtttgttgaactggctgcacaacctgttgctgaactggctgtacaacctgttggatcgggggtgtttgttgaatcggctgctgctggactggatcaacagtaggttgaggtggtagaaacatggcagcaacctgatcttgagttagccgattcgcaacctcccactatgttgtggttgctccctcatcaatagccgaggattaaccagctggcctggtgccgacgctgatggagcaggtgggggagtcgataccggtgccgtcggctgagctgatggtgcaatgggaggaactgttcgaataggctgagtaatcgtgatcaaaggcctataatttggaaagacacctccttgcaaataaactaggcctgtagcctgatattcagctattgaaccatcagctattgatttcatcatgtttgacaaggtattgactaacaccctagactgattaatcaaagcattgtgcatggcataatcaacccgtcttggaagttattgaaaaactcctgtgatggattgccatcctgattaagatttcctcctaaagagatagcggaatacaagaagggctttcacaagaccaagttgcttactgtcgcagagtacattggacgagcctgctgggcgccatgttcgaggagtcgtagcgcgacctcgtcgacgcggggttgatcgacggcgggagcatggacagcttcaacatcccgtcgtacgccgcgacgctggaggagttcagggaggccgtcaaagctgacggttcgtttgccgtcaaccagctggagcacgtgatgggaagccgtctagccatggacgatgacccccatgaccgccgcgcggtcgggcgcagggtggcgaacaaccagcgatcaatcttccggccgctcgtcgaagtgcacatcggcagggcgctcgccgatgagctgtttgtccggatggagaggcgcgcaggagagctcgccgaggagctcggggacgagatgggggtccacttccacatcgtgtgctcgctttcactcgtctgacgatatctacatcgtacactatccaaataatgaaaaaatatattcaaattttgggcacaataatttaaatataataattgtatttgctaaataagtctattggaaatatggtcataaatcggcatattttaattcagaaaaacaaaataataaacatggcatgcgagtaggaaatgatccagtgctagtgctaaacataaatatggtaagagcaagaaaaaacatctacaaacatgtagaagggctttgttgctcaaagacaagatgttgttgacagaaaacacgaggcctgggagatctgcttaactccagtgcaggtccaaaactcaccttcagatgtatgagcttgccactcgatttgatcctataatcaacaagaaacaaagacaaagaaaccgtggttaaatccataaatgatagccaatcggttaggtgccgatgacatatcatttattttaggccgatgtcatatgtgcatcgatcggcaagtattaataagcaaatcaaaactaaatctactcgatctgccgtagatattaatgatatataatccttgtatcaatatatacttaaatctagtgattgggatagatcagtcgccttgccgagacagtacaaatcgcttaaatcgaaatatgtattaatagttaggttatatgtattcgtagcatagccgatcagataaatctagcgtgtatcggctaatactccgataccactctaaattaagatattaaagcaagtagaatacaccaaacaaaatcctaatatacttaaatgcaacaagatcttaatataaagggcagatttaacatgtcaatcaagcatataggataaaagtagttaaatcaggtaagatcggctgaaactccgatactactctaatcggcaaccagaaggcaggctagatattatggttctaagcacgacttaaaagatcaaactcaactgatgcagcattaagtataaaaagaagaataatatcttgacaatcaagccgctggatgtttcaaggagtggtagatatcttacataatctaagccaatgtcgctatttaacctaatcggctgccttctaataacagatgctagccgattataggctagatgatgatattatcgaagattatatgagatatatgataactcgacaaattacataaacaagattagagtatcgtaaagatggaagcactaatcccgagaacacaagccgtcataacaagttttaaatcttgttgaagatcgaaaccgatgcagctcaacccgaaagcaagaactcgtcgaaacaaaacgaaagtaaaaagggtggcgatgcgccgagattgtattgcacgtctgttattaattacatagggctcagggtctatttatacccgagaattacaagatatgtccataccagacacgactattatctctaacaaactctaagataccataagtctttgcggcagacttttgcccatatttatctctaaggaatttacataaaatattctaacccagtctgacaatcatctcgaagcacatcaattcaaacccgatgtcggatatgagtcatattgtcagaatcagctgtatcacttaacccagtctgactcggtcttagccgatctcagtcgtagccgatccgaactccagccgattcttactctgcttctgcgataatcctcatcttcgattccgtttcgatctaatcttcatctccgatgctgatattaccaaatttggtcgttaacagatgcctaaagagatagcagaatacaagaagggctttcacaagaccaagatgcttactgtcgcagagtacattggatgagccttcttgaaatttcaacataaaagagtcataaaggccgcatacaactttaactaagtccagtagatttctttgtacatatatgtgttatttcatccgtgactaacttcatcgtcgttactatgtagcgatcattatatttgtttgatgatctacccgaagtacgacaccgtgacagtcttggacccccttgattataaccacatgatgtaccgtcaatttctaacaatcttcaaatagtaagtgatctgataaatgcatgtctaactttcatgaattataattaaatctcctccttaatgcgaatctgtaaatccatacaatgtgtataactactacaaggtaaaggtggagaactactgcaaacaagggagaaaccactagtgcatacatactggccagtaatactccacacacttaatgtatttcaattgttttacttgcaatatttaactagttccttctatgtgtatgtcatgaagtgtcacaagcaacttaaaagcggtgtcctctgcagttattacacatgcgaattcctcagggttaatgggaggtacatgaccaacgcagaggatgtaagtctctcgactcaacgtataagtgcaatggagaactgcacatctagatgttagtaatatattgtcgttttttcgtgcatgcagttgcctagaattgaacatcgaacaagctttgacgatgaaggcattaaaaatgtgcagcgggacctctgccacttcatccacaacgagtgctgtcatatccaaggacggttcttcgacccagaaggcaccctagcgacaagcgatgaatacaagtctcttcgggagtggaacaacgcgatgccataatgtatttattaattagatagtgcatttgaaatgacaaatataaaaaatattgtaacatattgatgacacttttcactaatgcaatatatgtatttttgtcagtattaattgtttgtaagttcctaatattatttatgcattatttaattagttgcaacattattgataaaaaatattattaaaaaattggcgtgtattttcctaggcgacgaggccttcttatcgcaggcgactcctacccattttcccaggcggcgcgtcgtgctcccttccacctaggaaaacatcttcccagacggaatggccgtccacctgggaagactgttttcggccgtatgcaaaaacattttttctacattttttctagtagtgaaggagaataaatgaattaaatatgaccacttggctgccttttgatgatgacggtttcgtcgtcggagagaaaattgccttattctggaaggtcaatggatgagaaaatgtattcacttggtatacttgctggatattgcgtgaggacgggtgaaatgtaggtccctattgacatttctttattttatgatttattttatatcagttcaaaatataggcattatggatcttcaaatcattggtttagttagattagaaattatatgtatagcttaaaaattatgcatattttaatatttattattatttttcgttatataaaacaaggaggggtacagtggacagctcaaaccgagaggggaggggacgagtagtattgtgtggtgtgcatgtgtagggagggcacaatggaggggtgtttttttttctatttttctaaataatttaagtgaaaactgatggtctaatttttttctctaatatatttttttctaatttttaagacgtaacacatgaagcggtttaagatttttctaaaagtatatatgttagttaaaaataatgaatcatctattcaagggaaaaccgatagtcaattttttttacaatctctaagatttttttttctacagaggatgtacttgtgatataatacttattgtcatttttttaatttttttgttcgttttgctatttcgtttatgttcaaatgatgtatttgtttttctaaatgaactatgggtaatgtggaccttaaattatttatttaactataaataaaataacaattcaaacaaactaaaaaatcggatgtaacttaagaattataattattttactttctaattattgatcgttttttattaattagttaaaagttagaagaccaagaaattgaatgcctgaataagttataggaaacttcccacttcgtagtcgtagttcagcatatcagccactctttcttctttgtctttatcaactcttacctcaaaaaccttttaattactgtttatttcagacaaagcaacagagcagaaattttaagagcaaaaaagcagagactactatattatatatactagatatacgcccccatcaaatctactcccgtagtgttcgcacggtggaatcaagagaagatgcaagcgcaggacgtaaagaacgtcttctgcatgaagggtgggcaaggggagtccagttacctcaaaaacagtaaagctcaggtaacaagtaaaactaaattaattacctaaatgccacaacaatttattgaagtttaaattctccttatttatatacgcaaagaattgatggagttcaaattcagcatgcaactttagtttcaaaaaaaaaaaatgaaatcagcatgcaagtagaggttattttgtttcctaagcaagttccttccctgtgcttgatcgagcgaaactggcaacaaaatgcagttgagaaacctgcaaatgatgctgtatgccctggaggagacactggacacgatcccgatccctccccgcgggccggggaagcttcttctgctgacggcggccgacctcggctgctcctgcggccgcaactcgcacgtcgtcgccgacgcgatcgtgcagcacatgaccaagctgtgtcgcgg
